United States Patent Application Publication US 2008/0114160 A1 - sequence listing, part 24

SEQ ID NO: 7402 - DNA, 15500 bp, Oryza sativa
ccccccccccctctcctctcctctcctcctcacaaacataaacacaaacacatcaagagcaagaacaccaagagagagagaaatcaaactccaccacccaccacgacatcgagctcgcaagcaagaacaagattgcaagaagaagaagttgttgttggtcgaggcgaggaggaggaggaggaagaaggagtttgtgtgttggtgttatgaggtgttggattagatgagaggaatgccctttggtgggagcgcgcgagaggggcacgcggggacactgctgcaacaccacctcatacacggcgttggcctcgccgcggccggcaagctcgtctcctcctcctccgccgccgccgccgccgccggagcaggtgggttctgggagccaaggtcggtgctcgaccaccgccacagcccgagccccagcccgcctacctcggcttccacgctgtcgtcgcctctcgccgacgtggcggccctcgccggcgccaacgccaagaacgtctccgtctccccgccgccgccgggatggggaacgggaggaggaggtggtgggggggaggaggtggtggcggccaacgaggagtgggtgcaccagctcacgccgcttgatatggggctcggcgccggcgaagggtgggatgccgccgggaacgtgctgtccgacgcggcggcggcggcgacgtcggggatggcgccggacaacacgttcctccgctggatcattggcggcggcgaggacgcgtccgccgcgatggcaggggtcatggacccgccggtgctcgagctcgaccatggcggcggcggcggcggcgccgcgcccgccgcgttcgggccgttcgcgccgccgccggccatggaggacacgaagcccgtggtgccgttcgcggcggggcaccccccgccgaacttcctcctccaacaccaccaccaccacccgcagccgcacgcggcgttcttcggcgcccaccacccgtcgttcgacgcggcgccgccgccttccaagcggcaccacccgatggccgccgcgcctgcgccgaagctgcctccgttcccggcgggcgggttcgtccccgccctgaagccgaaggcggaggcggcgaacgacgaggccgccgctgcggtcgaacagctagccgaggcggcgaagctggccgaggccggcgacgccttcggcgcccgcgagatattggcgcggctcaattaccggctccccgccgcccccacggccgggacgccactgctccgctcagccttctacttcaaggaggctctgcgcctaacgctctcccccaccggcgacgccccagcgccatcggcgtcgacgccgtacgacgtggtcgtcaagctcggcgcctacaaggccttctcggaggtgtccccggtgctccagttcgcgcacctcacctgcgtccaggcggtgctcgacgagctcggcggcgccggatgcatccacgtgctggacttcgacatcggcatgggcgagcagtgggcgtcgctgatgcaggagctcgcgcagctccgcccggccgccgcgctcaaggtgaccgcattggtgtccccggcgtcgcaccacccgctcgagctgcagctcatccacgagaacctctccggcttcgccgccgagctcggcgtcttcttccacttcaccgtcttcaacatcgacaccctggaccccgccgagctcctcgccaacgccaccgcgggcgacgccgtggccgtgcacctccccgtcggccccgcccacgccgccgcgacgccggccgtgctccgcctcgtgaagcgcctcggcgccaaggtggtggtctccgtcgaccgcggctgcgaccgctccgacctccccttcgcggcgcacctcttccactccttccactccgccgtctacctcctcgagtccatcgacgccgtgggcacggacccggacaccgcgtccaagatcgagcggtacctcatccaccccgccatcgagcagtgcgtcgtggccagccaccgcgccgcctccgccatggacaaggcgccgccgccgccgtggcgcgcggcgttcgcggcggcggggttcgcgccggtgcaggcgacgacgttcgcggagtcgcaggcggagtcgctgctgagcaaggtgcacgtcagggggttccgcgtcgagaagcgcgccggctcgctctgcctctactggcagcgcggcgagctcgtgtccgtctcggcgtggaggtgctagaaagccctcgccgccgtcgccgtctccggcgagcggcgcagccgtggagccgacgtatcaaggagccgcggattttagttagggactaatgatcctgctacttcttcctctccaagtgaaagtcaagtgtttttttaccctttttgtgtaacttttttttactccttttttcttcttcttctttgtgttgctgtaatgatctcagctgagctgatcagtgagctgagtgtcctaagattgtcgtgtcaccttgcagcttggctctgcttctgcttctgcttgtgcagatgcagagtgccatgtcgcaatggtgttgtactggtacagtagctggcgcattctacttcaccatcatccatccatccatccccctgtgttactactcgattccccgtgaaaatcaatggctatggcatttgaaaatttgttcttccattttgatcaccagctttgacatgttttttgtgtcgtattctgaattcctgtttgtacaatttgtgcagccctcttatcaaagaaagagagagaaaacgatggaatgtacacctggttattgtattagttgtaaggactcctttgaaacataagaattttacgaaaaaatatgtagaaattatagttcagttcctacgattcttatacgaaaaaatatgtagaaattatagttcagttcctacgaaatcctcgcgaattcctctgtttataaaagagtgcaaaaggtattaaaaaacgaccgatttgtggccaattgacttacacttgatttagaaattccacgaggaatttcgcggaagtttcgtaaaatccattacattcccgtaaaaccgagagagaaaaaaatttcacgcaaaaatggaatacacgtttatgcttcactctccaagagtaataagacaactggaaaggtaactagatagatactagcaggcaggattagacaagaatttgcgtgtggttaggacgtaggagcacacgagaaacgttcaggttttccgaatagctctacaaggtggttttattcgaaaccacacttcttctatttatttgatattatgtttttctctaatattcgtgtctttttaagatatagcagcacacacagttgcaaacagcagcctccggaggtagcaatcgcgaggtagaactagaagaaacaaggattgggaataaagcggccatgggcgacccaagcaagcataaaggcgtcagacaatttcttttagctcctcttctacgagtgggattctgaactgcactcgcccagcaacaaacaagccccctatatttgacagacttggctaatcaaagctcaacactagattaggttagttgccttgcctccttagctgttaatcataattcatgctacatcatgggctcatggcttcttcagcaatgcatcttccatctactcataattctattataccctgtctgcctatgtagtgtagtagtagtagtagtatcgtttatctatcaatatgttttggtatctgtcacttcttgttctgcataatagtatatattgtccatacttcagagatgtgtacagtttgttactgtaatgtattggtactatactagtattaatacatttattggattactgaaaatgattaccaataagactatagatattaattaaatattttaataaataaacttaacaaatactagtttaggacaagagatctaaacaatactacatccgtcccaaattagtggtcgctttgacttttttttattataacgtttgactattcatcttatttgaaaaattagtgcaaatatataaaatgataagttatacttaaaatgcttttgataataaagcaagtcacaaacaaaataaataataatttcataatttttttaataagacgaatgattaaaagttacaaataaaaactcaaagcaataagtattttgggacggaggtattacagcgtaagaaattatgttttaagaaaacgtatcatttatctattaatatgttttggtatctgtcacttcttgttctgcatagtatactgtccatgcttcagacatgtgtactgtttatacagtaatactatggtaacaagcctatgtaaaaaaaaatacagagattagccatgcaggcaatgtgtactgttgccattgtctgggcctcatggtggcttccttgttactcaaacgacataattaaaagcatacttaaacattggctcctttactgttaatcaatgcagctgaagcacaccaccatcctgttactgttattgctttatgctcctgccttgcacctctaattctgtttgcactggaccacaggggagtgatgatttgtcaatccgaactcaactgtttggacacatgacagcctaactaattaagctctctaatctgctccttccaaactggaaggccacatttaatttagattattgaacatattattgtgaaggactatcaatttaattatgaggataaattaaacattttcagagacaaaattaacaataacatgaaacaaacaaaaaaaatctaagcaatgtaatagataaagtttttcctttcaaaaactcatattttccgaaacatggaaaaataatccggtgaaccaaggccgtgtttagtttccccctattcccaacttttcatcacatcatatcacatcaaaaactttcctacacacataaacttccaacttttttttcaaactcccaactttcttcaaacttctaaatttttttaggaactaaacacaccccaagctgaaaagaaccaaagggaagtaggaggatatgggggagagaaaaataaaatcctgtcagaatataatgtcagtctaaaagcttcagataagggcattgcatttggcaagcactgttgcacattgaagaacatatggtgatggggtgccaacgcgttttgtcttggttttttccccatctatcatgacagaattcttcactgcaacatgaaccgaatccttgcttgttctccagctgctgcctctgcctgtgctggagatgcaaaggaaggggggcaatcatggtgtaaagcgtccatgctttactgaaatggcggcaaagcatcttagggtaaggtgattagggtaccgaattcgtccacgttttgtgcaccctggttaacgatggggaataaaacatcctctccaattagcctgaggttgagaataatattgtaacttgtaagatatagatggcatcatcactgagcgagtgagactggaaatcacctcattgggtttacaagagggcaatgtatgctcaaacttatggatgcaagtccttgttataccatatatacattttttgtggttttgaggacttgctataccatatataaattccatcgatgacatttacatcaacaaaaacatttataacacgagtttaaacaagcaaatatcattgtcatttcaagtaaaatcactatgaacagtgttatttgttcgatttcgaaaattaaggatgaaaatgtggtctttttagtttagagtgaaaatatactttgagcaaattttaaagaacaaatgaaaactttctctatctcctagcatatctcattgtctacttgttggcctaaatttggacccaaagttatttttagttactttcttttacggcttaagttaatgttctttttcatctcctgttctattaagtgaaaaggtactcctgtgctgtttttcgttcaaaaaaaaagttctctttcatgctactcaccgaattactgaaacggattatttactgcacactttgaaaagtacattttcttataaatctgtcacctaaccattgtttacaccacttatttcaatcatacacaataatccatccaatgatctaaatcacactactctattaggacaaaggaaaaaaaaacaatagcaccacaagaagcataacagagtggaagtcaggcagaagatctgtccaaactccaaagcttgcaatgcatttgcagccaggattggagttcaccaagagagcatggggctggaagacgaacatgtggggccattcccaaaaattttcatagaatccctgcattgtctctcgcagtcactgctgctcatcagcctctcacagacctgtttgcctgctgctgctctcttttcatgcagtgaacctgttgaccacacacacacacacactgactgggccccgggccccacccacgcctgcccagcatcggtcagtgaggacttgtcgatccgatgatccaatccgtgtcgggcggtgtggcgccaccaaactggcgtgtgggccccacctgccccaaccctttgccaccatggttttagggcacggatcctatgccgtaacgggcccacgtgtaagtggctgtcataaactgtgtgtggacagtcgtattgtagagaatccttattaccggtagtttcaaaatgcgaccataaccgcttggtaaagttgtgaacttgtcatgttcaaaataggctttgttcggcagcgattgctaaggcgcaagtccacgacaactaaatcaatatactcacccgtcttaaaatataaagattttagttggatgtgatatgtcctaattctacgaatttattaatgctttacgttcagattcataatactagaatatattatatccaatcaaaatcccttatattttagaacggatggagtaataaaagtactcctcagagctgtttgaagtctatttgtaattggatttcaaacatggctaatattgaaagtaaaattcaaatcgaaaaaaatgtttagtttcatctttttatctttcattattgaataatgaatggtaaccggggtttatgaacggagccgataggaagtggtaaacgtactccttccttctgtccaaattcataataattgaaacattatatcctgtattagatagttatattttaagatggacataatactttgtaaaacagtaacaagtcgcatttataaaccctgcttgccgctctactttttttttttaagtatacattgcttgctcatgctcggttgctaaggcatgtgctccataatttggcgtttgccatggctagatctggtttgatttcccctagtttgtttaacatccgaataaaaaacttaccagtctaaacaaatagcagtagtgttttgttttgtttaaaggctaaacaaatactttggttggcagaagtggccgatgcatgccatcgatgaactacgcataaacaaatctttctactactaacttagcttgtagccaccaacaagcagcctcagattacacaatacccacacatgccttcccccaaagtcccaaaccctaaggtacaggcacagccacaccgaactcccatgtgtagcgtgccaatgtgtcgacttgttgccaaacagctacacaagaatgcatgtggcttgcatcactcactcatggcatgttgcttcttggcctcgccgttttttgtcctctcctaatcctcactcaattaccttacctagttttagttactccatccgttccaaaatataaatatttttagctataaatctgaacaattgattcatagaaaaaaaatgttatattatgggacgggggagttactaccttacccccaactgctgcaacgatgaacagcaatcttttgtatcatgcaaaacaaaaccaaaatcctcaccgtgatacaatgaagtagtaggagctaaaatgctttgcctgcttccatcggttgagatggagcttttgcttgggatgagctcccagtttgagccacaccgtttgtcatctctcttctcgcaatgcaacgccagctcgtctcgtgaagatagggggacactgaacagaacttgactggacttcacttgtgatgtttcaggacaggcacatcaagaacagcagcagcaacattggatgggtacaccactttaacctgggactcagctccagaatggccatggcaccgcatgcacaaaccggataggttgagatgggctcactggagagtcactggagagccacagtgtgcagcaggagcagtagcaataggtcaggttaacatcatagccagcaacaaccagcctcactgttctcttgccaacactcttccagcttcccactgtaacaagaacaaccccaccgtgtgccgctgacgggtgggccagtgacggcgacggccggcgacgtacgagtgcccgtgacacacgggacggcgatggtgcaggccggccggcagtgtgcatccaatccaacaaaactatctgtcccggccatgctcacagtcccattctgggcacaaaccgcagcagggaccgcgtgcttgtcatcactcttaaaccggccgagcttgttgctgcactgcatgccttaacactgtttcctcttcatcgccactggcaggcaagtggccacactggagtacgggacactgcaggagcaaactggcaagagacctgcatagtagttacagagatggatgttaagcttgctgataaattcagaaaaaagtggtaccacagttcaaaacttcaaagtaagtgaggccaagatccagtctcagacacggtgcatctttcccaaggcgtatctgtactgccaaaatgtaccatttctgacgaggtatttcgtgaatcattattcctcagccatccaaattgctcgcaatacaaaaacaggctaaaatgtggtttgtgccggcgactcgcaaagcgcccagggacaagagttcgctttattcccccctccaacatctgcacattttagtcgtagcttggtttcacacctccaaccgttaaagtaccacgaatcaatcgcagaaagaaggtgcactgttggtttaattaagcaggacttgaaagttcaaaaccagggaggggaatcagaagccagtagacacaaaggcctccagatctcattcagacaggttcagatttcattgcggaagccaaataggaaatgcaagcatagtggccagtgagtagtagtagcacattgtgggctcgaagtaccccctcccttggaaagagctaaagatacgcaacttttaagagccaaaaggaaaagaaaaggcagtgagagatgaagcaaagagatggatgtgtcatggtgaagctgccttggagagtgggattcggtgccaactacaaggttgatgcatggggtcgcaccatgcattggccagcctttgtatcctcttttctctaaaatagagtttccgatgaggaaaagatagtatagggctgttaagccctcactgtagctagtaatagcctagcaatatccgtacgtgcaatgcctatgaattgagcttgcagaaaagaaaaggcagtaaaggagctaagcagtaaagaacgatagatttttatctacttttgatcaaaaggaaggaaagaatgaccagaatgatgcattttttttccctacggctgtttcctgggctctctacgatgaaaatcaacagctcgagtccctactcgctactccctaccacgtgaaatgatttcaggactgcaaagttgatcaatgagaattgctattacctctccactaaaataaacaacttaatgatttcaggactgtaaagttgatcaatgagaattgctattacctctccactaaaagaaacaacttaaagataaaagaggtaatagaaatctataatcaatattggggggggggggggggggttaatctgatacaacatatttgcaattcccctcgcccacctcctcctacagtttaaattcactaatgcaggcagttactatatttaagttttgtcgatgtggtgaaaacatggaaaatggttcatttgtcagaaagttcaagataggttttacagaacttcactaagacacataacttaagccaagctaagagtagcataacattgttagccaattgcctggctcctaaatggaagtcaagtcacagtattatacaagacatcacgaatcagttctttgatggtgatggaattgtgctcacaagcaatgtcattcatctgaagtaatagtcatggacagggcataaataatggcaacatggttcaatggttgtctggttgatattacaggtcaactacatatgctatatttatgctgaagaattgcatccactcaaagtcatgttcagaaatacacaagcaaagatatgccaaatagatgtccaaaaatcctagctcaagttggtgacaggattattgatccaccatgcaatagatgttttaaacagtcagttaccttggttatcttcattccaaaattcaatccaaactgtgcagataacttatgttttccccctgagccgacaagtattatatgtatgatctgcataaacactaactttatcacaagctgattaaacttgaatataccttagaaagctccgttgagggaaaacaggcagaaccttcactaatgtcacaaaaccaatgcagagaaacttgtatatgcaaaaaaggaactaggaaacaacatgacaaaatcatcaacgcagaagggaatcaaaggtattgctctcaaatccttcattgctaagagacttccgtgccagcaaagctcatgaagtaagcttttctccagaatataatgtccgtatcaaacatgcaaattttgtttctaatactaaatgcgcaacgccacttgcctatcactaaattgacaaatgaattgacattacaataatatccaataaaaaaaattctgcaaagcaggaatgtatcacaagaaattcgctaatgcgtcaataccgaaccacatgtctgccgtaaggcatctgatcaatgaaaaagaagatgaaagcagatgctctttcatcttcctgaagaaggttcttttgcgaaatataatttatagagaacctttgacacatactttccatgatggctaaagtatgataaatgtacctggaatgtttatcatgttgatgaaccggtcatgcagaatgaggctacatctagactgtgagtattggttatcccatagtttactgcaggatgacatgcatatccttcaggagtagatcatgaactttccagaccagatacaagtgtaaaaacagatgaatgacaaaaataatcatagtcattattttgtacccacgatagtaaatacatgtaacagtaaaggatatagtcaattgctacctgataaaaaatataagcaaatcgataaagctgttcaagagttgcagtgtagcataaacaataaagtaataaacaaggcaaaccaaaaattttaatcccattgaagtaaaatacatgaattatttaattctctctccctcacaacgaatgcatccaagcaagcagagacctgcataaactagtactatatattatagcgaactaaacagattacacttaaggtagcattgcaataagaaaaagtaggtgtaggtatgtacgtgtgcaactatatattgaaaaccttttgaaatatttgagctacaagatacagaaagagaaaatagcttatccttgtttacaattgcagaagagcaaaactaactaattcaatagcaacatatcgatttccctggaaattttaagtgtcttattacttgaaatagggtggtatgccatacaggctacttaataacacgaatactatatcatatttaagttcattgcataaagataatttaagtagtaaacatcggtaggtatgcatgacacacactgtgaaatatgtagctgctccagtaatgtaccatcaaatgcaaacagcttctgaccaaaacctgatgagaggacccttaagaatctcatcagcttgtttgtcaacacttatctccaggtgttcagagataacatatttgatctttttagggtttatcatgctctactaatgtatttgcctgggattataagcttggtctgttatctagaagttcatgttgtttagtcatctttggtttctacaaaacccttgcaaaaatttctttgtcgacttttattcttcatactatatatatttcaatagaactactgttctcctaaaaagtacaaacatgtagcaaaagctgatatttgacaaaactataaaacctgtgcggcttaagagtaacaatctgcatagatatacaaacaatgacataatcacaagggacaggtgctttttactttttgagtaagcccgatcactacagaatacaaccatcttcataggttaagtaatgctacagttaatctgataaagaagaaagagagaaaatccacattggacatggagatgatgaggtcacgagatctccaaagatttcaaaagcagacttatggggagaatatatatggccatatgggagtgcacgaaattacattcactttaaaaagggcccaggtatgacaacaagcttcctaaggtcagtgcaggactagacataaccaacaaacatcgctggagcttcagtatgtattcgatagaaagtgcagctaaaacatggatcagcatttaggttggcatcaatatctgcagaggccatgtaaaataaaaaacctactacattatgaaaataccgaccatgtaatcgattgtatcgaacttggaaagcgtgatatcatacattggtctaacatcagagaagtggacgattctgctaatttctaaaatagttcaaaacagtcagtactgaaaaactaaattccctaagatcacacatggcatgtcattcagctttacaataaatagatacatgcaatactattctaaggaaaaggttttgctgtatgatgctgtttgctgaaggtggttgtgcatttatcagtttggtgattaaagttcgctgtgctaacaaagcctcctacaatagtaagccaacactttcgaataaatcaatgcgtattcattttacacaacatagttccataattgcacttacctgaacatggcccaacaagtgtacagattggaaaagtgacttatcttgcttacaagttaaattcataggctctgaagttaaatcaataataagtacacaaggaacatggtatgctataatctaatacttttgttgcttatacagaagtgtgtaaagatcatcattaaacctactaaattgattgtaaactattagccctatttaaggtataaggtttacatggaacgaactgtaaaatgttacctatgaaacactgaggagagccaatcatccttctagcttgagagaggtttcggcttccctcgccttctacatcctactcttcctcgatatccctgatcgcgcaaccacatcctcacccatgaagctccatccattgttgtctgcaacaacctctatcgacccatccccttccctcaccagcggaatcgagaaatgcagcttctgttgcagtgcatcaacccaataaccaattcccaaaccctgtttttcttcagtctcctgcaccctcaccttggagaaatccctgagcattgtcctgcccctccaagccaccattttaacattacacaggtagcgccccctgatcggaatcgtccttcctcgccctagaatcttcataccaccacccttcttcccattggggatggacggcgcgagccgcgaggccacgctcgatccccattgacctcctcgtccccatcagcgggcgcctcgactcgagattggagctgcccaaacccctctcaccacaccggcgcactcatcggcgcatcctcgtagtcgtagatccacgcgaactcccggctctcgccgcggcgaagatgaggtcgtcgtcctggaccggcgccgccgatggatctcccgctcgcgaagaccagcagcgcctccgacatcgccgccggcgccaatccatccatctgatggagaaaaaaaaaaccaaaaatccaaaccaaaccgatcaaaattcaccttcgcaaatcgaacacggatgcctcgcacgaacgaaattgagatactgggtggcgaattcgatcggagactcgctacttttttgggtggtggattgggtttcgtcagccccgaaacgcgaatccgaaggaatcatcggaaaaattctggggtttttgttcgtagaatattcatatgcttgactggctcactgcctaaaatggaagaaaccaaactggctataggccgaattccaaacagaacatgaaagaaatttgggccttgaagcccaataaattgaggcccaataatacaagtacacctaattagcccagtagcctcggcctgacaaattgtccacagctctcaactagcccgtgatctcaaggcccataataaaaggataattcaaaattctggcatcctcatccacaaaaggaaaaagtacgccgaaggtccctcaacttgtcatcgagttacaaaatcgtcccccaaccacaaaaccagatatatcatatccctcaatttacaaaaccattcactttaggtccctaggtggttttcacccggttttatctgacgtggcagctgagtcagcgtgggacccatgtgacaggtgtccacgtcacctctctctctctcccccctcttctctccttcctctctcatttttcgctccgatgtggatggcggcagagtcttcgacgcgacggggaggagggccggcgtggccggcggctggcaggggaggagcgctgcggagagtagggccgatgcgacgggcgccgccaccgatggctgctgtcgtgcagatggccgcggcggtcgtccccctcaaccgtcggcctcgatgcggcccagcaatccgctcacgtccacgatcctctccgtgcacctccgcgccggggacgcgtcgttcgtggaggtcgtcgtcgcgcaagcgcggccgcgcgggtgttcgacttccggtcgccgctcgtcgacctcctcgccgtcttcgccgcgcgcttctgatactctgctgaggcgcggcgtacctgtgggtggtggcgatgagcgcagcggggtcggtccgtggtcgcgcgcgccgcccatccgcctcacgccgccaggtagctgatggcgaacccgccgccgccgaacgccatgccgtacgagtgcatcacgtcctactccacgctctccgacggcgccccgacgtagtacatctccgcgtggtcgtacttgttcagcacagccaccaggttgtccgggaagaacaccgtgtcgttgtcacctatcactcccagtgcatcgtatcacgtggcacaaccatcggaagagcaccccggaacggaatcatggcagcggcggcgacgacgaataagctccagacgatgcggtggagcgacctcgacgaggacgacgactacggtggcggcggcgacctcagcaccctgctcccaccgcgcgtggtcatcgggccggacgagaacgg

SEQ ID NO: 7403 - DNA, 30856 bp, Oryza sativa
  unsure (1)..(30856): unsure at all n locations
caactaaaaacaggtatattttaaaccaaacttacaagactaattgtcgagaaaaaacttacaagagtaatgccacgatatagagaaccatggtgtaaaaatggccatgccccttctccactgtaaatctcatatatacacacaggttgcccagtcctttccagttcaccttcatcacgctcgtttccttcaggctttagtctttctgattttcgggcatttttgtatacctcatcccatgataataaaggtctttccaccctttcatcaatctgtattgcaaaatataaatttgattctttttataacactagtaattagtattgttcaagaagaatatagagattatgtgaaaacaggaaaaggaaggggggaaaaactggcctcctcaatttccctcctctcaatgtcttcaaagatttcaacttcatttagatcattccagtcagataggctagggtagttatataaggaagtatcattgctatcagaataggtttggttactttcgtgagattcatcgacaagattatcaattatccttgtgaggagttggctgtcatcgtctgaagaactattttctagtgcggcttttgtctcgaaaagatcccataaccatgttctctcttgaagtttagaaacaggagatggtagtttagcgtaggaaggataatgcaacacactctcaagaagcataacatgagcagtaatacaatcataagctaacatgtttttggaaagcagcttcccctccagagcaacagaaaaggctctagctgaaagccttttttctcctaaaatttgtgcaaaagctgaaaccattgtgcttgggtcatcagcattaaaaaggaagccatgggtgccatcagtgatctgaaaacaatgatatattgttaaacatagaagaatcattcaaacattggcaaaacaaataacagctcatggactggatgaagagacatacatattttgttataacagttagatttggcacaatgatgggaatttcagaggccatggaccgcaatagcaaaggagggaaaacaggttcttgtcttgaagaaccatagagaacaatatcagcaaacactaacagattcctaatatcatgagtcagggagaaatgctttacggaaccaagaggaaatcccatatgagaagcaagttcctgcagaagaaattaagatggtcagtgaagccaaatggtgagggaaaaacatttactaccaaccagagacagcacatatttatggaaataaaatagagcacatattcatgacctaacaccagtcatcaaacctccctagtctaacatgctacgatacctagcagttcaaatgctgttgaatagaaattgttgttttctgaagaaaaacataaggaatctcaggtatgttctccagatggcaaatcacagtgacacaagggcttccccaatggatcttgatagaaagtttgaaactagcgaataattattacctggaaagcagagttataggcgtcagtgtcatttccgcagaaaaaaatgaattgcacacccaaatttttagtttttgccatgtccataatgtgtggggctgatgcacgcaaaactgttgcaaaatcccatggtaattcatcaaagaacaggtagctcccaacaaccaaaacaacaacatcatcttctttgctcccatactgattccttgcactttcttgagtatgtgatgagctgtatctttttgttgccaagatatcaactggtgaaccagaaataaccaagaagttcccagtatcaagggccgaatgtaacaactgaaataagatatttaagagtcagagaagcaaatgtttcttcttgatttaattattccagaatctaaaactgacagtcacacgtacaggaaggtagctatctggaaacacgacataagtgcatgcattaaaatgagttctccaatcttcaatatgattaggaatggactggtgcagttcgggatttctaaggaactgcccaagagcatcttcatgaataagccagaccacaggtagaaattggaaaggttcctgcataagactgaacacgatatgaatgtgcagcactgcagaccgaacaaatgatgtgataaagggaaaagaaacacttgggatggaaaactaggaacaatataataacacctgtcctttccatacaaattggatcttttgtcataaccgaatttatactattttgggaaaacttagttctgaaacgttatagctgctcaacactcaacagtcaaatagaaatgatgccaaaagaaagttccagttttataaaacaaacagcaatacaagatagaatgggaagaagaatacaagaccctacatgactatacagaagtaggtctaactgttctctagatttaatatttcaacttctgataacaaaaaaatcaactgaacggaatcaacagtccataaatgccgcattaaactaaattagctgatattttgtagaaccggtgtatgacagttactagcatttgcaaatggtgggttaatacttaacattggataagatcatatggtactggtagttaaaggggcaataaaagagtgggctgttgtccttctatatcctcctatgctatttttactaaatagcaaggcatgaagtagcagagaacacaactacgtaagtatccaagcagttgaagataggtaggttaaaattaacactcacattgaaacgaccattttcccttccagagagcttagaagcacagcattgtatctgtaaaatcaaatagaagtcaaaatcttaaaccaaatcaagtaaaagcaaaagcaaaatatcctattgtaagtttccagcacttactttgaccaatcaatgtacttcaagctcggagggctgacaacatttacatgacaaatattttccaaaatatcgttagctttcccatccgcaaatgctaaaacctgttccatagcaactgaatgaattactggaacaagaagtgttattgacacaagcatttccttttgtatggtgcttaacatataggagttggagtacgataatgaccgccaaacagtcacatgttaaaaatggcaacacaatttctagtacgctattcaatgaccattttagcaaagcaactcacctcaacctcgtaacccagattcttaagactttttgccaaagtagcaaccatcagggactgtgcatttatgttcatggttcccacaaactgaaataatacagagccaaagtcaactctccagcatgtagtttcagtattaaaaattcataagcacaagattaaaacgtgcatctgtctaggtaagcatgtctgttccttccgtttaataatgtgaccagtacagataaataatagtatcgtgcacgcaattaaactattccacatttcatccataatccaaccccgagttccagtggatcatttacaaagctagcatttctcacttggaaacaaaatgtgcaaacaaatgcagtgaaaccactatgcagcgagtgatccattagggtttatataagcgagcactcacgagtgccagcctcacgggcgcaaggccgggccaccaccgccgctcggatctcgcggcctcgagccggctctcgccgtggaactcccgcagcgccacgctcgaggccgagaaccgcatgaccccacctcccccgccgccgccgggccgcggcagaccctcgaccccctcctccgccttgccgccgtcgccgatggggagcagctgccacacgacgagcagggacgccgtgaagagcgcgacgaggagcgcgaagaacaggtggctcggcctgcacgacagccccggccgccgccgcctccgcgacgcagctcctcctccgcccgcggacgacgaggccgcccacccgccaccgcccgcggcggcggcggtggggaggtggtaggcggcgtccgagtgggacccgcgccgccacattggagcccccccacctcgccccccgcgaacggccgcgtcagtgtgcgctcctccgcctccgcgcggccgcgctcgacatggacgggagacggccgatcgggggcgcggcgagggtcgcgtacgggaatccggcggtggcggcggcggcgcgaggtaggagaggaggcggggtagggatcaggagcaaccgccgccgcggcgccgggggggagggaaggaggcaacgaatctgcgtgcgggccgcgtgggtgggggagaggagtgaggcagctgaagctagaataccggagctgaagcgggagccgtatatatccgtatcgaatactaccgtactgtatacggtggggggaatataatactggttgtatttcatacagggcagagctttttttttcaaagaaaaatacagcagactggttagtggagagatgccgactgaaataatgtcaaacagtgttatacagtgatttgatgggttggttgtgcatgtcgatgtggttgaaacttaatctcctgaaaacatactacctccgtcctataaaaaaacgaatctagaaccggatataatatattctaatacgataaatcatacgtatatctaaattcgcaatactagaatgtgtcacatctgatactacgttgatttttatgggacgaatggagtattagatataaagtacaataaatctagatagaatgttagtcaagattcgttatactatgaaatgtcttatccagtattagattattgtattatgagcggagggtggatgaaaattttgtactagtacacaaaaatctataatttttaaccaatcagaggctttcgaagaaatctaaacattttgaatctaacactaatgtggctaaaagaacttttcctttgaactaaaaacgtacaagtgcaaaataatattagtatttgttttattttttggacaaatggaaggactgtatatgaacttatagtacaaaatgattggataatattgcgcatgatggtggcatgtgtaattgtttttttgcatacgtgatatgtgttatgctttgtattaccaggtacttcctccgtttcacaatgtaagtcattttagcattttccacattcatattaatgttaataaatctagatatattgtgaaacggagggagtacttctttggttagtactattttgtattgacatcttgcaaatgccataatcggtattgccatttacactcgagattcatagagctttaggttggaataaaacaaagtataatcagaaactcacaatccgacaatattagctcaaaagtactattgcatatcacagacacaccatcagtccatcgccgtttacaaaggccaaacaacacactaacaaccaacggaattatttctgcgcgttctcaaaaccattggatatcatataacggaaaaaacttaatttataggcctgctactgaaaagatcaaaagacggtcgatcagtaggtggcaccgtccttaacgtcacactgggacagggtgaagtagaaggggccggcggagtaggtgacccttccggggtagacatgggaggggcggcacggccgctcgccagtcttaccgccattgaagttggtgaagacggcgcaaccgtggtccccggaggaggcgaggcggacgaggcatgctgatgggtggaggtgggcgctgccgacagtgtatggcacctcaatattgaacatacccttgtcatccgtcttgtctgtcccgtggtacaccgtccttcccgtctccttgtctaggcaggtgatgcccaccatgctccctgcagcgcacatcatctataattatcatcgattgcctatggttgataagtcgcgaaaaaattaaacgaaacaataaggggtggagataggagtaagacaattagaaatatgttagctagtcctgcgtctaagtatccattgaaaactacacctcaaaacatataagataaaggtaaaattatgttgcgctagccgagttctagactcgagaaatttttgatttcatccttagaaagaaataagcacttcacaagtaaaacttttatatttaccagtgttttaaatagcggcttaagacatttagcggttagccttgtcaaacagctatagcgggctaaatagagctatagcggctaaattgtacgtgagagcaaatagctagaacccttcgcaaataactatagctgaagatagcggcagttatagcgggatatttaaaaccttgatatttatacttaaagagccaatgtttaaaaataaaactaaaataaaacccctcaaaatcaaatatttttctggcaacgtatgtaaagccaacagggaaacaatgggagtgcatggcatcagccggcgaggaaggagaaagcagcttgcggtggcgcgaagcgaacctggaatgggcttggcgttgtaggcgtaggcgttccagctcttggtgcagtcctggcacagcaccgagccggtcaccgtgaacttggccgcgccgtagttgtgccacgcatcggcgcgcgtcgccgccgccgccgccgccgcgacggccaccagcgcgagcaacgtcctcctccacgccatctcacgtacgcctgcctcggtctggatcgactggagggatgatgataagtgtggttagatgactgcttgtgagannnnnnnnnnnnnnnnnnnntgcaaatgcaggtgtgcttcttttatataaaatcgtggtgcacgacgtgaacccgacttgcgcaaatgtttttttttgttttgttttttgttttctgagttgttgacgacgatggccatgggcggaagacgtgcgcgccatgcgtctctctctagtctccccccctgtgtcggtaagctagctaggtagcctggtttgatggcacgacgagttacttggtccgtcgtggaggccacacacggccgcccaggccccagggtgacaagatgcccgtcaggagaaaatagagcttgaggctacaagatgctcatagacaaaatgaaatgacggagaaaagcagaaaacaaactctgtttctcatgcagtcaggtttattgatttgcattttgtgttttgctcatgtagctacaataagtcatctagcagtttcagggattccgcaaaacccatcagggaacaggtaatagtcatttgatcatgatgaattgaatagcatgtcggtgatggcatgttttccttcagcatgaaagcaccaactcaaacaatcgctacaagtttacaaccattttgtcattattcatagaacattaaggccccgtttggcacagctccagctcccaactccaacttacttagagctagagttgtgccaaacagtctagatcctccgtttttgggagcggagttgggagagctgctccataaaattgtactacgggggtggagctgggtttttgctgctccacagctccactccaccccaaaagacccactaccctttaattctttagtgtatttacataaaaatgccattgaactacccctactcacctcctctcctcccgttctaatttgactacctctacgggatagacctcaacagaaaactgttgagtaacggcagcaagtgattgagttcagtagttcctcatagaaaattattgactctagagatatggtaatatggagaagacaaaattgtttgaagcacgcacagaaccggaagcaccccttgtttcaaagagaggaggacgggttattcatatttaatttgatggtcagaggcgaattgaaagctaagcagtggtaattaagacccccggaggaaaatagggatgtctcctacgttacccattatatgtagaagtatcaacgtaatttcatagagtcattcgatctgaatgctacatgaagaacataagccagatgacggaacgcggagacctaggatgtagaagatcataacatgagcaattcggcagatttggattcctttcctatatatccaatcatgtggtacttcatcatacgattcatataagatccatctgtctagagatcttcatatacatatagaaagtcgtatgctttggaagaagcttgtacagtttgggaaggggttttttgagagaaaagaagaatctacttcaaccgatatgcccttaggcacggccatacataacatagaaatcacatgtggaaagggtgggcaattagctagagcagcaagtgctgtagcgaaactgattgcaaaataaggtaaatcggccactttaagattaccatctggggaggtccgtttggtatcccaaaactgcttagcaacagtcggacaagtgggtaatgttggggtgaaccaaaaaagtttgggtagagctgggtctaagtgttggctaggtaaacaccccgtagtaagaggggtagttatgaaccctgtggaccacccccatgggggcggtgaaggggaagcccccattggtagaaaaaaatccacaaccccttgggttatcctgcgcttggaagaagaactaggaaaaggaaaaaatatagtgatagttttattcttcgtcgccgtaagtaaatacgtaactaggaatatggaaaattgcatctttggaatttgcaataataggatgggcgaacgacgggaattgaacccgcgcatggtggattcacaatccactgccttgatccacttggctacatctgccccttatccagctaaaggattttctcttttttccattcatcattattctatttattctgacctccatacttcgatcgagatattggacatcgaatgccactctttaaaatggaaaaaaaggagtaatcagctgtgacaagaaaaaaaacgaatccttttgtagctcatcatttattggcaaaaatagaaaatgtcaatatgaaggaggagaaagaaacaatagtaacgtggtcccgggcatctagcattctatccacaatggttggccatacaatcgcgattcataatggaaaggaacatatacctatttacataacaaatcctatggtaggtcgcaaattgggggaattcgtaccaactcggcatttcacgagttatgaaagtgcaagaaaggatactaaatctcgtcgttaactgaattcagaatagaaagattcaaaataaaaaaaagaaatacccaatatcttgcaagatattgggtatttctagcttttctttcttcaatatgttagcagaaaagccttatctattaagagatggaacttcaagagcagctaggtctagagggaagttgtgagcattacgttcgtgcattacttccataccaagattagcacggttgatgatatcagcccaagtattaattggctatcaactacatattggttgaaattgaatccgtttagattgaaagccatagtactaatacctaaagcaatgaaccaaatccctactacaggccaagcagccaagaagaagtgtaaagatcgagagttgttaaaactagcatattggaagattaatcggccaaaataaccatgagcggccacaataatataagtctcttcctcttgaccaaatctgtaaccctcattagcagattcgttttcagtggtttccccgatcaaactagaggttaccaaggaaccatgcatagcactaaatagggaaccgccgaatacaccagctacacctaacatgtgaaatagatgcataaggatgttatgatctgcctggaatacaatcataaagttgaaagtaccagatattcctaaaggcataccatcaaagaaacttccttgaccaatagggtaaatcaagaaaacagcagtagcagctgcaacaggagctgaatatgcaacagcaatccaaggacgcatacccagacggaaactcagttcccactcacgacccatataacaagctacaccaagtaagaagtgtagaacaattagctcataaggaccgccattgtataaccactcatcaacagatgcagcttcccaaattgggtaaaagtgcaatccaatcgccgtagaagtaggaataatggcaccagagataatattgtttccgtaaagtaaagaaccagaaacaggctcacgaataccatcaatatctactggaggggcagcgatgaaggcgataataaatacagaagttgcggtcaataaggtagggatcatcaaaacaccgaaccatccgatgtaaagacggttttcggtgctagttatccagttgcagaagcgaccccacaggcttgtactttcgcgttctctctcctcccccatctttctcccgagtcccaatagttgtggcgggcggtggtgggcggcatcggcggcggcaggcggcgtcggccatagcggcggaggaggaagagggatcgggggcaatggcgtcggttgctgcggtggagggcgcggcggcggcgctccggtcagtgctatcccgcggcggcggcagcaggcacacgacggtagtagggcgacgggacgacacgcgggcggttggcagcgagctagcgggcagcggccgtcgggcagtgggcggcgcgcgctgtgacgatgcgcgggaggcgtccggccggcggcgggcggggcacgcggcgacgacacgcgggaggcggccggccggcgacgggcggcgcgcgcggtgatgacgcgccaccggcggcgggaggcgccctgggattgggctgccgcgggtaggtttcctttttttttcaactttttttgcatttttttttgcaatttttttcagatctagagctgaaaactagccaaacacttctcaacgagtctcggagctagctcccactggagtaggagtttggagccctaccaaacgggtcctaaacagccagtatgttaaaaattgagataaccgccaacatcaggtatcaaagggaacctctctgatcttggttaaacttcaaaattgggcaaaaaaaaatgaaaacaattgatgcattcctctcaacaaggcacaaacttgtctacacagatatcgcatccaaaacaaacctgaggtaagattgagaaacagaaagggcaccacatgattaataattaagataatacataatctcagcaacaaattaatgacatcgcatcctctttggtttaatatccatactaaactcatttatatagctaaactactatcatgcaatagcttttctttcaaagacagaggccacgggccaccggaaaaatcggaaaagttcagataacacatgaccgaatctccgacagcacattctttgtaacatcattactcccagaaattcactttgcacagcaatgttatcgacattgaaacccctgataccaaccaaaagggtgaaactcccactgtctccttttatttagtgcttctgataaatgcgcacataactatgcaaccatgtttcgagtgaaatcgaccaatatgccatttaataataactctagcaagtaaaatctaccataactatgcacagactttccagccagcaacttgtaccagtactttgagatttgagtaaaatctatgcatactattccaagaacaaaagacatactttaagaactatcactccatattcagcatttgcaaaactagcatgcagaattacacggtcaggcaccaaaaatagagacatgttggaatctgatttgcagatctaaaggttctgtaagataatctaagatacaaataaagatcagacacaaaacatatgtactttaaagacccatcaacattacattcgcatagaacgaatatcccaacttagacgcaaacatcaaatcatgacattcattaagaacatgtccaattaacaagttaacatcaataaaatagaacagcaagctgattcccggtactattggataaaaaagaatgtgtaattgagctgattcccgatactattggataaaaagaatgcgcaattgtgttaaaccatgtcctgtcattatgaccctaacaaagtttcccttacccctggctcaaaattacaactaagattacaacagcctcaattgaatcactatgcggaatgttacaagttacaacaagaagcaagctcataactaaattcaattagctaaacatctgcaggagctgacaccctatttggcagatatgtgataccactagatgacgagatcatagctgatataaaaattcaagtgttaataagggaaaatacaggcaagctcacattgaagagatgatggtggattagctggaatatctgacacaaattgctcaaaatttatagcattagaacaatccacattactcagtggaaggagtataccaaatactattgcttaaaaagaataagtataatcgtgttcaaccgtcactcagtcgttattccctagcaaaatttcgtttgccccctggctcatggtactactagaattacaacagatccaattgaatcactcatctgaaatcccaaaaatccatttgggcaatcaaatctatctgtgcctcagcgaatacgcacttaagatctagatcttaaaagcagaatgcaaacaaaaccttatgagctcgacttggctccatccaaagcaaccgcggccgtcgccgactcttgagaggcagcggcggcggcggcggcctcctcctcgagcttcttcttgttgcgctcgagcgcctcgccgacctccttgggcatgtacttctcgtcgtgcttggcgagcacctcggtggcgctgaagaagcactcgcagtcccgggccttgtccgagaccttcctccccgcggtgtctcggcggaggtcgtcggtgaacggcttgaggaagccctcgacgacgacggagtggccctcgcggaagaggtcgggtagcgcgccctcgtagcggacgaggacgtcggtgatgaggtcggtgacgacgaactcgatctcggaggaggaggcggaggggtgggcgacggagccctcgaggacgagccccccgaggcggacgcgggacttggaccggtcggtggcgtagcgcgcgagcgcgtcggtcggggtgaggtagaagacgagctggtcctggaacgtggcgagcacggtgaccacgaacccggccgcgcacccgaaggtgagcgcgtacgtccacagccgcctgctctgcagctgccgcgcccgcgccccgatgtccgtcgcccgcggccgcgccggcccgcgccgcgccgcggaggagaagaaccgcgcgggccgccggaggaaggaagccaccggcgttcccccaacctctccggcggcggcggcggcggcgcgtgggattgggacggggctgggcgtgtggaggagggcggggaggaggcggcgggaggagaggaggcgcgaggacgccatgggtgggggatctggaaggtgcgggaagcggagcggaattggggaaagaggcgaggcgagggcgaggcgtgcgcctggtttggcggcggatcggcttgctgcccacgccacggccgcacgccggagcaagtggggggaggtcaaaccgtcaaagtgggctggctcttccgggctgcggcgtctctcagggtgggcccaacccaataagcgttgaccagggtctggtttgaactgcagtaatctgaacgaaattcgattgaaatgtttcagttccggtatagtttgactaagaccttgtttagttgggaaaaaatttaggtttggttgtcacattggatatacggacacacatttaaagtattaaacgtagtttaataacaaaacaaattatagattctggcaaaaaactgtgagacgaatttatcaatcctaattaatctatcattagcaaatatttacggtagcaccacattgtttatcaatcctaattaatctatcattagtaaatatttacggtagcaccacattgtcaaaccatatcgtaattaggcttaaaagattcgtctcacaattttacacgtgatctgtgtaattgttttttccttacatttaatactttatgcatgtatccaaatattcgatgtgatagtgtaaaattttttgttttaggaactaaacggggcctaatattctcgtcttgttctaaaaaatgaaaaaaggtgcctacggtggctatcgcctacctgagttacaacgaaacaggcatcaaacacagcccacggagaaacgactaaaaggcaaattggcgacttctttttgaagagaaaagagcgtgagattgtgccttttcaattgaatatgacgggaggaaaaagagaggggcaaattggcaactgaaatgaatcaattggaacaaagactgaaatgaatcaattgaaacaacgaatggccaatattcagaaacaggctataaatgggaaacacgtcgtgacattgtgaacctaggatgtatgtgacgattgatgagagtccaagtgtagtgtaacaagcggttgataacacatagcacatgaagaagctgaacatttcttcagccaagatgtaaagagtttttagtaatcagtaataattcagtaccccgtggtgtgcctgacactacagtggggtagttaacttatgctatatctgatgaaattgtccacaaagtggcatttcagtccaatacactgtgacgaatgatctcatgaggcaaaatagaccaaattcagcattggagatcgactgccaacattgctgatcattcaggaagcgagtagagttacaactcaggttcttcaggtgagcatgtgcctttgcaaggggcatcagtgcaccggcaaacgggttgtcccgaaagctcccatccattgaacccacgttccagcaccatgatgttctttgttcctgattcttccttggtctcagatagatagtcggagaacatcttggcacacgatggacctcgcacctgcagcgtgatttgatctcactgtgtaagaaatatgcacttttgcatgttatctcaaataagaatatcaggcgggagagcacaacgatatgcttgattattatataataatgagctaaaaagagattagaaaacttgccctttccatctgctattaataaatgtgctgttacaatataataaaaaacatgagctaacgcaatcagcaatgacgacagcgttctagatgcaaaaatcgaacatggtaccaactcagtggatgtggacaagtataagttaacaaagaacactctctattattgataatattagaagataatgcaatgcttcaaaagtattaactggggatttccaaaatctttactatagaaagcatcaaaatcagagtttgaaagactatctgcttgaaccagaaataggtagcctttcatttattttagataatggatatcaatccggcctctacatccctaaaggacgtgaagcacatcaaacagaaattgaccccagaaaggtaagtctaagtcattactgatagacgctgttcaagtttaggtgaaaaccagtgatgttccgcatgtatggattgcagtggtactgtgttattccatttgcagtggatggaaatagggaaacccttagagcaagaaaatgttaaacctgaatgacaggtccacgtataagttcctgtatcaccaatatcggaaattttgtctcgacaggactacaatttgctaggacatttttcaggcaaattaactccaacgtgaagggaataactcctgatatcatatctcaaaaagcatcctggtttagattcaagccaccaagtggatattaagaatcctaaattcctagtgttcaattgaaacaagaccattcagcaggacccgaaatcttagtccaacctttagctacaaacgttgccagagaactaggacagatcatgccatccaaacaggtaatctaagttgcagacaacaggcacttagcctgatgccttttatggtgtatatctcaattctttaagctccattcaacaatgaataaagcagtacacatctcatgacatctacccagatcagtactaaagagtaaagaagctaacaaattcatacttcatcgggtagtgacaacaatagcacgatggcgaaggttcaatgataatatagctaggagactaagataagctttcgatttttcctatcagaaaccacgcaatcgagtaacctaaaatacgaaccacacgatgtcctggtaaatatcagtaaatcaaacaacgttgttgcaaggtgattggtgccatgtgcctgcatcctgtaggagatcgggtacagtaatcgcaaatttgcaaagtgcctggcatgagatgtatgggggatcggaccaaccttgctgagggcgcagtggaagacgacggtgtccttgtcgccggtggcacgcgcgagctccggcagccgcgccgcgaagctgcggctggagaagtggtgcgaccccccgatgtgcgcctggtagctcctctcctcgtccctgcaatcccccaccacacatagaaaaaaacgaactatctcatcaacatcagccaccaaatcagcgcggcggagggtcggagagagacgaagagcggaagcgagcgcgcggcacctgacgtcgatgatggcgacgcgggggttgctgcgcgccatggccaggagcttcgccgccgacacgtacgacacgctccgcgccatcctccccgcctccgccttcctttcccctctcctccgagagaaaggcgtactgatgaggaatctgcacatcgagtggaggaccctttcctccttcggagacgaagctatttttgcaacttgctcctcacaattcagaaatccctgtctaaactattttttgcaacttgcgccttgaaattcccatacctaacctaggctacgcctttcacaaatttcaaaatggaaaagatctcgtcaataaagaaatttgatattttaagaaagaaaatatttagattttagaaatataaaatttataaaatacattataaaatatatagattttggaaatataaaatttataaaatacattttaaaatagtcatttctagggtagaaaagattcacaattctgggaacaccgttagaagggaaatacccgatttattattttagtcaaatcccacggttaaggttccaaattaggtaagcccaagtcaaaacctatgggcaaagtttaaaattgggttgaaattttaaattggagaattggcaggggccgcgcgaacgcgtaccccctctaccacaaattatgacgtccactctcccgcttggggagatggtaagccaacgcgcccaccaagtgcaatgtgggccattggcctaggccacggctcttcttgatcggccgtcgaccccgtccaggtaagtatgttgcaacgagggcaggggtgcccattatatactgctcctcccctcccccacctcctcgaatctccgaggtggtactaaacttataacagcgagacacaacgcccctccgcgggtgcggcgcggacagccggacaccaatctattcctgggcccatttctacggcccattggaaagcccacgagatccaaaggcccaaatctttttcgctcctgcgcgccaagcttttcaggcgaaattttcatggcgccattgcgtccaaaatttccccttctctccgatccccaatccccacgacggcgatggaggaggccggcgacgaggagggagagcaggggcttcgcctcgggggagtgggggacggcgccgacggcgaggaggaggtggctcgaggagtggtggcgccgcaggtgctcgagctgagctcgtccagctcgggcgaggaggggggctcttgggaggaggaggagagccagggatctgtcgaggtgacgagaggcgggggtggagatcgcgaggctagggtttccgagagccgggacagcgcggaggtgaacggcggcgaggcggagagccagtcccttcccggctgccccatttgcatgaacgcgtggaccgcggatggcgcgcatcgcgtaaggtgaggagattttttttttgtttttactaaattcgtggaattgcgccatatgcttctatgttttgattgttctcatgagtgcatatcttaagttgctaactgtgtgatgctgtatatctagttgcattccttgtgggcatgtctatggcagatcttgcttagagagatggttactgcagtgtcggaagaaacctgcgacagtatgttgttcaatgaatctagttctgaattatatatacaacctgtaatgttatttggagaactcctttgaatgaccccatgtttatgttttcagtgtccccaatgtggtaggaggtttaaactaaataacattatcaacctctatgcaccagagatttctgttccaaataatgatcttgaaaaggttagctttgcctcgtttcctttctttggaggtatttctgcccatgggctgaaacgtgtttgatttatgcagcaagtattgtcattgagggagaaaaatgaatctcttgagaagcaagtaagctactccttgtacagtattttgtacatgcttatacatgctttaacagaacattattttgtacgatgtggtgtgtaccttcgaaccgtttcagttcaatgtaataactactgactattttcatttccgcgaggaaaatgtaaatgttttgttgttggtttataggacactgttagctactgccatgaccctttcctataactattttatgcagctaaaatcgccacaagttccatgtatcttttctaacttaagctttcttaacattttgattcagaatcaagaattggtccaggagataaatgagcacaaggtacttacccaatttcttttgttatggtatcactttttttagaaggtgaatgatattttgactgcaaaccttgcatctaatttacataggaaaagaaatgcgacaagcatttttgtgtatagataatgtttgccaagcgtattcaacatttctttttttagcaaaggtctcccttgtatgtttccttaatccttatttaaatcaaagttgttagattaaatatcttttttttttttcattggcctttccagtgtcaggaaataaagttttctttccatggagcctcatgttttttcctttatgtttccttgtatgcagaggcagattatactgcagcaaaatttcataaatgaatcaagcttaaagagaaaggtagcttttcttaaatttttagtgattaaccatgattacacaagccttgatgttaacattctttacaacaaattgtgaagaaaatggcagatcaatcatcacatggaacaacagatgcagattcagtagcatctcttacagcagatgatggtcatagcagtccttgcagttttgttctccaggtttctctctagtctctatattttatgtttatctgggttccagcttctattattatattatacttgatcaatcaaactctagatctatttgctactccatttccatttggttgtgcctaatttagctatggtcatgtagtatgagcaggaatacttacgatgcatataacttgcttgtcatgccaacttcagcaatacggatgtttgagcagttcacaatcacctacagactacagaaagaaaaactggccagatttaatttattgctctattggacttataatttttcagtccaatactattccctggcttcctttcatgtattgcatacctcaataagcaagaaatattcacaagcgtgacaagacaatggttaaaaacctatacacgtgttgcaggaaaattgaccttttactcaatcttaggttaccctatcatttctggctatccatgcctttttctatcgaacagtttacggtcaaatagttgtaatctagattttgagtgggagctattgtaggtatgctcagggatggtataattattaaataggtattgagattttatcctccctgaatgttccattcacttttctttaatcaaagaactgcgttttgaaatggtaattatgttttgtagaacgagtttttccttgatggagctcgagtcatgggcatagatgcatcgagccagattatactcacttctggcagggcacctggaattggtgctgaacatgtcctcacaaaggtacatgttctaaacttgatgctttccctaatgattttatgtaacctatccttcttctgattatatttggtcgtttattcatattgtgtacctttaattcttaattttgacagctcagcatgtctagacagggattgcagaaaatccaccttccatctgatactaaagctatcagggatatctgtatactgcctgggggtcatgttgtttttgcatcactaggcaagaagttgtcacttttaaggtctatcttgaacatgttcaaattatttttttcacaacacatttactcagaagtttgatttttgttcttgtgttttatttcccagcatgacaactgaaagtgtcgtccttcattatgatctaccggtgattctttgaccttgcagtttcacaacattcgaaactattttttgttacctacttgttgattcgaaagtgctcaccaaaagttattcattcacaattttttgtggctaactccatctcccactttatttcatgaaagcacattctagatattatatatgcattttcttctcctggaggtgctattttggttgtcatgtcataaccctgaagctctttaaatatggaaatgcagcacgtttttcatgccaatttacattttaatctttacgagatcaccaagtttgcaatctttataatttgaagagtatatgcatattctttaaaaaaaagcatcatgatactttttttttctgacagagatgcatgtaaattttctttgccttgatctaaagctgttgagtgaaaaaaaatttgaatcttgacctgttattttggatttcattatcttgcaggctcctggctggtcctgttcaggcgatcaaaatagtccgaatcacatatatgctggactacaggttgagttttcagtatttcgtgcagttcttccttaaccattgtgtgctcttcgaagggttgactagaaatctctattgatgtttcacagaatggcatgctgttgacctttgatattcgccaaactgttgcaccgttgcattccatgatgggtctatctacacaccctgttcatacgatccactctgttgtagatggcggtggttccaggaaggtcatttctgcatcttccataggaccctgcatctgggatgttgacgggagcagaaacaggtatgaaacagttttaaaacttacaacaaagttcatagttctttgtggtttccaatgttcatttttgctagtgtttctgatcaggccagatttgctaaatggaatggaaaaccacggagtctgcatctctcttgcgtgcaatcctccatcaagtgatctcctagtggcttccttccggccaaaagttgagctgtccgacgacggcacatctcaagccggcaaatcacagtcaccgacaccctctgcatcagggaagctaggctgccatgcactcataaggaggacgagcaacacgtccttcgccagagaccaaatctgcagaggcaatgtgagtggattgcgaatgtccaaatccgcaatcatacccttcaccggaagaagcaatcagcaacatctcttcgcctatggcgacgagtcgctgcgcggagtccggacatggcggctgccttcactccagacgtttgctgatctcaggccacaccggcaaccgatccttgatctgaggtttgcagagagctcgtcgacaggggaaaggtaccttggatgcttgagcgaggacaggctgcaggttttcagagtaaggtagcccgtagcaacaacatcagagacagtcatttgacttcagttcattgtctctgtctgttagcagctgttccctttgctgctgtgttatactatagtataacacatcagcactttggttaggtttgttgtacaagcacaagcaagtcttgcaatctttctctgtacagtactgatctctagagcagatgtctagtgcataacatcatgtgtgatttgttttgggtgataaaaccatgtattaattttgtactagtatcatgagtggttgaatctgccacaaaaatcaaaggtacagttgggtagtgatatgtcataccattgatgctcagggcactgatattttgtccagttcttatcaaatcataatcacctcatctgtcactgtattgtaccatcacaaattcatgtttgctctttgtgtaccttggcaagttcggtggactcagcattctcaaagtctatactcattcctctaccaacacaacaaactagtcaaagagggttgatagcatagtacaactagaacttcaattctgcaaaatagacaaataataatctgtgatactgcatcgcttcaaagttgataaaacacttacggggctcaattaagctcatgatataactaatgaagaataaagaatttgatcaacttatgagacagtaaaacactttcctcaaccaatacaaactagtggcagaaaggattgttataggcaacaacatactctgtagctcaacaagagcctcaaactatacactaccgacaaacaatttgtgacaatgcattgcttcgaagttgataaacacttaaacaatgcagcatgacacaacttttttttttagataaaggtattttttttacccggcctctatatccaaccggatgtatacagtccatttaaattgggaatttggcccttcaaaaaacccaatatgaaatttgctcatatagaaattttaactcaggatcttatggtgctacttaagtcactgcaaccacattatgatacaactgacgcattgcatacgataatgattttaatcaacttatgcacgcctcaactaccaaattgcagctgtgcagcatgcagttcacactaattcgatcacacttcacatgaatccaacgaagcaatgagccaatgagcaataatcttgacgctgttcatcagcactcggggtagaaggtgtgatccctggagtaatcctggcagtagtagtagaccatggcgttgcgctgcgcccacgccatggcggcctcctgctgcgggctgagcgccgcggagccgccgccggacgacgccggcacggggctgcacgccggcggcgcggcggtggcgcagccgccgaccttgaggtcggcgaagcgggagacgaagggctggtagcggtagtcggcgcggtagcggccgccgtcggtggcccagtcggaggcgtcccagatggatccgtacgcccacatctcccgctccgggaacgtcccctccaccttcttctcgtacctcctgatcggcacgtcgtccaccaagaacctgaccactcgccaccgtcggcagcagcttgcttagtttaattaattactacctcgcactaatttaatttgatttgtcggttaaaaatcacactcactagtccagtactacaattactgccctatgaaatgacatatatatatatataatgataaatactgattatagaaaaactatgggaaaaaactcggagaacaaacaaaaaaattatatgtcatttcatagcatgacctgcgctatgaaatgatatatataatgatattcattttgatcgatgcaattaattaggatctcgatgaaacggaggaattttaaataaattatgtaagatgcttaacatgagtactcgtatttatggctaattattcttttaatgataggcggcgtatcaatctatagtaggacgtcttaagatatgctggtctagtctttcggagatgcttatagggatagggtataccgaatatgtgtgtgcgttcataagtgtggatgtgagcgtttgtactgtatttctaaatcacgtaaaaaccctgtaaaattcgttacgttcgaaacaagctctaatttactgattgagcacacggtttttcaacgatcgccgcatgagttacatgcaaacttacatgagactttgaatgcttacaagatttggtcggggttccagaggatggcgtagtggtggaagccggcggtggggtcgaaccagaggtggaagcgcatctcgcggccgacgatgttgccgtcgccggagccgcgcacgtagacgttcgtctgcagcgtgtacggctcccccggcaccgtccccagcagctccatgtcgatctcgtcgtggtgccccgggtactgctccgtgttcgacagctgcatccatacaacacaaaaacataactttttcagcgaaattctactgcacatttcactgaaatttgcatgacaaaagttgatcaatacgtagaaggccgtgttgacgccggcggtgtagcccggctgcaccctgatcgacgccccgaagtagccgttccggtacgaccgtgtcgacttgaacccgctccctatcagcatcgaatcgaccgatcagttcaacccaaaagccgaaaagtatttacaagtcaactaccagtttcactcaaaggcttaagatgaacagagagtacagacatacctgagctacggtccatccacagggtgagagacttctgatcctgggacagggtctggtgctgtgggccccacagggtgctgtacccttcatagaaggccatcgacctgaacatcttgcttgggtagtagccaggagaaggctgagcttctgatggatgcagtagcagcagcagcagcagcagaatcagaagaggaatgcatgctgatcctgggatgttaccactaccaggccttgccattttgtcagttatagtgatgtgaatgaatgatgggctactagtttctcttcttctttgtgatgaatctctcacttgttggagtgagtcatttataggatgatgtgtggctactaatgcatgcatgggatgggaccaagtgatggcaggttgatggatggaaggaagttaattgcatgaatcttaggtagagacaaaaactgggagatttggatgaaactgaacactgctggcataaaggctgaacaggatgttgcccccctaaagagggtttgtgtgatacggcacacaaattttggatgttgacgcctcacgaaaacaggaaacctgagaaagtgaatttgcaaattctcaccatgaaactgcatacctttggttactggcagcattaacaaagttgatttcccatgctgcctttcttccgatggtaactaagtttgcagcctcactttcggttactacacatcagcagcaacgaatatcatatatatgcttataatgcacctgaaactttttccctttaccttctttggtgaattactccacgaaatgttccttcctccattactctgttttggtattttggctccaattgggagaaattattggaattttttctcatggatcagacaaaaggtaccatcacgtacacactatcttaactttttttcagaaacttaattcactgttcacataattcatcttcccaatcatatgataattctattaattcacacatatataattcatcttcccaatcatatgacataccgacacacgtttcattgacaaactgaagggaagaacagttgagtagctgcccaaccaatggattaggcctaaatgatgagcttttcctttaatagtggacagtggtccacatcttcagttaattgccgaactagtatcatggtaaacttccacaggatatgatctctgccagtagtacagtaaaaaccatactatacacatgcaggaaatggttaagacatgcacattcttgaacgctgaactgaactgatcaagcatggatatgcagttttgcatagtttctcgttggcacatcgtcttcatagtcacaagcagcacaggtggatcaatcattagattcagagctccacataagcgccggtgctggatactacgattgatcagagggtgttgtactgtgcataacgtccttggagcatctgaatgtgactgatcagcttcgtgtctcttgcatctttgtgctgcccttaactccaaacagccccggacgcaactggtgttcagttggctgttcagaattggaagattgattctgcaacctgcaccgcaccaacaagagggtaagtacacaaatccaaggttgaattctttaggttgtcttcaaatggtcactaactcactactaccaactctaaatacgcattgtgtcagtgataattagtaaaagaaaaattcaggaatgtgtaaagcctgaaagcatgacaaaagatagcaggttaagagaatctagctccctgtagacccacacgattgaatgcgcacaacattccaaacgagaacagatgctccttagaaattaaggactatatgtcatgaaatcgcagaggacccttcaattgttcacatgatcagggtactggatacagcactgctgaaggttcttatattaactataaactatgctatctgccttcctgacaagaggctcaaactgaatgcatttttctctcatgataaactttacattttatctatggtacctacacttatccttgaggccttaaacttgtggagatgaaaacaggtgaagtctgcaatcagtgcaattgcaggtacttcagagttgcttgagaattcattcctcaatctctcttcagtcacatcaaaatccagtgtaattgtccacttcgaaaaatccattgtagctgtgtgcaacagttaggtaatcaagctacagtttacaggcatctattcgtactcaggggctggagggctggggcccttgaccctccatggcgcatttaaaaggaaatctcccctagcttcactgaccgacaccaatgaagaaatgcagttacatggaaaacataagaatatttctgaaaaaaaaatggcatttccaatttcaaaccttaggtccctgcagctttcagtttcagcagataagtttaactgttatccctgtctgatgcctggatatatctgaatgcgttcaaatttgggatagcaagtgtcaatttaattagcaagaaatgggcgcacccaaagttgatttggtggatacccacacaccttcgaccaactgagctaagtcaattgactcagttcttatcttacgtctgctcaagtctgtaacaactttcttgcgcttgaccattacatatagatagaagcaaactgtggtctgaatgtctgaaaggtgcacagttcatcacttcaggctgaaggttgatgaggcacctcttcagttttctcataagtcgatgagacaccttaaggttgacaataacgatgcgcattacccactcgatcatacatagcagtgtaaattatatttgtttgctcacttctgctgatccctattttgccatgattttagcctcactctggaaatctggtgaagacttggagcatcgatcgtttacaaacctttgtcaaagtctcttgcttatgatatgtgagaacaataggaaagcttgattgaaagatgtgattgccagtcactgtgctaggttggtgttagtcaaaatggtagcatgtggcattgtgcgctccctgtcagcaatgacatgttgctacaagtctaggtgagcaagtgttatagattattagtatgttaaatcaatatgctagtctaacaagatttagcagcattagctccagtgccaactaccaatttcctcagtattcaactggaattcgcttgaactggaattcgcttccaaaataccggtgaatcattagtattcgactgatgtgaagaattcgtccaaaaagttgtcgagaattcaaaggcacagcagggtaatatatgatcataaaatgctaaaacctcttaactagagaataaatattccacaagcttatcagatatctaaaccaacgcagaggaggtactgaaaactaaaaaaaaaaggagcaactaacgtgtactaccaaactagattggaagtggtttaaactaattcagagttcataatctgatctcaaaggaaagcgagatcattgacgtgctatacactatttggacatacaaagttacaatccaatgtgttgtagttgaaatgcttgcgagatattgttgcgtagcagcatgccaacatcaaggcatttcatcgaacagagaggaggcgcttacctccaagcgaggaggtggcgacgtcgccggtgtgggatcagccgtgcagtacagctccctcagggtgtcgatgagggggcggaacccgtcgcggagaggcacgacggagacggcgcggaaccgctcggcggctcccttcgcgaacgcgcgcatcgccacgcggcacacctccccctccagggcctcctccgcggcgcgcgcggcccccgcgtgcgccgcgaagaagcgcgcgagctcgtcggcggggcagccgaccagcacgcgcgccgcgcggtcgaatagcacgacgggcacgacgcggtcgtgggtggccacggaggcgcgcaggcggtagacgcgcgcgggcaccgggcctccgccgccgccgcggccggtgcaggcggcgcatgcgtcggcgtggtccgggagcgcccgctcgcagcgcgggcaggagaggtagcagaagtcggacatgtcggccgccacgacggtgcagtacggcggcgtccacgtcgccgccggcgccgccgcctcgccgttgctgcagccgacgagagccatgacctcccacggcccaataaggcccaaggccaatacgccaagctacaacggagtactacgttaggccatcccaacctttcagttagtgtcttgacaagagaatttagcgaggagaggcgtaaaaaagatgaataaccatttctcatgcaagaaattatctctacacaagaaccaagaataaaataagaagatagttgaatgaaagaagatagtagtagaagagagatgattagataggaatttaatttaaaaacaccatctattgaatatatattctatatagtttatatgacatgacaagtataataattatttgatagtttcagagttagggatggcctaagccacgacaactcttaactcaaagatcactagtttgtatcaccctaataaatatgttacatgcaacccagaaaccatcaattagtttttatatgtatagaaactatatatatctaaaagatgatctcttcaaattaaataatcatccaataacattttttctatctccttttatctatatatctcattcatttttggtttttacttagagatggtttcttgcatgagaactggtttattcatctgtttactttgtcttgttaactctcttgccacatcaattttttttcttatgtaaaaatatatttaataccgtggataccagatgatatggaggatcaggataacctcatcactttggactggagggagtacttagataccaattttggcgtattgggcttggtccttgttgggccgtgggatgtatggctcgtgtcggctgcagcaacgccgacctttcttctcacggcccaaatccaaatccggcaatccccaacacctacgagtaatctccaccgtccattcgagatcggacagccataaaacgcacgtgctctcgcttcggtggagctctggatctgacgcgtcctcttcttcctcctcctcgagacctcggcacctcgcacgccacgcttctcctcctcttcctatcccaatccactcggcgacccccctcgccgtcgccgcgctgcgccggcgagcgccacgggagcagcagccctcgccgctccgcggctagctagctcgtctcctcgtccgcctcgcgcctgctggagatccgccccccgacccccgtggtaagccctggacctggggttggttttcgtctgtccctaatctgccgctgatgtgcgagccgaaatcaaatctatcgacgaggtttcgtgcggttagtgtgggatcgatcgatttgctcggtagtatctgtaaatccgctcgctgttactggtttggtcgctcgctcgtcaggtagggtttcgttcgctgctctcgcaaattggtcgtggactcgtggttcagcgcgcgtgcatgtttgtaggatgggagcgtaggttgtggagtagtcgaagcagtaggatgggagcataggttgtggaatagtcgaagcagtaggaatatgggagcataggtagtatggttgttgaacttgaatcctatggtaaagatatgatgatttgttgtagattgggcggttgtgttggggggactaggagggaaatcttgtgtatgagcaattgagcaaatggctcgatggtccttgtttgtagtaatcaaggatggaggaaggtggggcattcggagagtcgtttgccctactgttggaattcgggcctgtgcttaggaaaggatggttgctgttgtttgggctcatggagctggaattcagcctgtggttttgttgtggacaggaaggaaggaagaagggagggttgtaacagcctaacaggttgtgggagtcttggaggtgctggttttgtggtgtggtgttcgcagtttggttggagcttggagatttagaaggaaggtttgacgatgagcagccgcagcccgccaccaaaggaccgcaggattcgtactgagcgtacctcataccgtgatgcgccatacaggagagacagccgccgtggtcctagcaggtttgagttgtcttgtttaaataaataaagaaaatgagtatctggcaccgtatatcctaatgttgccgcttgctatcaacctctcttgatcatgttggcaggataaccataattgtcatttctgtttggatgtatatattctctgtttttcttccacaataattacttatgcatgtagtatttgtatagcctcttgatctaaggccatgaatccatgacctatgttgctccagtatgtaatatggatagggcgacactacatgtggtcaacccattgctgtcctctaggctaaggcaacagttagtaaataaaaatctttaaaggagaagttggtttgtcttcatgtcttttgtctatatctatactctatatacaa

SEQ ID NO: 7404 - DNA, 43732 bp, Oryza sativa
ccatctcccccttcctctcccctctcccctctccactgcgccgccattcccgtgccgctgcgccgccgttcccgtgccgctgcgccgccgttcccgtgccgctgcgccgccgttcccgtgccgctgcgccgccgttcccgtgccgctgcgccgccgttcccgtgccgccgcgccgctgtttccgcgccgccgtgccgttgctccggtgccaccgtgccgccgcttctgtgccgccgtatgccaccgtcgccaccgccgtcgtcgccgctgctgccgtcggtgagccgccctccttccccctcgcgcccaccgccgccaccgctcgggtaggagggagagccgagagagagagagagccgagagaaagagaggaagaagaaaagaaaccaagggagggagaagccgaggaagagagaaaggagccgggagggagagaagaaagggaaaaagaaagagaggagagaaagaaaagaaaaggaaaagagagaaaaagagaaaaagaaaagggagaagagaaaagaaaagaaaaaggaaagggagaaaaagaaaaaggaaataaataggaaattagagggagtttggggaagtttagaaaatttaaaataattagaatttaattatagattaattatagtcgtagaattacaaaatttaatataaattatggattattcttagtaatttctataagaaatcaattcgcggtagtaatttagatgtaattaataactaaacaaatagatgaattcttatagattattatagattatttttgggtaatccctataagtaatcgattcacggtagaaattcggatttaatcgctaggaattttagacgtatattatatttaatcgtttagtcatagactaaattaaattgtataatatttctaggatttcgtccaatatttagctcgtaatagaaatttctaacctattatatacaatgctcggggagagtaaattattgacaatgaaataattatacccgcaaagtagtttaaatcgaaattgggtttgccgtagtttgcagatagtaaagttaataaaaaggaatcgactttcgcattcgactttcatttggatttatttggatttttatttgaattctaatcgaattcaaatcaatttttgcacgtaactatagagcccgagggagttgcggatccaagcgaaggccaagacccgcaagactttaagcaaggcaagtcatcactattcgttgaacatgttgatcctaattgcgaaattgtttgtttacaaataaaattgcatgcaatgatgaacgtcctacttgtgattatgccatgccttgattattgtttacccttaaaatccttgtacccatgattacgtatgagtccctagtcaattatgacaactgcttagaaatgctattctaaaatcatgcatactcatatttatcaaatgctatatgcttgggcaattacctttgggaaggtaattgagatgcggcatgtgaagacatgagcgccacattgccatgatgttgatgacatgatttgtgaaaggagaaataaaattaaacaactgttttcgactggggcggacggaggatttgggtggtatctggaaaaggctagtaccgtccccggtcaattaaggaccgagccatgaagttaagcatgaaacgacccccgtacaaccgtacttctcgaatgggtatagacctagcggattagatagccgagcggaggcagtatccctgcatagatggttcacccctgagtgaggcaggtgcgctacgatgggacagccgttgaggtagggccaagaggcgtgccctacatcggtgtcgccattggtaggactgccatgagtgtgtgagagagagaacttaacttgaaccataatttaatatgtgtgtgagacttctctttcccgggagcgccagaactcctctcactgctagaaacatggacgcctagagtgcatgaggatttaagttcatggagcgggtactgccaatgcgaggttatcgaaaagctttgccgtgacgcgtctcatgtgttgggacgaggctcatgtgttgggcagtcgcggagtgcgggtaaagtgtacatccactgcagtgtgagtaaaccaaatctattcgaatagccgtgctcgcggttattgagcaccgagacatgtattatacttggctagactctaaattctttaacgtgtgtgggatgggatgttgcatgatgatttttatgctgatggagccacttcctgagaggcgggaaggtggacatcctcagaaaaccatgacgaatcaatggcgggaagctatccttgggatcacaatggatggtggacagaaccgtcgttgtttaaatacaaactctggtactaaaatttgatcggtcaatgctaggtcttaggcttgtgaaaagaattacaaaacttgctttgcgcaaaagaactatggccatcctttgaactcccctttcatatgcattgttgctgtggtggcttgctgagtacggttggtactcatccttgcaaatataaaatttatcagatgcgggagatgaagcctcggaggatccctatgcctattatcaggagagagatgaagacgatggcgtccagtaggtcttagtacgttcgttgcctgtggcaatggcatgccgctgcctgaattccgctgccttatctatttctgcttttggatgtattccggacctctcggtccgatgatttaagactatgcctgcgggcctatgatgtaataattcgtattagacactcgtgtatgtgcacttgatattccagctatgaattcgtgtgtaccaaactacttgatccagggaaatggtactgattacacgattgattcctgttataaaaacgggggtccacactcagtatactctgatgaacaactcagaagagagggtcaccaggaggaactagcaaaagatttactatattgtttcgataaaagagaaacaaccaaactaaaaaaaagaaagttttcagtgaatagcacaaagttgtattgtaataaataaatatagttttgacatatatggagcttgttcattttcttcgctcttctttctcttgcatatgcctctccgaggcaccccatactattggccgataaaaaaaaaactcaaaatcagtcactatcatcccaatgaagctcaatgagacttgataaaccaatagttatattatcacctaatagcaggggtaatgtccactcttatcgaagctgtgcttctgaataagcatcagtccttttgtggggaaaccatgaaacacaaaatcaatccgcatgtagcctatttccaaggttcagtaaggcacagtagtagagttgtggactttgtgggttgcataactccgtccactacggttcaaatcctagagcctaaatttatgcatgtgaggtgtgcttcaaatagcaaattttcataggaattctgtgatgtacatggaattttcctagcatccttccgtcgaaggttttcaaggaattctcatgtatatttgcatcctccatctatagtaaaaagaaataaaatccatattctagttgcctgtctaatttcgtttgaaaaaggttaaaggcttacagttagcacagagcttttaacccaaaaacgaactaagatgctcgcatatatatacctgaaatcatcatcattttttgtggtaaaagcacctgaatcgtcaccaagcttgtgataggatgatgagtcgaacgtgattgatcgttccttcacaaaaaacacaaacatacatatcactatatcagttataagtatttacagtccgctgagaagagatgccatgccacgcagatggcgaaatccccactcaaacagtaacaatgatcgaggcgctcacctgaaaccgcgcacagatcgcgaaggctagggcgagggcgagttggggatcagcttgatgtgtggcgcggtcgtcgatcaacttggcgagggcgaacacggcgagggaatcggcagcggaggcggtcgagagctggcggcgagggcgtgctagggctccgtcgtcggggttgccgtcgctcggaggttgcggggaatacatagcttccgcctcagcgcgcaaggaacggcgaacggcgggcggcgggcggcgcgaggaggcgtccggcggcggcggaaggcgagccgatcgaagcgagcaacggcgaggggtttaggagctgagggacgatgcgtcgccgtcggatgttctgattgtgtttaaattacggatgtgtagctttaggattcggacagtaagtaccaaaggaaattgggtctttttaacgacaaaattctagatgatcgtggattatgctttccttcttgataataactttatgcaacttcatgacgccaaacgcgttgctacagaaaattgtactatgaatctatattggttaagcttcttgatgacatgccctcaggcacgagcgtatttaaacgatgttaatgagttgtagttatgcgcttgtttggtttagagctaattttgtcatttaccttatcaatattttggtaaatacccaaaccttggaaaattttgccgctactaaggtactactatcaatttgtaactgtgtgatcaaaattagcttccatctaaacaagcactatatattagctccaatgggaagtatcgagccctaacagttgggtgctaatagttttcctccagttttctaaatagggcaataacactataatcctcttcaatagctttcacttgtgcgcttggaatagttggatcatatgacaaaactgaactaatacgagtatagaagttaaaaaaggctcaagtttttatttgactactttctaaagacgaggatgaaaataatcgtttcttagtttaatatgaaaaatagggcataggaagatctgactctatgggagcccaaaaaagaagttaatttagattatctaggatattgtaatcaacatagcaaaatagttttatagttgtcgatatttcagtcaggagagccttccacgtttgatttctcatgcaaaaggcataaagctggatgcatggtgtcgttccttagcaaaactgcttcgcgctataatgcactgccgtctatacatatacagcaggatgtcacaccaacaaaaactacaaaactgaagggtacacatgatcataatcatgtccatcttttgagttttgatgttgatgaacattttattacttcctaactcagttgcacagtccagcctagccaatcttctgcctggcccatctgcaggcttgtcaatgaagtatatagctgctgagacacgacaccaactcctttgttgccagcatattcgaccctgcaacgaaaaatccattgcatagtatgatggaacttggaagaacaaactttctctgacttcggaaattttaccaagacaagtccatcttagtaggagatccaacaaaaaaggttagccacgacttactagccactagtgaataatatacacctttcaattgtttttatatggctttagtggttcctttattcaagcaacatggggtgaagaattggctaggtttcggcccattaggtagttcatatggcttaattggtgatttatttgaggaacaatacataatacgggtgtaaggaaaggaaacaatttaaattttgacttttgactacacatacagcaaacggctgaaatttcaaggaagcaatgttctaaaagtcagcactgggtgccacctaggagcctggtagccgccacaattaggaattagatggtgtattagactgttgaatttcttggatggtgttctgttgctattttagtgttatattgtctaattttcatgtaatatgcttgctaatttcttgaaacaatgcaaggaaggataagagtatcaccttttcccttgataggtaatactacccacaggagacactacgacagcagttcctgtgcagaaaacctcatcagcttcaagcagctcgtctactgacacaagtcgctcctcgaccttcaagaaacaaaaaaacattaatagaagatttcccaaaaaattgagaatagatgtaacaattttcagtaacagattgagaacagtgttttgctgcttctaattggatcgacatcgctaggaaaaataggttctatcttcttcaatgtagccgtagctcatatgaacctaaccatgaatataacccttggtagattgaaatatagataacccattgttaatattcacagcgaacaagaaggatgatatggacaaatagaaacatggacttggatacctagcaaatacacaaggatcaatgttgaatacctaatgctgttgtcaaagatatcaaatcacaggctactaatttgagctacactgaaagtaaaacatcttgcttgttagttcatgggattgatgattaatttacctggaaacccttgctcagagcaacatcaatgatacttttccttgtgatgcctggcaatattgttccttttactgctggagttgaaatgacattgccctggtgcaaaagccaagaaaaataataagggtgtgtttagatggggaactaaacgggccctaaatagatctcaagtcaaaagcagcatgtataagatattccttcaatttgttgactatccttatgcaaaaataagcaataaatgttttgtctgcaatggaaatacaaagtccaccataaactaaaacaaatacaacaatagtttgccattcaggatacgacacagacaacctggctgaacctaataggtgtagaacaaccaattgttagtacgatattatcctatagaatagtcatggcactgtattgctagcgaaccaatacctatgaccatgtgttgtagatatgcctgtggttttcatttaggtaacaattcatagaggtttatgcatggtagaaggtactccctccgttccaaaatataacaacttttagccttcaggatttgtcccaaaatataacaacttatctaccaacattctcttcccaaccaatcacaaccctccaccattcacttttcccacctacctccactactcatccaatcacaaccctccaccactcgctttacctactttcttaataaccgtgtccaaccctaaaacttcttatattctgggacggagggagtagcagttttgagtttgtatgttatgaaattagatcccttgacacattatctccatcatttatagaagtacactaacccacagggtatgcatttacttatggatgttgctagcaactaacacataaaacacatctatattttttgggtactaccatgctatctgttacagattttcaaaagttttgagccagaagcctgttcaatctaagagtatcaaatatctacttcaaagagcgtatgactcatttcatttatttgaaacctctttaatctatatagacataaggacatacatctatcagtaaagaaaacaaagctgatcgttaatacttaatagagtaggttacaaatcttagcatcggttaatttactgtggtagctttcagaactaaaaaggctaatattaactggacctacaggagaaagtgttcgaatcaaactaacaggtattattgacagcataaacacaccttgacaacaaaaatattacatgaagaaacttcttcaagatactttttgtgaacagcatccaagtagagaacatcagaatagcccttttcttttgcaatcttttgtgccatcaagacctatgcaaagacagtatataaattaaagccagtgaaaataataacagaattcaacatagaagatagcagaaaataataatgataagatagcagggagatataagtcgtcatacaaaatagcatttcatttgaagtatatctgatggttcaattatttttcatttcacagcttcataatggcctgtatgttcttaagagaattgcactgacaactctcctttcaaccacatgttcacatcaatagaatgactgttccgtagtttaatatttgcagatctgaactaaaaacattacatcaaaaacatcagaaagagaaatatcaggtagcgaagttgcagaaatagccatgacaataacttccgcatcaaagctgtaagtaatgggtttcaaacttgactgtagaattaccgaggcataatttcctatggtcttcacacttccagttccaccaggggttgcacgatgaaacttatcttcaactatcaaatttattggagctaaaccttcctgaagatatgagtgaataaattaaattaaaaaaaatccatgatacatgagctgtttagaaattctacattcaaccatcagttatcaacaaccaacaaaagtggaaaaaaaatcataaattcataagtcaagttgctgcgaaatatatattcagaaacacggtgtcaagtagaacgcagattataacagtatctaccatagcttttttttttatttatggcaacaacgctgcggctaaaagagggagcagaattaaagaaaaaaacacaaaccttaaagtagttccccacaggggagacaaatataatgaacgtatactcaggagcaggtgcaagaccaagaacagcaccactacccataagtagcggtctaatatataaagaacctttaccggtaggaggcacctggaattaaaaattatttaacaaatgattaaatcaagagtatgaacagcggcctagcccactatgaaatgatttactttttacagtaaacccacccatctcttgtttgctaaaacagtctgctttactgcatccacaaactgctcaacactaggcgcaggcatgcacattctttctgcacctgttctcattctcagtgcattttcctccgggcgaaataataagatagagtcactgttgttctatatgcttttagaccttcaaacaatccctgtaaataattataatcttttaggacgaaaagtatttaaaaaggctcaattttccttatcttcagttaccacaatgtactcaggatatatgaagcaaggagatctacctccaatacaaacctatccgtaattaaggactccagaagatgggttcagcgctataggtccaaatggaatcatttcaccctcagaaaaattcccgtcctgtccgcattttgtgatatacatgtagtcggtctgcacgattccaaaaccaaggttctcccaatcaaaatcagctacctcagatgccttcctgaaaatatgcaagagttgccatcagaattattcctgaaatgaccaacacatcgtcacaatttgacaggcaggtcccctgcctggagggatacagttcaacgaatcatgcagcttatggtaagaatcacacacgtgtagtcacttgctagagaagcctcgcatcttctcacgcctcgagcctttagtggaagcgacgacatcgaataaagtcgattctgaatctgcagcagcgagaaaacaccagtatcaaatacagtattttaataaaaaacgaacataaaaaaaaacagcatggacttcatcaatttaatctccacaagcacttcacaaatcccacctacaacaacatataatccaaatcctaaatctccagttcgaccgtacacgccaatctagccaccatgatccacgaaatctacagcacaaacgcatccaggagaccgtgcaaaccaaataccggcctagtcgcgcgcgtacctgaatagagggcggcgacggcggcggtgagaggggcaaccggctacgccgggcgccggcgagcagggtggccgcgaggagcgcgccacgcgttgctgcaccgtactccatttgctgctctctcgtgagctcccccgctctctcgccggggtatagggtttctgcggctactgcggcggcggcggcgcgggagaggcagcggagacggagacgacgatgatggccaaatcggacgggaatggcacgggggccaaatggggaagcggctttactcacagaaccttctagccattgtagccgatgtgagaccgactggtggggcccatgctgtgtgggccccacttggcagtggctgggctcgggatcccgcgggtgtgcacgggggtgtctggaattctggatgaggagcgcccggtaatcgagcaaccaaaatatagttttttatccacatggttttctggcaggtggggcccgcgcaccttcacactcaatggtgttcgtggctgccgccgtgcggtactgcggtgggtattgaaaagggcaaaaaaaaaagtggtggctcgaagaataggccgacttggctttggctagctctctttcgccacgtcggaaggcaattttattttgttttttcttggtaggatttctttctctttttttaaaggtttactcctctattacaaaatatagatatttttagcataatagtttattccaaaatagaactatttttccgtttgcttctcttatcaaccaatcacaaccattttcgatttaattatcatattcgcttcatcttcacaattaatcataacttttctctaatcatttctatcaactttcttaatacttgtatccattttagaaatggcaacaatttatgacagatgtggtagtggttctgctcttattgacctgttacctcactctcaacatcgttatatattcaattttagcggcataactgttaaagtcacataaaaaatatatatatatatatatatatataagaacataatatgatacgaaagacaatcagacaaatattataatttgatagtaaaaaataatgcattgggggtgttcaatctttgctaccagctgcaattgccaccgtgagttaatactgaataccctcattgcatgactactaatgttgtggttgtcctcctttgtctaatgtgtgatatcgatctatgtgcaagttgacacaaacatcacaatgtgtaatgctctatcaaccaaacaggtataagagaagcgtatgctaattaccggaagaatacttgctttgtctgtagacataagttgaagtattgtggagcacgattgcttaaattctaaaacattcaaccgcagaaaaatgacattgctagcttgcaacatatgtttttttccacagcagctttggattgatttattttcagctagggtgcccattcagctatttgatgctctctttttcgcgaacgcgtaaaaaaattgtatgtcaatatattagaagaagcatagatttttaaaatacacgacacaaacggccgaaggacattgtcagggaacaggagaaaaacggattttcttgggttttcttgccacatgctctatcaacatatgttcttttgcacagcagtgtttggattgaattgtttttagctattggattaaattgttttcagctatttgatgctctccttttcacgaaagaaaaaaggattatacgtcaatatattagaagaagcagagtttttttttaaaaatacacgacgcaacggtcgaatgccattgtcagggggaacaggagaaaaaaaaaggcttttctccaggggcatcgcgcaaaagaacaaatttgatgctctcctactctatcacaatataaggcaatcttcttgccttctttttatttattttttcaaactcacataatcatgtctcttctggtatccgatagagatctctctctagtccaagtcaagtgttgtccttttattttttttttaaatcattgtcctttaaaattttagctacttattaatcagcatgcacagacctagatcagtcccggctccctggtattggatccgaccgatcgagtgatgtgctctcatccatccatagccatattatccctgcaattgtttattttcattgccaaatgaaccttaagtgataaaacttttttttgtttgtgtcaatcgcattgtttattggttaattctctgaaagtgataaaagggcattttatttgtgtaacctaatgaaatactagtttttgacatgcatattgtgtttctcgtgactgcaagaatatgaacatgtcactagtttaaggtgtgtttgaaagatagagaataaaaaagaataaaaggatatgcaaaacaaggtgtgtcattagcgtatgattaatcgagtattaatcattttaaacctaaaaatatattaattttatttttaaaataacttttctataattatttaaaaaacgcacacaccgcttagtagtttagaaagcgtgcgcacgataaaggaggatatttttttccgaatatgcttgaaacaaccaaggattgttgacatgtgtcgacgggtgatacccgtagaccggatataaagggtattggggtacgttggtacaaggatctacgtagtacgacatcgaacaatcaaaagacaagaattatactggttcaggccccttggtaggtaatagccataatccagttgatatgtgattatatggtggaaaacacaggttacaaagggaacgatggaacttgttggattcggcgagatcatagtcgagtggattcgactagctctcgatgacttggctcctcgcagacttcggctttgtaggctgtgtgggttgtgttggctctgagattcgatgatctatgccctccctaggggggtcccttttatatcatagatctggaggtctccaagtaggactcggagatatcagacccaatacgatacgtcgacgacccagttctgtccgagaaggactcttcccatctgtagatttcgtgaaaggtttccttaggatatgtagaaaacatccgcgtgtgtgtgggtatgccatgtcgatatgtaacgtatattgaagggtagagggtatgcctgacccgtaaccctgacagtagcccccgacttctgcttaaaatgaactcgtgcaaccatttatgacttcgggtgtcgagaacgttgtcattcttggcgcgaggaccgcggagatagaacgtagtcgagcatgccgtttgaagcccaacggtcacgagtgaattttgaactgaagtccagaaaactaccgcgcgtaacgggcccagagatttccggcggggatctctctccgttccttggaattcgcaccgttggtagtgtgcttatttaaaggaattttgggagctcattttgaagtctgccaaccttgttgaacacacaccacctgccagcgctccttgccttctccgccgccgcaagaaaccctagttcgccaactcaggcttgttttccggcgatcttggaacaacaatggatctcggtaagtcgtcttccaccagcgcgacgttgaagaacctttaggaggacggcgcccttcccggccgtggagacatggagagagaagtaggaggtactgatcctcagcccctcttaggtcgcatggttgtgatcgaagattacgttctctgcggttttcttcctccaccttccgagtttcttctcctggtgttgaatttctatggtctttctcttctccatttgaatcctaattccatcgcctttcttagtatctttgttcatctctgtgaggcctacattggggtagagccttttctcgatctcttccgtttctactatgaactgcgttggatggaatccaatagggtgtctggttgcgtcgggttccgacttcgtgatggcatgaagtcgcgttatatccccttccagtgtccttcttcccgcagtaagtggcggaacaggtggttctatcttgagatcaaggactcgaaccctgtcttcgttgttcccgaggatcaaccggacaagattccggcctggaccgccaagccccctttgagcccctctcttcagtcgtttatcgacatcatcgatgatctccgagaacagggcttgtcgggatatgaagtcgctgcagacttcgtcggtaggcggatccagccgctccaggctcgggcccatccagcctataactatttcgggtcggatgacgcgacccgggtttctcctcggggtatctttctcgtattcatcttggcgtgcttgtagtcgcgttcctcttgacttatcaaaagttggtttccgtttaacaggtctaagcagcgaagctatggagcggcgcgtcggtcaagtgatgatcagcggtccgaccacggctagcgacatccccgtgcccctttgtgaaaagggggcggcggaacgcgatgaagccatcaacgtaagtgtatttgataagcatctcgtattctcctttcgaaatcaccttatgacctgattaagcgtaggcccttcctttgactgacatcatcgggccgctcgcggaccatcaggtggcgacatctctaaaggagaaggttgtcaaggaggcatctgatgcggccaccactagcggtggcaaagtcccgaccaaggcgaggaaattctcgtctgtactcggacattgccgcaaggcagcgacccccctcggtatcatcttgtcgtcagatcgtgcagcaaggagggtttcttcttactctgtattgattgtctttcaggcttcagacgcgtcccctccacctccacgacgacagcgcattgtaacgatcggcgagaagtaagtaaatagattcttggattctcgtgcttttcgttcaaatggtgtttgattcgtggttgtccgtagggaggcgcgggcgaaggctgcacgggccaagtccgggggagcttctagcgcatcacctgccacggcctcgacagatgtcgtgcccatgaccgggagccgggaggcgacgcctagtggccccatcaacaatcccgctgcgggtcgtggtctgccagcggccgttctcacctgggaggagctccaagtcgagatggggcgtcttctcgaagctggtgctcgcggcatcggcagcgagatctcggaggcgaggtcggaagcggcgacggcgaatgcgcgtgctgagagattggtgcgcgagctagctgaagcccgtgaggacctcacgaagatgagggagttggtggccggcaacgagcatcaacggaaggggctcgaggactgaatgtcggaactcgggaacaatctctccgagatccatggctcgttgcgggtcacctacactggcctccatcagctcgccgaggagtgcggcgtcaagtccacgatcccggcgaatcccgacgagtttttgctgacttcctctcttgcggaactggcgacggcgatggggaaaatcccctccaagcatgcggccaggatcgcggaggagacgtcgaacggcatctacaccggagcgtgtcacgtcctcgcgtgtgtaagattgtcgcgtcctgaactcgatctgcgcgagatcttggatcagggggcggcaagcgacacgcgtaaggaggtgatggaagaagtcagtgatctgggggagtctgttctgcccctttttgaagagtaggacttcttgtatttgttatatattgtgtaaatcttgaactctggccgccttcgttcgtgcgattaccacccttgtccaattttgtatgttgatctcgggagtttttgtccattatagagatgttgatgatgaggatgtccagcagcgcgggcagcctgagtcactggcgatgattccggtactcgattttgaaccacatgtttcgtctgacaatgtggatcaaactcttgatgcgaaggccgggatggcaacggccacctcaagtgagtagccttttcacctcttagtgacctcttgattaggttatttatgttgtaaaggaggtatccaacttgtcttagtggtcatcacatttagcagatctcgagggtgcccttgcaaatcaagatcgtcgtatccaatactggaagacgaaatttgaagtggcggaacttgagagaaccatgctggccgtgaagaaagagcaggttgtggagacgctccgaggtcgcgaggtgtggttcaactcttacttgaggagttgctgtgcctccatggccagagtatgcagggaacttcgagtagtccgcgatgatcccgaggagtcggcggctgggtacatctcttggctaaacggggcctgtgcccaacttgatggcatcggcaagcatatcgacgaggccttgaagcaagagtgtcgtcgagtgagccgatacgccggagtgcacatgctggcttgcctacgagatcaccgcccgcgcttggacctcgagtttctccgccatggttttgctcgttctcggagaactccggcggagatagaccatctggcgaggtcgatgtcgccgctggccgagaagatcttccagtctatggactagcgttggccttcttggtagtactcatgccctgtcacagatatcttagggaaagatgtaatgtagtggaaaatttatgtaaaaactgtaagaattattttgtgaataaagaaatattccttaaacaaatgtatcttactctagatgtcgtgtgtaagagtgtgttctcagttaatgactttggtcagccgtttgagtcgtacactctccctagcccccagccttgtcgtcggaggaattttctcggaggataaggctcttggaccattgacctgccttggttgaataagctctgatcctagcccccagccgtgagtttggaaaattgatttccgatttcacggcttggttaatacgcacggtgagaactcttacacgaccagatcttacatggtcttttgtctctacaggatctgacaaggccttatcggctctgggcatccccagccgaagatcccttaggttcctcggaggccttgtcgagacggcgtaaagggacataaggacaggtttcaacgctaggtgtcatcagagtaagggatcatcgggtgaaaacactttgattgtgatatgggacctagaaataggctttattgatactataagggtacttacaggtacagtggtattgactcatacatagaatttacgtagttggtcaatgttccaagaatttgctaattcgcgaccatcaccgtctgcgattttgaatgcgcctggccgcaagacttgtgtgattgtgtaaggtccttcccattttggtgagagtttgttttgccctgcttgggtttgaactcgtcggaggacatagtcgccgatcgaaagtatgcgtgctcggatgcgcttctcgtgataacggcggagggactgttgatagctggctgctcggacggcaactcgctcatgatgctcctcgagaagatttacatcgatgtctcactgttcctcctggttctcgttggaatacttctgtactcgtgtactctgatgtcgtagctcgccggggagcatggcctcggagccgtacacgaggaagaagggtgtttccttattggacgttgtcggtgtggtgcgtacggcccatagtactgatgggagttcttcaacccactttttgtcttgtgacatgagcctgtcgtagacgcgggttttcatcccttgtagtactatgtcgtttgccctttcgacttattcgttgctttgagggtgagagaccgaggcgaaacatattttgactcccaacccgatgcagtaatcttggaagtcggtgctgatgaattgggagccgttgtcggttatgatgcggtgcagtagtccgtatctgcagaatatccctctgatgaatttgatggcgttgtcggccttgatttcccccgtgggcactgcttctatccatttggtgaatttgtcgatcgccacgaataggaatctgtagccgccctgtcctcgtgggaatggcccaagtatatctagcccccagcacgagaacggccaagtcagagggatagtctggagcgcttgcgcgggtagctttgtgtgtttactgtggaattgacaggcttcacatcgctggaccatgtcgaatgcatctttaagggcggttggccagaaaaagacttgtcgaaaagctttgccgaccaatgtccgaccggcggcgtgtgacccacatatgccttcatgtatgtcgaggaggaggtgtctgtcgtcgtcagtagagacgcatttgagaagtaccccgtttagcgcttttttgtataaatcgttaccgaccatacagtagatctttgctttacgggttattttctcggcctctgtatcgtcctcgggcaactcctcgctgctgatgaatttgattaatgggatgcgccagtcgtctgtggtttcgatgtcagcaacggcgcgttctgcctcggtgacctccgagctgatgtcgggggtgttcgggctaacttcgccgctaacttctttcaccgatggcttcgtcaggatatcgagaaaggtgccgggttcgagtggttctcgtctggctcgacgttgtccttgcgatagacgtgtcggacctcgatcccatcgaacctcttctctagcttcctgacttctacgagatacttggataactcggggttagagcatttatagtctttgtgcacctggttcgcgactagctcggagtcccctttgacgattagtcgcttggcgccaagtgcggctgcagctcgtatcctggcgagtagtccttcgtattctgcagtgttattggtcgccctgaagttgaggtggattgcgtgcttgaattgatctccggaaggagacgtcaagataaatcctgcccctgctccttggctgttgagtgcgccatcgaacgccattgtccatgtttcgttgtcgccttggttgtctgatttgttgtccggcatagtccaatcggcaacgaagtcggcgagtacctgggatttgatggctattcgcggcagaaagtggacatcaaattggcttagctcgactacccatttcgcaatgcggccgacaacgtctttgtttctcacaacttctccaagggggaaggaggatacaactgtgactctgtgagcttgaaagtagtggcgcagcttccttgatgtcatgatgactgcgtaaagcattttttggatatgtgggtatcttgtctttgcgtcatggagagcttcgctgatgtaataaactggtcgctgtactttctctctctcgacaacaatgacagtgctaacggaatatggcgtggcggcaatatagaggaataattcttcattaggttggggagcaacaagtacaggggggtttgataggtagcgcttgagtgcaataaatgcctctttggctttctgtgtccatataaatttgtcttgtttcttcaatagagcgaaggttgtgctcgttctcccatcctagcgacgaatctgcttagtgcttccatgcatccagttagcttttgtacctccttgagtctcgtgggcgacttcatgttctcgattgctttgatcttctcgggatttgcctctattcctctgccagagacaaggaatccgagtagcttgcccgacggtactccgaacgtgcacttctcaggattgagcatgaggcgatatcgtcggaggttgtcgaacatttcccgcagatcgtcaatcaatgagtcgcttgtcttggttttgacaacgatgttgtcaacgtaagcctcaacattgttgccaagctggttgctaagtgcgccctggaccgtgcgctggaaagtattcccgacggttatcagtccgaacggcatcttaacatagcaaaataccccgaacggcatgatgaatgctgtcttctcttcgtcctctattgccatgctgatttggtggtagccaaagtaagcgtcgaggaagctcaatagcttgcaaccggctgttgaatccaccaattgatctattcgagggagaggaaagtgatccttgggacacgccttgttgaggtcggtgaagtcgacacacattctccattttccattggccttccgcaccatgactggattggctagccactctggatgaagtacttctctgatgaagccagctttgagaagtttgtcgagctcttctcgtatggcttgtttccggtctggtgcaaatctccgcagtctttgctttactgacttggcatcgggtcgcaccattagtttgtgctcaatcacctccctagggacccccggcatgtcggacggttgccaaacgaacatgcaggcattatcgcggaggaaggtgatgagcgcgagttcctatttctcgtttagtgtcgccccgatcttgacagtcttgtcgggattggcactggagagtggaacgatcttgatggcgccgtccggcttcggcgtcttatttgtcttgctcactttcttgggtggctcagttgtggcgggtgggctgggcgtttgctcgactatgtcgaggctccgcttgtcgcactgcactgccagctttgtgttcccctgaatagtgattgttcccttcggtcccggcatcttgagcacttgatacgcgtagtgagatatggccatgaacttcgcaagtgcagttctcccgatgatggcgttgtaagctgtatcaaattcaacgacatcgaaggtgatctgctctgttcggaagttgttggcttggccgaaagtcacaggcaacgtaatcttgccaaaaggtctggatgatgattggggagtaattccatggaagggttgatcagttggtgtcaactcactttgcggaattcccattgcgtctagagtactagcgaaaagaagattgatcgagctgccaccgtcgatgagaactcgcgctactttgatgttccgaataatgggttcgaccacgatcggatatcgtcctgggataacggcggtcttggggtggtcttctttcgagaactctattttctgcttagaccacttcatcttgggtgcagccccccgccatgtcgaacagacttcacgttccactttcttgtattctcacttggaggagtacgttgtggagccgccgaaaatgtgtgagatgtggaggtcggagtctggatacgcataatccgattcgtgaggagccgtctcttcgttcttctcgacaatgcgtactcgcttgcctttttcaaacgccatgtgcttctcgagcgactttttgaaaacaaggcaatcttccagagaatgtctgtccgtcttgtgtatggggcaccaagatttctttgtgtcgctgccttgtgggtctgggcgcttgggagggttcgcgtattctgctgcgaggacttccgcttgagctttccttttcccatttttgcgatttttcttcttgcttgactcagatgcgtctgtggctgatttcttctctcccccggtcttcggcttgtcgttcttgcgtcttagcgcatcgtccacatgggcacatcgctcaacgatctcgaataacctccgagtggttgtgatgcgtcttgtcgccaattcctgggtagtgtagcgatctctgacaccggatttgaaggcgcggattacagaagcgtcggtgatttcaggaattgtgtttctgcattcgttgaagcgtcgaacatattccctcaatgattcacctgagttctgtgtcaacgcgtgtaggttgtcttcgatcgcgtggcgcttgtacgttccttggaaattggcaacgaattgttgccacaggtctgcccacgaagagattgagtagggaggaagatgcatcagccatgaacgtgcagaacccttcaacgcggttgataaatagttcgctagcgcgttgtcgtctgctccggcagcatagagtactgtggagtagacttgaaggaattcttctgggttggtgctcccatcatacttttcaattgctccgggtcggaatctctcaggccatcggacatcacgtagggaacgaccgaaagccctgcacccagcgttgggggcggtgggttgtcagcggtcgtgtgtccttcgtggatgtctgtctgacgatgaggaggacgcagatgatgatgatgacgatgggtcacttggttccggcgtacgattacgagtatgacggcctggatctcgggaatcctatcgttgtctctcgctgttgtctcggcgccgatctccattattgtcgtcgttacggcggcggccatgaccagtattgtctggcccccgtcattcgcgatcgttgcgattgcggtggttgtcgtgatcccggtcctcgtttgagcggtctcctcgatttccgttatcatggcgccgtgaagagacatgacgccgagagcgatttacattgtctcgtgtgcgtcgtgcttctcggcggccgttgatttgatctcggagatcgccagcgccgcgaggtggaggagtggctcgttgaggtgattccctccgttccggatcttcaccattggcgtcgctagttggcggctgatcttggtgcgctgcggtagcgacttcttcaaacgcgttgctaaggttggtcaccgattcccgtagtcgttctgtcaacgctcgaggtcatcattcagaacgggatcgtaaggagtttcccttagtaaggcttgaacggccctgatgtgttgggctggagtagtcgattgattcgccgcttctgcgttggcttgcgttgacgtgccaacgtcatcgatagccaatacctcctgcggcacgctcattgtcgatgacccatagtcttcgagaagatgtaagaccggtggttcatgaggatcgatatcgattacctcaacgaatcgatctgaggctggagtcgctccttgttccttgccgttatccctgacggggacgtatgactcaggagacggagctttcatggcgccgaggaagactttgtagctcgagaggttgtgattctttgtcttgtgaataggacaatagacatcccgagttggagaagtacgctgaattccacgttctttgcatgcgcgaatttcagcatggacgttgaggaaaacccagcaatcttgcagggtgtgtttcttggttttgtggataggacaccaagaccttgtggcttcggaagtcatctttgccggctcgtggttcatgtcagaagggcaaggtttggccgtatcagaatccttcccgagcttggatgtcgtcgatgatccgttctccgtttcgacaggtggatttttcgacatgaagtcgccttggtttgtagccactgcgttctcgtttccggtcattggaggaccggttgagatcagcgtcgtggtgtaaaacgggaagacgatttcgccgacttgagtccataccagcattgttgaagcagggagcgcttggctgaggctggtgttgacgttgttgtcgacgaagctggatgacatagtagtagaaccttgagtaccaaatccccctacctggcgcgccactgtcgacgggtgatacccgtagaccggatataaagggtattggggtacgttggtacaaggatctacgtagtacgacatcgaacaatcaaaatacaagaattatactggttcaggccccttggtaggtaatagccctaatccagttgatatgggattatatggtggaaaacacaggttacaaagggaacgatggaacttgtcggatccggcgagatcgtagtcgagtggattcgactagctctcgatgacttggctcctcgcagacttcggctttgtaggctgtgtgcgttgtgttggctctgagattcgatgatctatgccctccccgggggggtcccttttatatcacagatctggaggtctccaagtaggactcggagatatcagacccaatacgatacgtcgacgacctagttctgtccgagaaggactcttcccatcagtagatttcgtgaaaggtttccttaggatatgtagaaaacatccgcgtgcgcgtgggtatgccatgtcgatatgtaacgtatatcgaagggtagagggtatgcctgacccataaccctgacaacatgtcctttgttttagactagggcagtgttttgccacttaggacaagtgactttgagtcctagttaattagtgtctactaggtgtcattgtcaatctgtgtttgcacaacttctgctaaatatgttggtttttatgatgtgtagaacttgagatatcttatatcttgttgtatgcattgcatgtcactagttaaactcagttttaccaagaagaagcttcattctctagtgcatattgctggcttgatttagttgtgtcgacgttgttcaggtggtctcaactctcaacctttttcttggtttatgctttccatgccctgaacagtaagtagtaacataaatcatcagccaccaattaactgaaaaaagctttgttgttcactcgaaaaaaatatggcaaaaagggatcagccacgtgcccaggaagtgagtgttgccccgtcattgtcgccagaaagcgaagaaaagcaaagcaaatctaatcgtttctcttcactccaaaaatagcaaagcaaacacatccgtctctctctctctctctctctcccctactactatctcctcctgcccttccaatttatgttacaaacaaatcgttggttcctcttttttcttcagtttgtttcagtgcaactcagttcttggaaagaaaggttggatttttactctgaacaaagcgaaaggtaaaaccatctcttttgtaatgcagcaatttatgtatattttggcgtcctttcagttattttgtttgatcaggtgtggcaatgggcggcagcggaacgctgatctccatttaccctgaggatctcactttcctatgtaagttcagaggacttcttgagattatctaatgttgttaacatttacggatggttagccttaacccacttgtgtgggttcttcactccattaaattctcgtgtgtagttgagctggataagcggtgctattgcaatctcaaggtggtgaacaacagcgagcatcatgctgcattcaaggtccatggccttccatttcatgaccaatattttctaaaacttggcgagaaggcttgatgaaagtttgtttcatgtcaagacgacattaccgaggaagtattttgtccggccgaacacgagcattgtccagccatgggattcttgcacaataacaagtaaatagtaccttcgccgcataataagttaatctaatacgagatgtgacatatcccagtacttgtccaaattcatagtactagtatatatcacatcttgtattagattaatttattctgggacggagggaatacatgttcctaatttggccattttatggtatgccaagccatggctctcttcaggctccttgtttggtcttgatatttggatatctgcattgttcttgggtgatgtagttacgctccaggcacataaatagtgcccaccaaatatgcaatgcaaggataaattcttgatccagagcaccaagctagtagctaccagtactgacatggatgagattccccccaatactgtgagcataaaatgcaaatagatgatttgcaagctttattagtgatgcattattgttacaatgacatgactactgacccaccaactatatgccatttttgtatcggtccagttcaacaaggaagtcgataaggtgattgaggaaatgaagcttaaggttgtttatacagttcccagtggaagttttgatgattctagtattacatcttgtcgaaactagatttcggcaataataaaagggggtggctatcaagctggaaaagtgtatgggtttggagacaaaggatttatacaggttcaggccttcttattgaagaagtaataccctactcctgtccggggatgaatccgccgaatgtcttattgattatatgatttggagaaaatcaacatctgccgctagaggcacccggaccccccttatatatgggaagaagtccgtgttacaaaagataatctatatccctaacggaatatgcagatacagataaaatacagtcgtagccgactaagtctcaaggtatttccttgatgtacaagttgagaaacaaacccgagacacaaataagatattctatctatatttggtatcctgtattcagtccaaataccatcgccgtgtagatatgggatatccataatctccacagtagcccccacgacctttgcagtcaaccatcatagccttctcaaagataatgatccgagtgcttcaaacatttcatgccaagatctgccgagtagcgaagacaaagactgtaaagggcgaaaagataaagaatatggtgcatcgaatagatgcacctaattaggtgtagcccccaactatgtgattagttaacaaactaaacatatagttgagaacaaaataatagcacaatcatgcatcatatgacaaaagcatacgcgacgcccaaagaggcattctagccgactgctttttagccataataaaaagaatccgagtggttaacactctaaaaggttcacgaatgaacacacttgacgggcatccgaatagaaaattctaagattacccaccaaaaattataaaaattatggtaatgaataagtctaatagcctaggctatgactatttaccataatgagaacaggcatataacataccaaagaaacgactatggtaaaaaacaagtcattccaagttaacccagacagcttttgtagcctaaaaaagcttacaaaaacagcataacacctttctgtcgggcaccttttaatttgcattgcaataattccaaagaattatatgaccacgtaaaaaggattttatcagcattgggcaacactattatgcgcatagattgccaaagcaaaaaatgcctaagtccctaaggagcacaatgggccacgctgtcaaaaatactgggctgaggtactgttcaggcctaagcccatttgcacctccgatacccttaacaagaaatcccgagatccaagcgtcacttcgtcttccccgccggaactctcgccattttccccactccctgctacagtacagagctgcgccggcaaactagggttcaccattccactcgaatccaccttcaaaaagttcatcaaaatccttcccgtgatccgccgcctcaatccctcacctctccctagccatccctcgaatcaaatcagcgcattcgggtaaaatcgatggcggaagagaaagaaagctttgaaggccaatgggcgccatccgacgtgacggaggagaacctgaaggagatggtggcgcacggcgttcttcctgccaaggagatcatcgggtggcggccagcgtgcggtgaggcttttccgtcccccgatacacacgaggttgtggtcttctctcatttcttctatggcggcttcgctcttccgacctcgaaatttttccgcgggatattaagcttctatggaatcagcttgcatcacctaaacccgaattccatagtccacatcgccaatttcgtccatgtttgtgaagccttcttgggaattaaaccccacttcgctctgtttcgccgaatcttctttctcaaaccccaaccgaacaagagtaagccatgtgtagtcggaggggccggatttcagctgagaggaactctgagccagaagtacttctcaatgcccatcaagacttcaaacaaagggtggcatgcgaactggttttatattcagaatcctgagcccgctcttcctgagtactcttgtcttcctccggtgtaccaagatacctggaactctcttcctattggggatgaagcagcccaagccttggaattgatggatcgcatgctaaaactcaaagaacaaggcttacaaggagagcagattactcggcacttcatcaaatgccgattggcaccaattaaagaaagatcccgtacggcattcgagtttgacggcaagcatgatcctaatcgtgaagaaccagactctctggattttaaaatcatgaaggagagaatgtataaaatcttctcaaatgctattgtcgtcagctactcacatcagctgccagttgtgccatataatgcattcaattcgcctccgcaggtatgtatctgaaaccttcaacccatgaccaaaacataatcttgtcttcatgttgagttaactaaccatggaggcatctcattcaggaatatgtattgatgaaatctgaccccccaattactcagcgccggtctcctcgccagcacaccgttaagggaggtggagggccgacaatcagatcggactcgcaacctcaaacctccaatccgactgggcaaacaggttctcgcaagagaaagctgatgcttaacgatgacgaaggcgacgacggcaacaaatctgggaacaaaagcctacccaataaactcccaaagcataccactcccaggaaaaaactggctggccgtccaacgccaaagatcagaacatcttccaggcataaacctcttggtaccatttcgctccggtatgcttctctcatgaaaataatactgaatattgaaaggacactttgcaggaaaccatccgacatagatccaactggaaaagatcctgatccggttgtgacagagccaagttcatccaaggattctgagccgactgccgagaaccagccgactggcgctcatacttcaggtgatacagccgatccgagtgaccagcctccgactggagaccagtcggcagcaactgaaactacaacaacccaagagcccccgactggaaaccagtcggacgtaggtccagaccaagaaattcccgaagttgaagcgcagacgacgacttctcaaggaccagaggctggtaacgacgctatgattgggtcttcaaataaagaacaagaatcgcctcacgctcagctaggaacatcctcgggtaactcatcttctcaagtgatgccgatttgaataactccagcttattcgtctaatatcttggaaatacatcaggaccaccaggcgatgacgaagaagaaatccctcgcataaaggcggctgacgactctcgtcctcctatcttgctcaaatggtgggacgagaactcacaagctgccggcatcgtcataaatcgtcaaaaagaagatgaggaagtgtgccagctgaagaaggcacttggagaagccactcgcattgtgaatgtaaatcctctgggtgactgcctttgatgactttgttttctctttagcagaactaaaccatgaaccatcatgcagagaatccatcttcgcaatgaggccaagacagcaactttagaaaagctggttcctcatttgggaactcttgaagcagtcagggaccagctacacgaggccaaggagcttgccaaaaagacagagaaggaattaagggaccgaattgcccagctccaggattcaaacttcgagctgagtggttcatcaaaaggtaatcttctagatctgtcccattaatttatgttgtcataactgtatcctcaaacatttggatttcaaacagcgcaagccaccaggatggctcagatggagaaacaaattgaagtcttgaaaagagacaaagtagaattggctgcgcaaagggactcggccttgaaggaggttgaaggtaccgccagctgacaatctgaacttctctctttttaaggcagtagattttgatcataaacgtgttttgtagaccgcaaaatcaaatctcaagctcaatttgacgtcctggttggtaagatcaaaaagcttgaaggagcaagagatgaagtcgctaatgtcgctacaccacttgtccaagctatgttcctcaataacagtggtccgagtgcactcgacgcaaccgaaatcttcgacaagctgagagttgctccagatgtatatttcaagaatatcaagaaagctggaagtatgggagctagcatggcattggcgatgaccaaatccttgtacccaaggattgaaattgacgccattgatggctttgcagacgggacaagcgaagaagctgctcttgatcttatcagcaatgctcaaaacgcggctgacaagattgcaagtgacgttgtagagcaattccgcaataccgaccttcagccgagtagtaataactctgatgatgaaaaaactgattctgactgagtatgaatgtaacaaatggaggttcaacttgtacaatactggtgtatttatgctgtgtttgataattctagccaagtctttgatttcttaaaagcttttatcaagctttgttgagcctagaacccaaagaagctattaaaaactttcagtcctcgcagacgaagtagaaaaaccaaacaaggcaatgatagaccaagtaagcaaattaaattgataaaaaatcacactccattattatgatgatagcccccgactgacaacgtcaagaagaaaacttgatgttgacagtcaagatagggaagtacaatgataagtttaagcgtagaaacgacgaagatgttcaatgttccaagagttgtcaacgagtgtaccgtcttcgcgcttgagtcgataggaacctggtcgggtgacgtcagagatgataaatggcccttcccatagaggagataacttgtgccgatctcgtgtagtttgaattttcctcaaaaccaggtcgccgactagaaaggcacgggatcgaacattgcgattatgataacgtcgcagcccttgtaagtatcgagccgactgaatcaaagctgcttcgcggacttcttctaatcggtgcaagtcatccactcggtcctcttcgtagcgttcttcacggtaatttcgaaagcgcaaagactcgaattcaacttcactcggcaacattgcttctgccccatagacaaggaaaaaaggtgactggcctgtggcccgactgggtgtagttcgcaaagaccaaagtactgatggcagctgtttcacccatttgccggcatagggttttagccggtcaaaaacacgcgctttaatcccttgaagtatcatgccattggctcgctccacctgtccattgctcatgggatgtgccactgaggcatagcaaatcttgattccaaagtcttcacaaaagtctttaaaaactccgccggtgaattgtctgccattgtcagtgatgatccgattgggcactccaaatctatgcacaatgttgatgaagaagtctcgagcgttatctgctgtgattgtgacaaccggtttagcttcaatccacttggagaatttgtcaatggccacaaaaaggtgcgtgtaaccgccgactgcctttttaaacgggccaaccatgtcgagcccccaaaccgcaaacggccaagacagtgggatggtctgcaactcttgagctggtagatgaatttgtctggcgaaaaattggcaaccttcgcacgtgcgcacaattttgtcggcgtcggacactgcggtgggccagaaaaaaccctgccggtaagctttgccgacaatggtgcgtgcggcagcatggtttccgcatatcccagaatgtatgtctttcagcaattgcctcccttcctctaaagatacgcagcgttgcagaatccctgaagggcttttcttgtacaactcagcttcatgcataacgtaaagtttgctccgccttgaaatccgctcggcttcatctttgtcttgtgggagttcttgagaagtcaaaaatcgtatgaggggctctcgccaatcggcttcaaccagagctacgtcatgagtgcccgcaatttgagtagtatccttgtgaggtacggtcggcgtataaaggtgttcgacgaaaacatcagagggcgccacctcgcgcttggatccaaagttggcaagtctgtcggcggcttcattgttgtgtcgaagaacgtgactaagctcgagtccatcgaacttgtcttccaatttgcgtacctcttgtcgatatgccatcatattgtcgtcaaggcaggaccactctttcataacctggttgacaaccagctgtgaatcgcctcgaactattagacgctttattcctagggaaattgcaatccgcagtccatgaaggagcgcctcatactcggcgacgttgtgggatgccgaaaaatgtatccaaagcacatagcttaatctttctccagttggggaaatcaagaccactcctgctccagtgcccgaaagtcgttttgatccgtcaaaatgcatggtccagtgctccatcttctccgcgggggtatcctcctggcactcggtccattcggcgacaaaatcagctaacgcttgggacttaattgaaattcggggcttgaatgatatgtccaaagacatcaactccaaagcccacttagcaatccgcccgtttgcttcgcggttatgcagtatatcaccgagtgaaaatgatgtgaccaccgttaccgagtgactttgaaagtagtgagatagcttcctggtagtaattagaataccatataacagcttctgaacctgagggtacctcgttttggagtcggctaggacttcgctgacaaagtaaatcggtcgttggactttctggacatggccttcttcctcgcgctcaacgaccaagactgtgctcacaacctgggaggcggctgctatatacaacaacaacggctcctgcgggtgtggtgaggctaagaccggtggctcggtgaggagtttcttgaaatcttcgaaggccttctgtgcatcgggtccccactggaagtcgtctgttttctttagtagcttaaagaagggcatcccccgctcgccaagtcttgaaacaaatcggctgagcgccgccatgcatccagtcagcttctgaacatctttctgggtacttggcggtttcatgttgaggatagcagtaattttctccgggttggcttggatgcccctatgagacaccataaaaccaagcagcttccctgacggtactccgaaggtgcacttttcagggtttaatttcatcctgaaagcgcggatgctcgcgaaggtttcttctagatccgagatcaaatcatccttttgcttggtcttgacaactacatcatccacataggcttcaacgttgcggccgatctgcgttgagaagcatctctggatcatacgttgataagttgctcctgcgttttttagtccaaacggcatggtgacatagcagtatgctccaaagggcgtgatgaatgaagtcttcaagcagtcggattccttcagtcggatctgatgataccccaagtagcagtccaaaaaactgagaagctcacagccggcggtcgagtcgactacctggtcaatgcgaggcaacccaaaaggatctttagggcaagatatgttgaggtcagtataatcaacacacatgcgccattgccccgttttcttccgaactagaaccgggtttgccagccagtcgggatgaaggacttctttaatgaagcctgctgctaacagcttggttaattcctccttgatcgcgtcttttctgtcttgtgcgaatcggcggagtcgttgtttgataggcttggcatcttctttgacatataaggagtgctcaatcacctctctaggaataccgggcatatcagatggtttccacgcaaagatatctttattgttctgaagaaaggtgatgagcgcgctttcctatttacaatctaactcggcgcctattacagcagttttagtagaatcagaaggatctaagggaatctttttagtcttggcttcgctttctccactttttgaaatcttggtagcgggcacttctccttcgctcgccgtggctgcagccagtcggatatcctctcgggctgacgccatctcgcgggtttgggccatgtcgcaactctccttgtcgcatgtgacggcttgcttgatgtcgctccgtagggataggactcctcggggaccaggcatcttcatcatcatgtaagtgtagtgcgggacggccataaacttggctaacgccgggcgtccgagtatggcatggtatgctgtctcgaaatcgtcgacttcaaagctgatattctctgtgcggaagttttcccgagtgccaaaagtgaccgggagggtgatctggccgagtggagttgcggataatcctggaattactccgtgaaaaggcgcattgcttggttttagctcggagcgaggaatctgcatatcatccaaggtcttggcgaagaggatattgagtgcactgccgccgtcgatgagggttctgcgaagcttgacattacggaccactgggtctagtaccagggggtaccgccccgggtggaccactcggtcaggatgatccgagcggtcaaacttgattgcaatttctgaccatcgaagatactggggcgtgtcgggctgaacagcattgatctcccgttcagtcaacttttgcttccttttagactcataagccagggggccgccgaagatatggttgagctccttgcggtggtcttgaaatcctgccggggtgtcgccgtcgtccttcttcctcgacgtactttgttcttcgtcggagttcttccgtgtagtcttggtgtattgctccgcaaactgcctgtagacgaaacaatctttggccacgtggttggagttaggatggtgcgggcattgggagttcatgatcttgtcgaacgtgttgacgcgcgaatgctgtcgagaagagtgagtggcggttgcaacaagttcctcaggcttacgcttgcggtccttatgattgttacttccacctcctcccttagccggcgtacccttgtttggcttccaactgggacctgactgctttgatgcggtgacggcgtcttcggccttggcgtactcgttggctttttcgaacataagcttgactgtcttgggaggcttacgcccgaacttgccgaccaattcttcgtggcgaatccctttggtgaatgcggcgatgataacgtcgtcggtgatgtcggagatcttgttacgttgttcggaaaatcgtcggatgtaatctcgaagggattctccagatttctgaataacgttgtagaggtcgtattgtgtgccgggatgctcgaaggtgccttgaaagttggcgatgaagtggtcgcgtaattcagcccaagatccaattgtaccacggggcaatccatggagccaagatcgggcggaatccgctaaagccactggtaaatagttcgccatggccttgctgtctcctcctgctgcgcggattgcgagaccgtagatggtaagccacgattctgggttagtggtaccgtcatacttctctattccagtcggcttgaagccggctggccaatccactcgacgcaggtcgtcggtgaaggctgctactccgtcaaggtcgtcgtcgtggcggtccggcgaatgatgatggcctcgagctgctcggcgctgtatgattgtgtcgcgaagatcgacggggcggcgacgaggtggtgagcgaggccgttccactcggcgctccctatgatggtcgggaggtgagtgaacggaccgctcgtcgtgacccctgctcctgcgattggatcctgcgccggtgatgctgaggcttggatgacggtagtcatgagatcggaagtgggggactcggctgccagtcggcgtgtggacgctttcggagttaactgggaccgaagccgcaatcatggtcttcgtctggttcaagatgttgacgacgtgatcagattgattgagctcgttttccttgaggagggtgtcgaggagggtgatcgcggcaaccgcattctgttgaggggtgcggaaaaccggtgtcccttcaacatcttgttggccgatgagatcacgcgctcggcgccctacttccaaagctcgctgccgtcgatcctcagcctccttcgcggtccgctcacactcctgctgctcacgccgtagccgttcttgttcttgtgcttgatgctcctcctccagtcggcgacgttcagtctcgcgacgtgcttcggtctcccgggcttggcgttgctcctccgtctcgttatcagccatgaagacgccgaagtagagaggggtgtagttgtcatctaggcttccgtcgaagtcgtcgagatccgggtcgttgtagcgagagctaaactcgtcgtactccacgatgtcggtggggcgcgagtcgacggtgggagaactgtagtagccatccagctgatccgtcgaaaccgtgccgagtggtaagaggatgacgccgacttccctgaagctaggcgaagtcggtgttgaagccgacttccgcctaggcctacgggatggagacgctgtcgtgatggagacggccgccaaatcgtcggggagcttcatcaggatcggtgggtaagccccatcatcttgatctggtgacgttggagaaggtgcgatctcacccgagtggtttgaagccaactcgattgagatggtcttgaagtaactttcagccgcgtttgggagtccaaacggggctgaaatccggttctctcccgactggtctgacaccgagtcaaggagagagatcttgccgttgttgttggtgacgaagtcgaggctgccgaaccgaaacgtctgcccgggtgggaagacgaggtcgtcgatgccgaagacggaacccattgcactgatcggcgaaaagcttgacgcagcccctacctggcgtgccaactgtcgaaactagatttcggcaataataaaagggggtggctatcaagctggaaaagtgtatgggtttggagacaaaggatttatacaggttcaggccttcttattgaagaagtaataccctactcctgtccggggatgaatccgccgaatgtcttattgattatatgatttggagaaaatcaacatctgccgctagaggcacccggaccccccttatatatgggaagaagtccgtgttacaaaagataatctatatccctaacagaatatgcagatacagataaaatacagtcgtagccgactaagtctcaaggtatttccttgatgtacaagttgagaaacaaacccgagacacaaataagatattctatctatatttggtatcctgtattcagtccaaataccatcgccgtgtagatatgggatatccataatctccacacatctttaggaagcatgagcttcaaattggggtctgacgatctcacggtgagaatactatgctggaatcttgtgtaatgttgagcaaacttctgtgcaaggggactcacgttttgcactacaactatatgcagatgttgaggaatgcaagcattgaagaggtaatgcgattgatcctaaaggcatttatcattttattgggaaactacacctagataatagtatgacaataaatctctcatgaattctgacaagaaattatcatgccatttcgggcattaccatgataatgcttttctagtgagaggagtaatgattcatctaaaattactccataagagttcttttattttattcacaccgttttctggcaggtggggcccgcgcaccttcgcactctctgttgttcgtggttgccgccgtgccgctggtatcgaaaggggaaaaaagaagtggtggcttgaagaataggctaacttagctttggctttggctagctcgctttcgccacgtcggatggcaattcttttttgtttttttcttggatatgatttatttctctctctgttttttttttgttttaggatttctaagtactgcttcctctattccaaaatgtagctatttatagcacagtagcttgtcctaaaatgaaactattttttttcatctacctccttcaaccaatcacaaccatttttcatttatttatttcatcaactttctattcttaaccaatcacaaccttcctttaatcatttctatcaactttcttgatacacatgcccatcttaaaaatgcctacaatttaggatagagatgtgctagtggttcttttgttattgacacgtcacctcactcttggcgttgtcatatggtcaatttcagcgacatatctgttgaagtcacaaaaatatatactccctctattccaaaatataaaggattttggatagatgtgatgcattttagtactatgaatctggtcaagaaggaatataagaacttttagtgttggacacgattattaaaaaagtaggtagaagtgagtggtagagggttgtgattggatgagtagtggaggtaggtgtgaaaagtgaatggttaagggttgtgattagttgggaagagaatgttggtggagaagttgttatattttgggacaaatcccgagggctaaaagttgttatattttgggacgaagggattatattttaggacggtgaggtatataagaagatgatgtgatacataggacaatcaaacaaatattataaattgatattaaaacataatgcattgggggtgttcagtctttcctgcaagctgcaattgccaccgtgaactactagcgaatacccccattgactaacgttgtggctgattgtctgtcctcatttgtctaacgtgtgatatcagtctatgtgtaatgctcttgacacaaacatcacaacgtttgcaatgctctatcagtagacacaaatagtcaaataggtataagagaagcgtatgctaattatgggaagaatgcttgatgtgtctatagacataagttgaagtatcctggagcacgattgcttgatttctaaaacaatattttcaacaaccacaggtgctagcttgcaacatatggattttcccacaacggcgtttggattgaattgtttttagctataggattgaattgttttcagctagggtgcccattatgttttcagctatttgatgatctccttttcatgaacgtgcaaaaggattacacgtcaatacattagaagaagcatatttttttaaaaaaaaagaaaatacacgtcacaatggctgaaggccattgtcaaggaacaaaaggaaaaaaaaggcttttcttggctcttcttgcattatgctctatcaatatacttgcaacatatgttcttttccacgacaacgtttggattgaatgcttttaggtattggtttgaattgttttcagctatttgatgctcttcttttcacgaacgtacaaaaggattgtacgtcaatatattagaagcagagtttttcaaaaatatgcatgacgcaacaactggatgccattgtcaagaggaacgggagaaaaaaaaggcttttctccagggacattgcgcaaaagaataaatttgatgctctcatgttctatcaatatataaggcaatcttcttgttttcttttcaaattttttttccaaactcaaactcgtgtctccactgctatccaatagaggtctttctctagtgctagccaagtgttgtccattaaaatttcaactacttaatcagcacgcacagacctatatcagtccctagtattggttccaaccgatcgagtgatgtgctctcatccattcattgccagattgtccgtgcaattgtttattttcattgtcaaatatatgaaacttaagtgataaaaatgttttttttgtttgtgtcaatcgcattgtttcttggttaattctctaaaagtgataaaagttttttttttttgaaagtgcaacctaatgaaatactagattttgacatgcatcttgtgtttctcgtgactgcaagaatatcaacctgtcactagagaaggagaatagagaagattaaaaagatatgcaaaatgaggtgtaccattagcgtatgataaattgagtattaatcattttaaacctgaaaaatggattaatatgatttttaaaacaactttcctatagattttttcttaaaaaacacaccgtttagcagtttggaaagcgtacacatgataaacgaggatattttcttttcaatgtgcttgaaacgaccaaggattgttgacatgtcctttgttttagactgggcagtgttttgccactaaggacaagtggctttgagtactaaagttaactagatgatgttagatattgtgaaatggttaaatgatttgggttgaaatattatgaaaatgatttgagaatgatgatttagtatgtgtatgtttagttttagaatgaaataaattgtagatataattagtatatgcttacatgttgagccttgtgtgtttagtgtgttgatgtgatatgcttgcatgttagattttaggagtgctaataaatactatgcttgtatgttgagctttaggtatttaatgggtattagctttatagaaagaataagggattagtgtctactaggtgtcattgtcaatctgtcattgcacaacttctgctaaatatgctagtttttataatgtgtagaacttgagatatcttgttctatgcattgcatatcactagttaaactcagttttaccaagaagaagcatcgttctctagtgcatattgctggcttgatttagttgtctcgacgttgttcaggtggtctcaacctttttcttggtttattagtcatgccctaaacaataaacagtaacatagatcatcagccaccaattaattaaaaacagctttgttgttcactcgaaaaaatataggggaaaggaaactgccacgtgcccaagaagtgagtgttgccccgtcattgtcgccagaaagccaagaaaagaaaagcaaacacatttgtttctctctctttctcttcactccaaaaatagcaaagcaaacacattcgtttctctctttctcttccctgctactcgctcctcctgtcctaccaatttatcctcgaaagaaatcgttgattcctcttttttcttcaatttgtttacgtgcaattcagttcttggaaataaaaggttggatttttactctgaacaaagcgaaaggtaaaaccatctcttttgtaatgcagcaatttatgtatattttggcatcctttcagttaatttgtttgattaggtgtggcaatgggtgccagcggaaggctgatctccatttacccagaggatctcactttcctatgtaagttcataggactttttaaaaatatctaaagttattaacatttacaaatggttagccttaactccgttaaattttcctgtgtagttgagctagataagccatgctattgcaatctcaaggtggtgaacaacagcgagcatcatgttgcatttaaggtccatggccttccatttcatgaccaatattttctgaaacttggcaagaaggtttgatgaaatttttttttcaggtcaagacgacatcaccgaggaagtattttgtccggccgaacgcgagcatcatccagccatgggattcttgcacaataacaagtaaatacatgtttccagtttggctattttatggcgtgccaagccatggctctctttaggctcattatttggtcttgatgtttggatatatatatctgcattgttgttcggtgatgtagttacgctccaggcgcagaaagagtacccaccagatatgcaatgcaaggataaattcttgatccagagcaccaaggtagctgccagtactgacatggacgagatcccccctaacacggtgagcatacaatgcaaatatagatgatttgcaagctttattagtaatgtattattgttacaatgacattgactactgatgcaccaactatattccatgcatttttgtggttcagttcaacaaggaagtcgataaggtgattgaggaaatgaagcttaaggttgtttatacagttcccagtggaagttctgacgactctggtattacatctttaggcagcaggagcttcaaattggggtctgacgatctcacggtgagaatactatgctgaaaacttgtgtcacgctgatcaaacttctgtgcaaggggactcatgttttgcactgcaactatatgcagatgctgaagaatgcaagcattgaaaaggtaatgcaattgatcctaaaggcagtaccattttattgggaaactacaccaaaataatatgacagtaaatatctctctaatgaattctgacaagaaattatcatgattcatggcttcctaatatcatcttatgcatggatactctgctgcctctacatgtgtataatgcttttctagtgagaaaagtaatgatcatctgaaatttctccataagagttcaaatgcaagacacgcttgtgaagtgatattgagatgctggcattgattagaaagttcatgtctgagaattaggaagataatgaagcaacgatatagatggttgaaatgatcataaagtagtttcctttatcttgactgacatattccaaataagcaatttggataaattttttgtttcctaaatctggataaagagtttgccttattaaatgtgccttgtcttatggcaattctctacaattttaaccaagcttgtctgagcaaagaaacatcttttgtgatatgttctgttatcctttttgtttcttacttagttccttgttttcttctatccagatacagacaatacaacgcctaaaagacgaacgagacaccaccctgcagcaaaatcagcaaatgcaacgtgaattggtcagccttttttttttcttttttgcacttcattttgttttgtgatcatcactttatttcattgtagcttttatgtttctcaatattgacacctgaactgtgaaccttatactgctcttgctcatttgttatcatttgaattcgcgatgaaaaatgtttagcatggagaaaaaacaattggttttgattaaatatatatgtctgactttgagaaaaatgcaaaagaaattattggtccttggtggataacaatttttatatttctacaattgtgatcgatcaacttttcattcataatgcaactttagtttgctcaacatttatttctttaatgggtcgctgaaacaaatgtgtcaagggaaacaaaagcaaatcaataaacgtttcctactattttacagttgaaactgaataattgtaggaatgcagatgtgaaaaaaatcccattgctccaagcatttcatggatgtaaaatatccttgttagcagtaaagaattcaagatgaatcgtttgtgtaccccctttctcccttatattgtattttctatttattatttgcattatatatatttttttcaggatgtgatcaggaggcgtagaagccgcaaaagcgatgcgggtttctccttaacgtttgctgcttttgctgggctcataggtgtcctgattgggctcttgatgagcctcatcttccctcgcccacaggctgctgcttaataaaatgccaatttcacaaccaagtgatacatgttcagcttaatgcccaacaatgtggccattatcgatcaaacaatcatagctaggttaataatcgagtcagctgctctggggaggaaaaatatatggaaaattctactttagtctcaattattcttttgttctttgcattgtagttaatatgcgtcacatcagaaaagggtcacaatgtttcatcaacccaactcccccttcctttttttattaaaaaaattgtattttcccttcttatgtaatctttttgtacaatttagtttgacataaacatatatcagggagaagctgtatgcattcaccgattggatataaggtcatgctcagtgaaggacaacttcatgagctctcctcatgtccctatatgttcgattcgataaactaggataggtttgtacgtgttcgatatgataaactggtcctctcatgaaaaaatattctctagaagagtggtaagagggctgcctgggccaccatcgttagcacggaccggcgatcatttgccacgtcaaaaaaaagatctcttggaacccaaggatgagggttataaatctgtaatgctcctatagtttcttctgtacataatcagccgttgccaagatttgagttttaaaacttatttaaagttgatttgaaagtttttatccgaagtttatttttcagcaatggcacttaaatagttaagaataaatatataaaaatttgattgacaaattattaatttagccaaatattaacaatgcgccaaatgacatattagcaacaacaataataataaaatacttttgtaaatatgaaaaaaataaatgtaaaatttaaaaaaagttcccctcatccc

SEQ ID NO: 7405 - DNA, 54125 bp, Oryza sativa
gctgtgccgcacgaacgccaccgagtccctcacgtcatccttcgccgccgcgcacgacaccggcggcgactgcagcttcttgctcggcgacggcgccacgacggcgtcggccacgccgtacgacctgcagctcagcgaccgcacccacgccgtcgccattggcacgacggcgaacgcacacacgcccaggacacggacctcgccggcgacgtcgtcggcagcggcggcggttgagctcggcgtggacggattggtggtgatggccgcgagctctggcttagctctgggcgttattatgggggagggtggatttatttgcttcctaccctgtgctgggtcactgtgccactggcattgcactgcttgcctccaagctccctcccctatcacacccacacactcccaacctcacccccaatgacaggtgggtcccaccactgaagctacattgtgggacccagtggcagtgagtgggcatttttgcaataaggtttgtactgcagctttgggttgggtactcttttgagctgtggtgtggtgtactgaatgagagagatttgatttgggataaatcttttcgaaatttgttttcatttgggctcatgatttggggggaatgggcccatttttcttttttttgagtgaagtgtggcaatgatcatttggatttggatgcctttaggacctgtttagatcccctagtaaaatttttcatcctgtcatattgaatgtttggatacatatgtaaagtattaaatataaaaaaaataactaattgcacagattgcgtgtaaattgcgaaacaaatcttttaagcctaattgctcaatgattggacaatgtgatactatagtaaatatttgctaatgacggattaattaggcttaataaattcatctcacggtttacaggcgaattctataatttgttttgttattagactacgtttaatatttcaaatgtatgtctgtaaattcgatgtgacacgccaaaactttttacctctagatctaaacacagtcttagtccaagaatttcttctcagtacactctctttctactggttttctttcttttcctttttgtttccttcttttgtatctttctatttttcttttgtgtttttcagagctccttttttgtgatgaagctgtgtgtgtgtttgtgtggtcggtgtctttcaccttttttctgtgtgtggatgtggagtccagtttctcccttggttgcaggcacgcgtttgatctgtctgttcgttcgttcgtggtgcttctgatttctcgtcagaatttgcaaaaaagatgcatctctttttgttatctgtctctttttttcttgccatgctagtgaccaccactttttgttatttatttcacaactattaattttgtaggagcaagaagaggacatgaactctttttatgtttttttcaacgaaaaactttgaattgaagaggtacatatcacctaaatgctcatcatttgcatttacagcgcgtccaaaattcagcttcgaacagctcgtcaattgaaagtagttaaagtttcagttcgaatacgcctgcatttttccggggtttctttattaacttctaccgtgtaatcatttctgcatatgcggctcattaaaattgtcagcaacgcggcaatatgattaatttgacggttagcatgtgttagcgctgaccagcaaaataaaaattcccccaaaatcgcacacctattttgttttttcctccgaatattcgcattattcacgttacaaacaatatgttcaacacgcatgattaattaattggttaactaatcgggtcagattttctgagattacgtacacaaagattcgatctctctgaatcgaattaatttccctattgcccagcatgcagctgcgacatcccattcgtcaacaaccacttggccaactgatcaaatcgtgtactaataatagtttattaattttcctatttttctctgaattaattgtgtgttaaagagttgacgtagttgacaaatggaggtctcgaactgcatgtgtaacatgacactgaattaccagtccacattactaagcttattagttaacttctataccttgcaattaacaagtgcctggagtctctgaaccgacgacaacctaattgcatcgccaatataatgtacttctactcaacatataacatgcaattgcatacatgttttcagatttgcgacccgatcatctctgctgcttatgcatagaaaactgacgagatgtttctgcagctaaccaacgcgttaattagtagtttaagctgaccctgataagatgcaacttaacttatgagacgcatttggacatggagcagttgccatcattccatggctctgcaactgctagtaccgagaaagctcatttcaagggaagacattgctgcatggatgcatgatcaatatcgtcagaaaaactcactcactcactcacttcgactcgatcaatcgatcgaatcctcctccaatgcctcgccgcaaagatctcaccgaatcattgcggcatcaagaacaggagaaaatgcacgcagtgttctcagcacggttctatcatctcgaatcctcaatataattgtccgagttcagtaaagcttcagtacgattctactgcaatttgtttttagttgttgctaattcaattggttggtatctttgccattggagacatgttttaatgcagtgataggctctgaaagtggtcttccaacttatgccacacctaacatcgatcacttctttacaattccttcagaattcaggctcatcttgacacctcaaaaaaaaaaaaacactgaccaaaacatgtcggtctctgaacaccacaagctaaaagaacctgtcctcttgcagattggatggcatctctcttattactaatcttttgccctcttgtagactgattggctgatgtgcaagtcagatgatgatcacctgcatttgccaacgacgacctaatcaagagtttttcctagcagggcaagtattcttcagaaaagagaatgtgtgcaagtgttaacatcaggatgttgtggtctgaccaaacaaaccaatatatgtatacaagattgattccagccaatgtgctacacttgtacagcatcccagctgcctttgcttatgcttggtatccaagagaagtgtactgtgctagctagctagctgatgtacatgtaccagcatatctaatctaatctactgtttgatcagcttctttgtatacaatgcactggtcttattgtagtagagtactcctccgtttcgaaatgtttgacgccattgacttttttaaatatatttaaccgttcgtcttatttaaaaaatttaagtaattcttaattcttttcctatcatttgattcattgttaaatatatttttatgtaggcatataattttacatatttcacaaaattttttgaataagacgaacggtcaaacatgtgctaaaaagtcaacggtgtcaaacatttcgaaacggagggagtactaacactacaagacaattgtgtgtcaatgccttggggtagttggattggatggatggttctgcacttcagcttctccgtggatactgtagtttaacgaggtttgcttactgctccccagattatcacactctgattgtcgctttcagatatggataaccagaggtaaacagtcaggaaaagtaactaattgaagtagtactgtagtacataatggccgttgcttaaacagagaattggagcggttagcgaaagcgtcgatgtcaggtaagacaagaggcatccgtcatctatcggtaaacggggagcaagtgcatgcatatgcttcaactcctttcacggtaagtaaattagatatgggctggtaaaaacgaagcaaaagttggcatacacttgcatttcagaagcaggccaggttgcaaaaggccaacgagaaaggcaccaacttttgcattttttgacacacacagagagagattcgagagggaagagggagcaaatgctagagggcagcagatgggatgggaatattcaaaagatacacaagtaatataaaaaaagagagagaatggaaaaggaagagattgtgagatggcaacaaaagcagagcctggaaggaaagatcaaaagatgcgagcaaaggcagcagcagcagctgcagctatagtactactcttcagtcttcagaacagaaaagaaagcatcagaatttggaaccaactaccagcacagattgttaaagaggagtgtatcctacagtacagcatctgtacatgtaatgaaaaataaaatgtgctttatttttccgtgaacgcgtaaaaaaattacactaaaaaaaagttatagttacacaacgcaatcagctagaccggcttatgtcagagaaagagagaaaaggcaaaataaaaagctgaagcttagaaaactacagcggctaaatacaaactccaagcagcgggaaggggctgagctacgctatactctcaacaagtcccaaaaacagcaacgccagctaaagaccaaagatagccctccttgtgaatggactccagaaccaaaaatgtgctttagatttcgtgccactgtctcactgacccagccatgcagtggctgccgccattggagagcatcagaatacttcttcttctactacaaatagtggcagcaacagtagtaggagtacgtatggaaatggagaaggatatatgtaactggggattccgaggaggacgacgacggccgggcagtgggccggcggcggcctgaatttggaggcgacaggcgagctcctccggccggcacgcggattggtggggggatcgcctcggaattcgggccgagctggctttttttgttggtgttttggttggcccagctaccactcgtaataaagcttagtttgcaccttgcctgcacgcattgggctgcctaaagccttttctagtgctaatagtactgtctagtttggcttgatcagatcatcactcccagacatcatttctgatcaccactagtactctctgtacaaaaagtataaaaacctagtatcagattggataggataatccctagtgctttctaattcgtaatactacaaaatatctaatactatttttagtgggagagagtacgcattttgtgttgaagattaagattttcgtggcacgcttttcaaactgctgtttcgtgcgaaaactttttatatgaaagtcgctctaaaatatcatattaatctattttttaagtttataataattaaaactcaatcaatcttacattaaaaacacctcgttttacgtaaaaaaattaatatttatcttaagaaaagaacaccaccatactcttctctttttctttcttgcatctcatagaaaacgtcccatgtgaaatactagatctctcctcctttgctcataggtgaactgataacctattgttgcatttgtgctactgcaaaattcagcagcacgcgtgcatggtaacaccaaaaccgagttcatactacggacttgtcatctttttacatgcgagcagagagctggccaccaattctgtcactgatctgcctgccagcaaccaaaaaagcagctctcctttcgcctgcatatgctgtacaaaagccccccgtcagagattgcagctcatctaaaacatgcaatgttcagtgcacatcgtcgacagagcaagacagcaacaacctcacgttcttggacgaagctagctagctattgcaatgaacagatacaaacttttttcaggaaatcatgcggaggaacgccaaattttactcagagagatggagatatgatagtagtagtaatctgcttcaaaaattcaggtgattttcaagagagttcgatgctgctgctgctgctgggctaatgctgtccgtccactactagttgccggccatcctaatgtgtactggatcgcacattggaaggtgaaggattaacaacgtttttttggctaagctacctgttgctgtccaaattatcaggggaatcccatgcccaaaacccaaacaaaatatgccattccatatgccaatgcaatgcacacacacaccaacccaatctcaaggaagaacaagaacaagaacccggtgatgttgactcccacatctctgggccgcctcgccttccggcccaacatgtcctcccacccggcccatctaaaaaaccccatccggtgctttgaaaaagtcaacgcgaggtgggccccgccggacagcacgagtacaggccggaggcagctgagcctgacgcggtgacggacacgtggggaccacccgcccggcccagcccagccgctgccatgtggggcccacaggggatggatggaagccgcgcggaagcgttaggcacaagggggggggggggggggggggttcgcataaaggcgaaggcgaagaggccaactcggcgcccggattcggacgccgcgtggggggaggaggaggaagacggcgaccctcgccgcgaataaacaattccaaatggtggccgccaccgcatccaccaccaccgcgaggacgacgaggagcatcaccacgcgtactctgcctcctaccacctagctaggagctaactaggtcgtcggtgctcgagatcgggggagggaggcgcgatgcgggccagggagatgcacccgctgtgctgcctcgtctccgactgcgcgttgggtgaaggcgccggagggggaggtggtaagggggaaggaggagactgctcgccgacgaagccgccggtgggggaaaagaagaaggtggtgccggtggcgggggtgctgtacaagtggaccaacatcgggaaggggtggcggccgcggtggttcgcgatccggggcggcgtcctggcctactccaagatccgccgccgcgtcgccgccgagccgcctcccgaggccgccgccgccgccgcagccaacggcgtcaggctcatcggcgtgccccgcggcggcgtcggggaccagcccatcggattcgtccctctcaaggtgacgcgcctcctctcgcattttgtttttgtgttccgtctatttcgatcgatctcgagcccctactgcttacgatcgacgaaattaaatcgctcgttcaattcaattcaaccgcacgcatttcatcacctgatctgtttaccggtagtagagcaccaatttctccagccaaattttagttgcgcatttgcttccgcgaatcaaatatctcccacgagtttggtgcgccggtttccgcgcacagatcggaacagtccagtccaaccgatgctgcatctcgcaaagcccgacgcggcgtggccgcgccacgagccgtacgttcgccaagatctacggccgagatcgctagcaagcaacagcagcagcatcacatccacactggtagtagtagcatagtacaatggctgctgctgctgctgcctaacgcttgtcggataaagagatgccttgcttggatcggagctggagcagctgggagctggcatttctcaagcgcaagcaaagctcactcactgtgaaagagcagtcttcgcatcgacttttagcgagctacagtggcgatctttgtcatggcgtgctcaggggaaggagaggattagggcacgggaacgaccggatcaccagctggactttgttcagaaaggattgatggcatggcgcctccacttggatggcattgcatgtccgtgagttgttgggaatgtaaggtggtacggaccacactgtctatagccatttatatggcctgggagcttttcccccctcttcctcttggctcctgcttcagtcagcgggctttatgttcgcttgtcttttaggcatctgtttttttttacagtgctcagttatgggttttttacaatgcaggagactgtcgagatttaagtgtactgctataggtttgtaaaaaatctatttctgggatagtggattgccagcacagacgaatactagatgtgcatttgatgaagagattgcattttggtgtactgttgctactctggttgctgattctgtaattcttttgaattgtttgtagatctcatcatttagcgaaagtaaatcggatgataaacggttctacatcattaccccaaccaagacgcttcagctgaggactggctctgctaaggaccgtgtggcttggattgaagcacttgtttctgcgaggagtgaatattctcttaacgggggtgtaccgtgtgaccagaatgagggatcattttccactgaaaagcttaggaatcgcttgcatgctgaaggtgttggagaggcaactattaaagactgtgaacagatcattcactcagaattttcacagtatcacactcagatgaagcaacggtgtgaagactatttaaacttcattggcagtcttccaagggaacttgaggtaattcgttcttagagctcatttagtgatttatataagcaactcattaagttcccatttctgatagtaattctgaatatattccaatttaatgggatttatataggttgttaggacttttgaatctagcctgaaagtcaagtaataaattgattgtatgttatctggtggtctgaaactgtctgctgattgtattatgttcttttaggtagttaattcgggagatgcatctgctattgagaagccacagtcggagttgttcaaacatgactgttccagctctggaaaatgtagtggtacttgattttattttagttgtcctgttttcttttgactgttttgattagcattatatcagatgctccatgtgcatgaaatggtgttggttgcactttccaagcatatttatattgctttacttgtctatatctggtcctggtacatcattgcactttatgttattctccttggattaatctgaaaatgaaaggatggaaacagcttgaaataaaccacttcctttagttctgtgttgccgcattttgcccacaactacatgctcctttttgtgttcttgtttcacgagaggtttgaaacatggctattttctgatatttttatttttattatatcagagtacagcaacactgaatcttctgatgatgctggcaaacaagaggtagggcagttgtcagatgaggatgagtttcatttctatgatacaaggcaaagtttcagtgacactgctgcaagtcctgacttgaaaatgagatgttcaaatagtgggagtggagctcacaagtttggtgaattactagctatcgacaagacgaatgaatacttattgtcatcttcaaaacgccgttcagagttacccgtaccaatagaaaaggagaaaggtgttagcctttggtcaatgatcaaagataatgttggcaaggatcttacaagagtctgtcttcctgtttactttaatgaaccattgtcttctcttcaaaagtgctttgaagatttggagtattccaatttactggatcgtgcatatgaatatggttcaagggtatgcttatttctataacttccacctttattgtgaaataaactgctagatattatatcattctgtatatcacaattgaggagcataaactttgtcgtactaaaaaacccacgaaattgctgtatcagtattttggtgcagttaattaacctcaatttattcaactgtgttgagttgatactcatatcttaatttgcatatacatcagggaaacgggctgatgagaattctttatgttgctgcatttgctgtctctggatatgcttccacggattctcgcccctgcaaacctttcaatccattgttgggggaaacatacgaagctgattatcctgaaaaagggatccgtttcttctctgaaaaggtcagtttggcatccagcccattcatgttcaggttagaatttgttgccatttagtctagcactgtcaaattcttctgtaaataattgggagatacgcaatgtgaagtttgaaagcataaaagtggcagacactgttctgatgccaggcacattaatattcttctctacatttcacacaacatatgagttaatttgttagtttattcttgtcaccaggttagtcatcatccgatggtcatggcatgccattgtgaagggaaaggttggaaattttggggtgacagcaatctaaagagcaaattttgggggcagtccattcaactcgatcctagcggtgtgctaactctacagtttgatgatggagaaactttccagtggagtaaggtacaaattcttcactggaggcaaaactcttatgcatattttctctccattttttccattatgtttgtgcatgcttggtctagagatctggagaaggtgttggatatccttttgtcaataaacacctatcatttatttattttgccatggcaggttacgacaacaattaataaccttatcattggccgagtctattgccatcaccatggcacgatgaacataagtggaaacaggcaatattcatgtaagctgactttcaaagagcaatccttcctcgatcgtaatcctcgccaggtatgatgaacaattttccatccaggttcttgtttctttcatcttcctgtagaggttactaaaatgtatggtcgtatgaaaggttcaaggacttgttacggatgctaatgggaccaaagttgcattcttgatgggaaagtgggacgagagcatgtcttgcatcattggtgatgatgcttctaaagtgaactcccgtaatgcaaatcagagtacgggtgccactttattgtgggagaaaaatgtgcctccagccaatcccactcgatataacctgtcatcatttgcaatcactttgaacgagttgacaccaggtcttaaggtatgcgcaaagcatataattcgcctattgttagttttttgtagtgcaaagcctaacgtactatttgatgatttgttaaggagaagcttccaccaacggattcaagactcaggccagatcagcggcatctagagaatggggagtacgaaaaggctaactctgaaaaattgcgcctggagacgaggcagaggatggtaagtattcttgttctaaaaatttccttaattttttttatcacagtttttaaattcttacctgcttcactgtactcgtacatcgaactacactgaattttatggtcttttatcactgcacttttatatatgtccaccatctgatgggagtgaatcactgccccggagaatcttgattctcgttacaaagtgcagccagaacacctatttccttcatggaaaaatgcagttattatctgctctaactgcagcggttatctcttcctctacaggcaaggaagatgcaggagagtggttggaagccaagatggttccaaagggacacagaggatggaacattccgttatgtcggaggttactgggaggcaagggagcagaggaaatgggttggttgcaatgacatattcggcaataatgtgtccactctttgcaccagcgcaagtatatagagaaacttctgtttagtagtcgttgacaccccattaattattgaagacggtacatagttgatcggctgctcccgttgctaccatgcaaacaagagctaacatgctctcctcttgtcatatagaaacactgggacatttatgtggatactgggatacttaactgtgaggcctgctagctaacaatgttgttattactctcagtgatatccattttttcaatctttgtactgttccacagagatactgagttatatacttggttcctaattgtaattgatcatgtaagcttctatgctcatggtcatggataatggacgttcatctttcttttttgacctctgtgccaagccaggcgagtaatcttgtcctgtatagaaatgccaaattaatatattcaatttcctgttacgatttacgaatatcaaaatgctcagattaattaagatgctaatacattgatatttacgggtttttttcttcatgcttaatatagacgggatcgtgtgtcggggatggatccaacatcaagctagaggggtttatcttccttatccagccatccctacccttcttcctcctcttcttattacacaaatcgatataacagaatatgtaataactctttgctccctcttaggaaaatcttaagtaaattaaaggacttatgcaatactaatctacttcgtatagcacatctcacaacactagtccaaactattaatatgttttaaaacttataaatatttttataaattacactatattttatatattattgtcgtgatctctggacacggacaaagttggaggatagacgggaaagtacgaattctcgtctatcctgagagtgagctcaaaagacaaatgccaaaagtgagtaaaagtatttttctctactgatatgctccttgttaaaggatcttggttggtttaaatagtgctcagccgtgtactcaagatttacaagtttgccattgcaggattatatgaagttatcatattacccttaggggcatattggtacatttcagtcgtctcgacatctagtgccagctggtgagagcaattgaggtggtccccataacacttccctaaaatatattatttgttcgatggtactttcccttaactttgattgcccgagttgaacacccgtgcttggactcgaacaagctctcccaccttttggctcctcgtcacttcatttgctttagccaatgaacctgctcaaatacaatgtcactagtgatgttaggtcaagccaagcaaacttactcgaacacattttccttggaacaagcgctcttaggcaaatgcaaattcctggtcagaagctgatgcagatgggaattttattcgagcaaatagtcgctcgaatccaatttcctcgctacccatgttttcggccgagcatggggatggtgttcagccccgctacaacaattataatattaattagacatttatttatttgtttgtattagaaatttaggtggttttcatgttcctaggaatatttgtctctatattagtgtccggtcgtattctatctttatttctattcgagataacttttatttgttttcgtatctgagctatccgtatttgttttttatatccgataaaaatacgaaaacaaatatgagatatgcgtattattcgtcctcatccgctccattttcatcagtatccaatgtgccctcgctgctaccgttgcttagctagttcatctaggctgctttcgtttgtgacggttgggaacattcccctccggcacgaaaaacaaagcagttcattagcgcatgattaattaagtattagttaaaaaacttgaaaatggattaatttgatttttaaatcatcttttctataattttttttaaaaaaatagacagactgtttatttgtttaaaaaatatgtacgcagaaaacgaaagaggggagcaggaactctaagggccgttttggtttgataccaaaaacacaccctaccaatttattggcaaattgaatagtatgtgtgttattttggattgaagccaaatatttggtagttcccttatactatttggtcattttctagaagtttcttcactgtactatgagaatttgactttatattggtagcaatccaaatggtagccaaataattttaccctaccaatattttggtagtgccaaattttgcctagactttggcactaccaataaattggtagggtagagaaccaaacaagccctaagaaacggaatcagccctaatcaatcatatcttcctttctcgtggggcctctaatcatcttcctttgggatagtggttgagcagcggttatcatgtagtcgagtcaggttaggccaaatcacacgtcgacctttgcgtacgtgttgggcctcacctgtgatggactgggccatgctcagctttcatttgggccgcctcgatcggctactttggtttagctgagccggtcaagtgggttcggggttttcttctccgaacccttaaatttttgggtttgttggaaccatgccaccctaattttgtaaaatttgagatatgccacccgtatctcaatgacatgtaggacccacatgagtcaatgacatgtgggtcagggtgacatatcacaaattttataaaatttatgtggcatggttcaaattttctctaaatttttctcttctttcgttggcagcatgcagatgagctgccgatccagccaccttggaggcttccagacagttcgatcgagccgcccttaattagctcatgaacctctcgtaacaatatttattaatgccactaaaactgatcgatatatgatctctttgccttttgcttgctttaattccaagtgcctcgtgatcttcgtgatacttacaagaagatcgatgaggtgtgatcttccacttcgcttcccgtgttcctcgtaatgcatggtatgaggcgtggtatatttataaatgaaaaataatttataaataaaatttttatatacgtgttctagctatctaaaagtacaggctgaaaaataaacttcgttgaaaaaaaaactaaaatcaactataaatttaaagttaaaaatttaaattttaactgatgaggccggaggatcgagaggatgatgatgagtactggagagagcactacgtccatcgatcgagatcgcttgcttgccattgcatggcgtcgtcgccggtcgatcgaacaaatggaccaatcaaacataaagagcagcagctaacactgttccatatcaaaggaaatcatgacccactgattcaatcaatttatgtggagtatacagtacacacacatttctcatatgaacaaaaacttttttgtgtttaatttattgatcagattgagaggtgcgcccgcacctcgcatatgcaggaatttcctcctgccctgcacactatcagtataaaagacgtataaacatatacatcagtaatacactttgtggcaaattatacattgccgtataaatctcccccttccctacgtacgtatatatcttccttctacatacaccccacgtacgtacacattaattaactccacgtagttattacgtagttggttaattaattaattatacgtgcgatgagaatacacccaaattatacccggcgaaatacgtcgaatacaatacacgaagaagaagaagaagaagaagaagaagaagaagaagaagaagaagaaaaattcaaaatacaagaaaagaaaaaaccaaagttattacaaggacgacgtacatacacgacgcgtgcagctaactggtagctagcttgcgtatgtcatgctgacgcatcgatcggtcactattagtggccgacggcgatggtctcctcgtcggcgagctcgatgccggcgtcggcgaggcgcttctccttgtagacgtaccccctggcggcgacggtgaagaggacgaggttgatggcgctgatgacggcgagcagccagtagaagtagtcgagcctgccgtcgtcgaggttgtcggcgagccagccgccgccgcgggcgccatggccggtgaccttgtggacgatggtgacgagcagcgtgctgaagaagaagccgatggcgcaggtgctgaggaagaggcccgtgctcatggtcttcatccccttggggcactcgcggaggaagaagtcgagctggcccatgtaggtgaacgcctcgccggcgccgacgaggaggaactgcggcatgaggaggaacaccgtgggcgcggcggcggcggcggaggcggaggcggtggcgcggtggcgctcgacggccgcggcgacggccatgccggcgatggagagggagaggcccacgaagacgcgctggagcggggtgaggccgtgcgggttggccgtggcgcggcgcgcgacggggacgacgaggcggtcgtagaaggggacggtgaggaggatggaggcgatgaggaagacggtgagggagcccgccgggatgaggaagccgccggcgaggcggcggtccatgagctcggcctgcgcgacggcgaaggtggtcatctgggcgtggatggtccagaacatgatggtggtcgcccagatggggagcatccgcaccacctgcttcacctcctccacgtccgtcctcgtgcacagcctccacttgctcgccgtcgccggcgactccgccgccgacctgtcgatgatcgccgcatggtccaggaacctgcacccatattacaaaccaaacacgtcaatgattattaccttggtggttctaacggtcaaaaataagtaattttcttgtggtgtttcttggcagccaaagtaagatatattcttatcggtccaaaccgacaaagttataaagttcgtaatatttttaatttgcttagtggtccgactaacaaaaaaatattctcttatggttagcagccaacaaatatgaatatccctagacggccgatagaataatgaattttggcggttttcatgttatacttgatggtttttgaccaccaaaaaattacggattattgtagtgctacttcagatcatcaggtgacatcaactagattatagattattctcatcttgtcatgttatttttccaaaggcagaaatggatgaatcaaatattaaaaacctaaaaaatgcatttaaattttgagatgagttagaattgtgttagctaagataaaccacacaatgtttattcatggatgcggattcttcgacttaagttacttaattttgagtcgctgacatataaatttactttgctacagtctcatacattagtgatctaacagtttttttttcttttgcgggaagatctaatagtcactggacttaagtaagaggaaggtatagtaggcgcgtgcaaacaagggagcagccatgcgcacgtagcagcgcggtagctaccgccactgcaagatccaagtctttgtagcggccggtgtgtcgtacgtacgttgcatcacgcagacgcaaagagctagatgagggtttttttttgcgggaagagctagatgagttgagataggcaagagggagaagttccaagcagctgatcaatcacacgcacacgggcgtgcgtgcgtatgcagcgccgcgtcgcatgtgatatttgtcacgcgagatgctgccgcgacccgtgaccaaggcaggttcagggctctgctagtttccactggagaaaggaggaatttgttgggagaatagctgaagctatcggtcactgggtcgcggcacatgcaaatgcatcttcgtgtttgtacatgtactggctaataagccactgtgttatgtacgcatgggatgtcactatgtggaggaggaggtgctacctcgcccagtgctcatcttcacttagcaactcctactctgctttggttttgattctgtgtgactcgtccatcgtatcatgctagaatcaatcttgcctctaccgactttgttaatgttcagggtcaaagggcctttgctttctgcacgtactccactttaatttacttatgggcatgtgtatgtcgactctagctatatacctggcagatggctgcgaccatacgtcgttgggactgggctacttattaggcttcctaaaaataacttgatttgacctaccttaatggtttagatatctagtagtgctggtccaagtatatacacacctacaggcttgcgagaccgtatatctatctgtctatatatgacagtgagtggctggagtggtttcagctgtcaaaatgaagatgattttcttaagaggggtgtggttgcaaatgtcacagcaacgggccaaacagtgcgtgcctccaatcatgaactccctgaatatactcgctccatctcgtaacatagcaatctaatacatgatgaaatatattctaatactataaatctgaacacattcgtagtaatagtatatgtctcgttctctactcctagctactactaagttgttatgggatggaggtagaatatatattatgaatttaatttaatttcattcattttcctacaacctggcttgctatatatgctaaattaaaactgactactagtagcactattactagatttgtgtcaatgcgtggcccacatgaatgatgcatatgcatcttgatcctatatataactcgttcaaattaatttcatcaaaattcatctgaacttaccggctagttttgtgttggggtaataatgtaaaaaaactttatctgaatactaaagatgcagagtgggtggtgaacttaccggcactccttgctgtgtggcatcctctgcttgcccttgacgtcatggccggcggcggcggcgtcgtcgacgtcgtagagcatgtctgggtcggacggcagcggcagcgacctcttgctccaggcggcggcggtgacggcggcgacctgggtgagggggctccccaccagcttcttgaacctgtacctcctggtcccggagaggaacacggcgaggccggcgaggatgccggcggcgcagatgccgtacccccaccggcgtccgacgttgtcctgcacgtacaccagcacggtgacggcgagcagcgcgccgaggctgacgaagaagtagaaccagttgaagaagcgcatcatcttcttcctctcgccgtcgacgtcggactcgtcgaactggtcggagccgaagccggagacgctggacttgagcccccccgtgcccagcgccgtcaggtagagccccaggtagagcaccccgagctgcgtcccgtccgccgccacgcactccgcgctcgcccccttcgggtcgccgcacgccggcggccgcagccccggcgccgccgtggagatcgtgagtatcatcacgccggtggcctggacggcctcgaagatggcgatggtgaggtagcggccgaggtaggtgtcggcgacgaagccgccgaggaggcagagcatgaaggaggtgccgatgaagttggtgaccgtgttggcggcggcggcattgccgaggtgcatcgtcccggtcatgtacggcaccaggttgacggcgatgcccagcgtcgtcatccgctcgaacagctccgccccgaggatcatcgccgcgcagccccacccgccggtggccgccctccccgccggcctccccttgtagtcccacgcgtccgtcagcgccttcccctccgccgccgtctccggcaacaccatcgccatatcaacaacaacaagctcgagctcgagacagagagagtaagacggcggcggcggtggtggtggtggtggccggcggcgatggatgctgtgatgaagccaccgtgtccgagtggtggccttatataggcggagaggggggtggtgcatcgggattcgtgcactggggggtaattataggtgtgattgattaattaagggagtaattaattaagagaaatagtatcaagtggtgttatgtgggggaatcagtatctcctccaattttctaattctttctcccatgactctggcactcgttaatttaatcgctctcgagcaattattgagtacgactcgttaattggtaggattagtggaggatcaaatgctggattaggatttactacttctccaggattttcttgactaattacaacacatgtgtgtgtttggtcagaaagttgagatgatggcagtttcccacaatggacggttacaacgttaatctcaactaccacagtttacacacttggaaaatttggagaatacttgtggacaaactggattttgcagtcaagagacgttctgaaactaggagcagatacaattttgatggaacacaagtgatcttgactactgtgtatcaagatatataattttttgactgaaactttttatgtgcagggaacagtgtgtggtatgatcaatgtgtgctgcccattctctgaggctgtgatgtttagtaattagtagtagcatcttgcaaaaaaggtgaagtgtttgtagggaaaagagatgcgtgtgaatctgaaagatactactaacccgcttggagaaaaatattcactacatcagattctgatttgtcgtgtaactaggagcctcacaattaggttctcatgcatttcagcttttagatcattaattttgttttgatcatcctcgtaagtacattagttcagttaaaaccactgcccgatcgatatatatttgaaactggaagggcccaaaatatgacaaaaattcagattcagatgaacagattaattagtcggtagcaacaacaatttgaacctgcatctttctacctcgcattgaacgtatagtggtactacgacgagtgtacggccggagtatattgagaagtattttcttgagatgaagacacgaacagaaattcagactcagacgatgcccttgtttagttccaaactttttctttaaatttacagttttttcatcacatcaaaactttcctacgcacacaaacttctaacttttccatcatatcatttcaatttcaaccaaacttctaattttagcgcgaattatacacacccatcaatgtcgatttctctgagggacagcatcagctaggcatgcagcaagctatagctctctcatacagcgacatgcgttgacgttagcagctttgttgtgaagctgtgtatgatcagctcaatcgactccaccgtggatgactctgaacctgcctctccttatctctttcctgctccctgcctgtgatgtgccgacctagctagtacagtagtactagctgtttggctcttgagctgttttacagctctctcctttagttgtcttactaatatagagttaagggggcatgattaaatttaagcaattgattaagaggtaagttttggctccatgtaaatatatagctaattaacgaggaaaccagctaagctaatcaaaatacctttctatatctaattaataacactttggattaggatcctccgacgtaaagttagaggaacatgatcgctgacatatggatcccaccatcgacggatccacatatcagtgaccatgtcatttggaaagttttgtcagaggatttttctcctaacacctcatatgtttcatgactcggaagttcaatgtgtgtatgaaccaaatctcatacggtgtgatatgaaagttctatgagacaaatttgataaaaataaacgtgtgctagaacacacccacatgtacacgtacgagtgtggtgcgtacatccaacttgtactcgaaaaaaaaagtctacatcattatttgcatttttcactcttaaattattgaatgaaagtcttcttttggaaatggacaaagaatgtcaacttcctagagtaaaaaagatggaattaattgtattataattcctatcctttcaaatctaatttatttcaaatctatcagtatgaaaattggtgtcaagtatagaagcaataggattgtctcttacccccttcaaggtaagattcatgacagtcgtccctcgtcagatcaaaataaatcaacagtccattagtcctcatacaatgtgatctacctaaaaaaatccttagtttgtggctaacttccccaaaactaagataaaggataattcgtaaaaacatttagtcatgaattgtccatttctacattttttttacaaacaaacatctgcatgtccatttctacaatttttactagttagttcagaagtaaactaaactgtcttggataagatctgtcaccctctttgattcaaaggagcaaagctccaagtcagctgcttgtgctgaattttcatgcatggctccacacagtctctctcagattctttgcagattccactcaatattgtctcacatgcatatagatgtaaacatgattttactctacaatttggaggggcctagctcagaatacagacaccagagcagatcatgttggaggactttatatgctggtcgatatgctcgatcaggtgcaggctatccagacaggcagcctgccagagtgtctgtggatcacctcactgattgagcttgcattttgccgctagctgcctatgacccatactgccttaattacacttacattgataaaaacgtatgagcacgtgtgagaatttcacagcaatgacgtgcagtgcatgtagtactaactctgtcccgtaataagtttatttttaagcttccttcttcatttgttcccaaaaaaattcatttctaaagtaatcattacatcaaagtttgtgaaattgtagaatgattatactgggagtatataaagtgaacaatacttacattgggattcgataaaatagtggtattataattttttttgtatttatatgtgtatgataagtaaaaaataaacttattttaagacggaggtagtatatcagtggcgaagccaccacccatcgaccgatcaggctcgtcaatagaattttgatgttaatatatagtgattgaaaataactttttcataccaaattaatacttaacatagttttatctgggccctaaaaattttctgaatttgccactgatttaaacgagtggtagccaaaattagttgctagctgaaactatataagctgctaatcaactactctagctactgatcacatgcttgaatagaaggtagatccaggaacatttcacaggtccccacaataataatatcatgtaactgctacctataggacgatacttctgcctactgaaccgtgaacttttgagcttaatcgatgatgaggagttttaatttacagaaggaaaattcataggtccccacaataatatcatgtttgttggaaaaattcacctttttctcggtagtcatcaattccaactatcagtttcattggtatacatggcgttgacgacaaaacaaggagttgacactgtacattttgacgacagatcagcatcacttgaaaaatgcacttaaattcagatgtaagtcgtcccaacataaaaatattttctaccactccttcccattgctgcgtgcctgaccgattctgccgatgattcttcaacaggacaaaattttaagttctgaaaacgtcacacattcacattattactgaatatttttgtgcttgtatatacaaatatatacaataatacgaatacatattcgagtacgtaattctcaacacctcttcgagatccgtcagggtgctcgcagattcgagtttctctcccagggtaaatgcatcttcgagttctctagggctgtttgcgacttcgagtttaaatttttctgtcggaatttatgttgacattttcgagctccgtcagcttgattgaccactatttaattcgtttacatgttcgagtttctctctcagggtgctcgcattgtcgagttccagccccccggattgtatcaaatgtttattatatattaagcaattggcaaattgtaaggtagaactgacaatacatctggccaatgtgatgcaaattgcaaaattttaaaaattaatgtaatgcaaattggtgttgtctcatatagcctcatgcaaattggagtagtttgctgactgccgagagttcaataattgcgtgcgtaaaggtgtccattctctcaatttactccaacatccccatgtatataactatatggaaggtggattttcattcctcggggatattgatttccttgttttatgcatgtcacacaaaaagacataaaaaaaatgaaaaaaatgataacatagatcaattaatgtgtgatatattactttacaaacatgtaaattcaaatttaacttatatagataaaaataaaaacaacaaatttgactataaatagtatgtactatttgcactaaaatttgttattttcatttctaattgtgtaggttgaatttgaatttgcatatttgaggaataacgtgtctcatattgatctatcatttttttatgaatatttaaatgacatgcaaaaatgaggaaaacccccttaagagatgaaaagagtttcccagttcttgtgtcagtgttcaatccaagtaatgctttatttttcttcccgaaaaagaaactaatataagaaccacgtcatttttcttcagccataaagaagtattactgtattagtaatagtgtaaaacctatactaagacaaaccgatggaatcagtcactgtctaatccttgtatgatcataccacagcaattgtcagcagcctgaatttttctaacagcagaaaccaatgcatgcatattgtcctgcaatacagacaacacaagaaaccaagtgccaatagaatccatggccagcagttgagcacttggaagttggaataacgagggtatactagaatatacgagtatcataagctacatgacatgtcatcaatggagatggctactttacttgtggtcagagaatatacagtccacacattaaccctagctagttaagctagatgatgacctagctaactgtctttttgaatcagcaatttggacggcttatatattcgccctctccttgacttaatttgctgcatcataagatgtgatgcgtatgtctgattatctgtctcgttcaagttggggtttaatttaattacttgcccggctttctgcaatcgaaaaggctatctaatgcaaccgttcatcgacaaaaccatttctggtaattcatgtccgtatgcggcagctggattatatgagcaattaatcaacgcaaaccctagataatagattctacgtatataaaatcatacagaaactgaactgattattcctattaaaatccctgcgttaatttaaatagacctgattaattagctattgtagtacatatatgcacatggtccagtgaaaattatccacgtcttgttgtgttctatacttgattctcttgtctatatatgtttggtttgcgaaaacgaaaattcagacatttcaaaaacagttccagagaaagagacttgtatggacacgaacatgcagagaggtgttatctgcatatatatatatatatatatatatatatatatatatatatatatatatatatatgcatgcagctgggaataatccatcacaccgtgcaatcattcacacacactgtttacactacttgaaaatctattttcgcagacggacggcaaacttcaccctggtttgtatttttgtaggcggctatttgactctaagggctatatccgtctgcgaaaataaatacccaaagtaggtgaaaatgctttttctattagtgttatctgcctgcctggatattcaggattccccgtcctgttgatgagtatgcatatgcgtgtttggttgtacatgtacttgcatttgcatatgaactcaaagaaagaaataacagtgaagaagtttgtgacagcgatttgccgtgaagctagccccgtcgactgaatatcccctacgaggtgtagagttaagctttcatcccttgcacgaaattggtcaagaaagttttggaactggagataagttatcatgcaactaggctaataattgagctagaaaaatgtggcagaacttatttggccagctagtcttcatgttatgtggtctaaacaactgtttgctttataatcgtgagggcttggccaacctcatactatttacctaactagtcctaattatcaacagttacttgctagtagccatagttatcaattagccccaaaaggcccaaccacaaatccagttttgagttaaccgttaatttcgacgctagctattcccgtaccaaataccaaccaacaataggtttggaaatggaactagaatgatatgccaaaataaatattgtttaagctacctaatcgatgatattaattttaaggattatattgagatatagccttgtagattcgagattcttaaagacagcttgtgagaatttgtaaaaggtggattttctaggttcgggcttctaattcattattttcttaatcctatagctacaaattttcaaaatctaagtaaaaatctagattatttatgagagtattctaaaatagctacaactgttaaaagctccccaaacctaacgatagaaacatataaatttactaggatattgttcgcgtgttgaaacggaattttaatttataaaaattagcattaacctattattacataaatttattactgatatatggaccctctggtcttacgttatccttttttgcttctcacaaggagagttgatggtgggggtggttgacatgtgaactctctcccattccaaaaagttagggaggtggtggtagggacggtggcggattcaccactcaccaccactactattaattttttttaaaaaaaatgagtatagattaataagaggacccataaatcttttgcatatttgtgaaaagaaacaaagaagcatagattaggagacggatcacatatatacacacttcaggataaatcgtgcaatctcacgacaaatgtttcaagcaacttttgctctttttctgaaaagggtgaaacctacaaatatccatgaattccaaccttagcatctagtgcttggatatttgtatccctgatatttcttaatcgctttttcttcagagcaaaccagttactgatggtttcaagcagtttcggataggagcctaggagggtgacacctcgccatcatcaatcagagaagaaagctagctagttgctcatcctaaagtggactgcgatatatattatgctgcagcaatgtggctagctagctaccttcatcatccatctatccaattaatttcaacacagagagcactttttatctattaggtgtcaggacaatgaatcatgcacaacatattcaactccattcctattcgatgagttccgatgaaacagcatgatagattctcctccaaatgaggacagcgcaaaaataggacagctggaccaatccattcagtcagtggtctccaatgtccacgcagatgtgctaaaaatcagggaaattgcagtccatttctctgaacttttgaagtgatgatattataatttcacaactgaagctggcagtaacttaaccctacctgcagtgtgttggcagtttgcatgcaagatcaacctatctcctcacaaatatcagtacagcaatctccatgtagatgcatgacagaatgagaatctgagttcatgagctggggaagattaatcattcagaggctaatctccatttgaaccccacttagggagcaggaatccggcaaactgtactactgcttctgcatgcgtctcagcagttgcttgctaattaattatccacaaccaaattgtcccagatttccagctgctggtatttctgaaacaggttttagatctctgtgttcgtcatttcttgattcaggaaaaaaaaagatcaagggcctccaaaaatgattcagattaattatgaccaaagatgaattacgtcaatgttttccagtttactgcaccccaagcagattcagagagccaaacgcaagaagaaatatatactctgggttacgtggtcgagtaccagatattcaatattcatcatggctcttccaaactcgatatcgcaaaatcgccattagaatacgattaacttccttttctcccactttgttttgtaatcgagatcgaatgcgagagagattagaaatatgattggagcctacctgagccagaaactggtactactagtctctgctgccacaatcaaaattttcaattcattaaatttattatcaccacctaattcctagcttgtgtgtgtatataattctagttcattattcaggtctcactctaacaatcattttcataattccgaccagacttaattagcatatatatgcagaggcttaccatgtcatggtacacgaaccagatagataattacgtgtgttcatgcccatctgatctgaccacatgatgagttgtcttgcttataaatttgccaaatctgaaatataaataaattggactgcaattcagcaaattaaagaggattaaactcaacaggtagaagttgttcacgtccgggcacatagtatgtatacttgtttagtagacaaatctctaggtcaaagcacaattattgagcaaaaaaatagttgagagaagttgctcgcaatctctatccgcggcaagattcctcccctctcttttgggtatctccaagagccagttagacccgggcagaatatttatttatttgtcgatgtgtatattcctcacatgataagtgatcaggtggtgtgtttgcttcagtactctctcttgacgccatatttgcatattgtttagggtgcataatgcaggtgagagattagagattggactgtcaataatcagggtgattaagctgcatatcattgatgggagccataggggattcattgctgtcttctctttctttcatcttatcttacagattaatgagtttttagttgttgtttttacagaatttacagggtgtcttattcggaaaaaaaaagaagagagagaacttacagggttttttagcagcaaaaatataatagatggaaatggattctaattcctcgagggatgtaccctcatatgcaatttttctctcgaatgaaatgtaaactgttgtgaaaaaatctatttttattatgtacaaaggacatacatcacttaaaaaaccaagttcaaaatcgacctacacataaaaaaataaaaagaaaaatttagtgtccatatgcaatcaagaacgatttagtattcctaaggcggagccagaatctaaatataaaatatattgaccaataaaatgaatcacaacaaaataaataatagtttcgtgtttttgacttttttgaaatgtatatgtaaaagtcaaaaggcatcatgtattgaaaaaacataggaagcatttttggatttaggatccatttgaatcgaagaatttatggtggagttcataggattgaaatcctataagattttttttcttatttgactatttgattcaaaggattggagttttccaaatcctatacaatttctatggaatagctcattgtatttaggttttggaggagatttagcaaaaggttcgatctcttggaaaaaaaattctataactatatctttctcatccgattcatacgtttttcatgcggtctaatcaaacgattattcgtgcgtattctctgctttacatttagtcagaatcgtgtgtttttttatttctccaacccgtccatcgtgcgcccctccaacgtcgccggcgccggcggccgatcctgcatgtctcctccgcccgtgccgtgcccgcgcgcgtgcgccttgctcggcctcgctatccatctgggcgcgcgcgtctcctgccacttcacgcaacgggtggatggttttggagttttggccggcgcgaccaccaccaccaccactcctcgtcgcgcgcctcgcgccgcgcggcggcggcgacgacgagcctaaacaacaataaaaaaaaatcgcgtgtggcctcgcagctgcacacctgtagctctagtggagtaggccacgagagggagagagagagagaccgtgcgcgtgaggcaggcatccaagtcaacgtggtagagcgtacgaggcgtcgcgtcccggatgcgcggacgacgaccacctccctcccggtcggctttctgcaggggccaagcgccacaatctccgccgacttacaataaaatgcttttcttcttcttcttcttcttctccgatccatcgctgtccatctgtctgcaagaaacgcgaattcgtgaacaaactcctctctctgcagatcgatctagctaggaagctgcattatttgcaattaattaattacgctgttattgttgattggtttgatatgattccatggagggaggccgctgacgtcgtggatgatgatgatgcctgatcgagatggatggtccaggatggatcagtgatcagtagtgactagtgacatgcattttaattttttggggggcttaaacttggggacaggttgagctcactcgatcgatcgagacctgcgtgcttatatatattcagatacagatgcagcttttgacaaatatatacttcagtaaaattgatatgcagcgtttgtaaacgttgtgcgaaacacggcggtagaaatttggacacctttttgcaccaacttcttcaactgctcctcatttttttgcctgctatgatcgctttatatgcatgaaggattttaatttttttttagttctaaacgtcaactagagaaaatagagtatgctgctggacccctggacgcatgcatctcgtcgactatatttatagaagagaaaaaatatatatatgggactataataagaatcatcagactttatagtcagaaacaaaacgaatatgtatgtaatgtacttacgtatgtacaacacattggcacgcctagttcaacagctgcgtaggttaattgtatacgagttctagctgatcccgtcttaagttttcaaaaatatataattcgtccccgtttacttggatagtcggaggtatcttttcagcaggcgttgctagctgattggattgggagaaaccgacgagttttttttccttctgattgataagtgttatgacttcgcattgagctaattattcaagcatactattattttctccagctgaccaaacttctccatgatagaaaaatcaatcgatggtgttcatgctcaccgaaactaaggatgatctcttatgagattaggatatacagaagcattgatctcgtgactgaagaaaatttcagacaggcatcttgttcgcctcaacacgcttaatcttataaacccaacaagtttgtgtgtacttctcggcagcaaagttgggcccgatcacggaagcccatcaaaagcccatgctatgaagttaatagtgattccagatagacagcccatttacgctaggacacacgagtcgcattttattaaggagctatatggctattttataactgaaaaatactccttccatctcatactattatggaattttgggtgtgacacacgattcgaattttattatggaattttaggtgggtgtgacatattctaatattacgaatcaggacaggaatggatgaagtatcggttagcagtttgggaaacatacgcgtaaaaaaatgagaaagtgaaagttgggagagtggataaacaaacacagccgtagtggcatttaggaaatgttgggaccaagaaaaagattctttggtttgatcctaaattttatactcaaggctccttaagaacccaaactccaaaggaagggctcaaggagagaactcgatgagtctatctattctcttcttcttcttcctcctcccagctgtcccggtagctgtcatccagagaccagatgcaccggagagccttctcgtatatctcccgcctccgcgcctccatgggcggctcgccgacctgcgccgccacccagtccatgtactccacctgccgttcgtcgatcgtcgcggccaccaatggccggaacatggtgagctcagaggccgagacacaaaatcatatgcatgcgtaacttcgtacgtatacgtacccagtcaggcatgagggcgtgcgtgtgccgcttgggcttcccggcggcgtccatccgccggtagtcctcctccacggcggccgccatggcctcctcgcccggaagctcggcccgccccgacagcgcccgggcgacccacctcgactccagctcgaacgactggaacatgatggtctgcacagtacatatacatctcttgcctgaattgtcatggtgtttgtttgtctgaactctgaacaatcgacgaggacgtgtcgttgttataccttgactggcaggccgacgaaggagaggttcggcgcgtgcttcggggggaagacgtgcttgtacagaggcccgacgcggttgccgtcgacggtgaccccctccacgtccaggaacgggaaatggtaccgatacctgccaatgcaatcttcagtaaattcatcgaaatgcaaaccaaacgaatgtatgcagctcgaccaagtgtgatcctaccctgtgcagtaaagaaaggtatctgctgcgattgatgcagatccttcgctgaaacgcacttggccatcatcttggatgcaatccacctgattattgtatatatgatccacaattagcacattgattcagtacatgatgcctttgagcaggatttcgggatgtggattttcatccctcgagggacatcccctcgttatttgcatgttatctagatagttatcaaaaaatttgaaaaaaaattgacaacatagattaatacgaaatatatcactccacaaacatgtaagaccaaattcaacttttatactccctccgtttcaaaatgtttgacaccgttgactttttaacacatgtttgaccgttcgtcttattcaaaaaaattgtgaaatatgtaaaactatatgtgtacatgaaagtatatttaacaatgaatcaaataatatgaaaagaataaataattacttaaattttttgaataagacgaatgatcaaacacgtactaaaaagtcagcggtgttaaacattttgaaacggagggagtaagttgcaacaaaaataacaaattaaactgaaaatagttatcgcatgttcacaactatatttgttatttttgttataatttgtagaagttaaatttaaacttgcatgtttgtggagtgatatatttcatattaatctaggttgccaatttttttttatgtttttaattgactatttaggtgacatgcacgaaacgaggggatatcccctctaaggatgatttcactttcccatgatttcggggaacagtgattgagcaggagttaattaagaaagctttgaacctctgaatgcaaccaggtattctggaaggtatcaaccttcccaagccgatcttctgtgtacctagatgcaatgtgcacttccttggcaacatttgagatctctctagctatgtcaactccacttgctcctaatcctaccacaacaacaatctgcataaaaaaagtagacgatttttatctgaaactgtacggcagcagcaagaacacgtactgatactgtaaccgagacagcatcttgaacctgatcttgaaatggttcaggagtccgatagttgtggctgtgcatctgcttcccttgccaattgccaattcctgcaactcagggagtcagattttctaatctgaaatcgcgaatgcaatagatttttcaagtttagatcaaatcaaacttgaaaaaaatttcaatgctgaagattttcgctgctcctaactgaaattctggatgacactgggacaacacctcacctcggagcttgggcactagaggcacagtgcagtgcccgttgcacaccacgacggcgtcgaacaccttcttcttcttcttcttccacgccgccctcgccgggccatgccacggtccacctctccccgtggccggcgaggggccccacgcggaccacctcggcgcggagcctgacgcggccggcgacgccggactccacggcgaaggcatcgaggaaggcgagcacctcccggtggcccgggaacgtgcgtgggtcgccggcgaacaccctccccgccagcgcgaacccggagaagcccatgagctcgcgcggcaggttggtgcgcatcgacgcgtataggctgccgtggacggcggcggcgccgggggcggccgtgtcaaggcagggcgggtcagggtcggagcccgggtcgtaggcccaggtgcccccgacgcgcgccgaccgctcgaacaccgtcacggcgtggccctcgcggagcagctcgcgcgctgccaccaggcccgccgcgccggcgccgaccacggccaccgtccgcggcatcggggcttcgccgccggtgccgtggacggtgggggggagtgggtgggaccgtgtggtcagcggaagaagagacgttatgtcagattttttttttcaatgctgctgcttgcttccaaaaaaaactcacaggtcatacctctctggaaaaaactcaagtgtgttttggagtatttgtttttttaagtacaagggaaatctttacggtaagtccaaaaaagtagaattaagtgtgaataaaaacagtcgatgatgatcctcacaaaaattatatagctactgcggagccaaacaaacgaactaatagtgctccatttttgtttcactggaagtctggaactatggagagtctagtgaaagcccaatgatacgatcacggcatagggtgtcgtttactcctttcgtcccaaaatataaaagatcttatgtgaatgcgacacatcgtaggctatttgtccagattaatagctagtattatgatatatcacattcacctaaaatctcttatattttaggaaccaaaagctctaacgggaaggaaatctattataaggaagcttagaatcctggtaatattacgggaaggaaatcttgcagaggagatttattggcaagagaggagtggggaaaaattgatgctaacacagcgtattatcatggtgtggccaacggtaagaagagaaagagcataataagaagtttggaagatgaaggtagagtgattgatgaccagatggagttgaaagatcatataaaacaatattacaagtctctgtttggttctgagtcacctccaaaaatcttcccaagtcaggacatgtggactaagaggggcagattggatcaggatgataatgaatatttaactagacctttcaccatggaagaaatagagaaagcctttaagggcatgaagactaatacagcaccagggcccgatggccttccagtctgtttcttcaaggaattttagccacagttaaaagatcagtttaaagaaatgcttgattctttatttgaggagagtttggagttgtggagattaaactatggggtaataactctaatccccaagattaaagatgccaacaatatcaaagcatttagacccatttgtttgctcaatgtttgtttcaaacttttaacaaagatcttgaccctaaggacatttgtggcatccaaagtgattggggagaatcaaacaacctttatacctggtagatttattttagatggtgtggttattctacatgaggtgttgcatgagttaaaaaaatctcaccaatccggcattattttaaagctagattttgaaaaagcttatgataaagtacactgggacttcttgtttgatgtcttacaaaggaagtgtttctgtgacaaatggattggctggatgaaatcagtaacagaaaatgggaaagtagctgttaacatcaatggggagaatggggagtttttcaggacctataagggagtcagacaaggagatactttatctccactgttgttcaacttggtggcagatgccctttccgagatgttaaatagggccaaagaaaccggtcacttacaagggcttgtgcctcatttagtcacaggaggactaactcatctgcaatatgcagatgacacaatcctcttcatgtctacctcagatgagaatatagtaactgtgaaatttctgctttactgctttgaagagatgtcatgcctcaaaattaattaccagaaaagtgaagccattgttataggagctactgaggaggaggcccatagagtagctgatttattcaactgtagaaaaggatagctccccatttcatacctgggtgtgcctattagtaaggggagattgacagctaaagatttggcagtaccagtgactaagatcgagaaaaaactggcaacatggagatgtggttctttgtcttacggtggtaaatctatattaataaattcttgcctgagcagcattcctatgtacatgatggggttatacctgttgccagctcaaacacatcataagatggatgcaattagagctagatttttctgggaaggactagagggtaagaaaaaatatcacatgcttagatgggaggctttatgcagacctagagaggatgggggtcttggctttgtcaacacaaaaatgatgaatgaggctctgctatgcaaatggatttacaagttggagtctggaaataatagtccttgttgtgaactcttgagaaggaagtacttggcaaatggagggggcttcttccaatctaaggctgaagggagctcacaattttggagaggtttgcatgaagttaagaagtggatggatctaggaagcagctatgtggtgggatgtgggggaagcagtcaggttctgggacgatgtttggttaggagatgttccactaagaacacagtttccatacatacacagcatctgctctgagcctaacaatattgttaaaagaatgtacttagacggggagtggaaaattgactcgaggagggctttggaccaaaatgagttggaggagtgggtggagctgcaggagaaactggctcctattaagctacacttaggaaaagatgttatgatttggaaactaaatcagtcgggacagtttaccactaagtccttatatagggagatgatttttggggggattaaagacataaaactgcaggatctttggaagtctttcatccatttaaaaattaaaatttttatgtggctaatgctaaaggggagaatacaggcagccaaacaacttaagaagatgaattggtcagggagcccactgtgcaaactgtgtggagtggaggaagatgctgatcacataatttttagatgccctccagctcaatttctttggtgctgctacagagacgcctttcactgggatttgatccctacttctagaaatgaccttcttgatttaatctaaaaccaaaggggagttagaaatagatgtctttggtacctgtttgctgctggggcttgggcaatttggcttgtgcggaatgattgggtgtttaatgataagctgctgaataatgttgcctcactttctcaaaaagctctgtcgtttttgaaacagtagggacccttattgtcacaccccaatctgataccgccgtacaacggcacctaacaggagcgtgtcgtagggaaaacggcgcgaaccgcttcctacgaaaccgcgatctcggtaccagtcccaggacatagtgctggtacccacggtgacaaatatgaatcatagcaatctttaaaataaatagaggacttatttaccttaacttaggttgcagctcagacagcccgagaatacaaccgacgacacggacgaggcgaacaccaacaacagcagcagcggaaccaacggtctaatacccaacaccacaggcgacggctgggaaccaggacgaaaccctaatcttcacttcactttatcttctcttcagggcggaggaactatatatatatatttatatagagcaagggtgagtactttcgtactcagcaagtcacgggaacttaggtgtttaatgcaagcttggaagagaggcaaggttgttttgcaaatcttttatttgaagacattttgaaaacactaagtgatttatttctttctaagttagggccgaaaagagacttgcgtctcgattcgactttaagagatgtttttcaacagctcatttggcaatgtaccgacctcccgggtcagatcattacttttcggctcccagagccattccacttgattaatcggctcccagagcctttttcattttctcggactcccagagtccagctacccagcagcacaacaatccgcttccactcgggaagcctagtctatgatgcccgcagacatcccgaatcacacagattcgtttctgaccactcaggtcgtccatctgccacataggctgattctggttacgattcccacaccacaacaacttttcacaaagcacaggcaaacaaatctacgcaacgggaaccacctcacatccgcccatgaccgtgggcacggctgttcgaacagttagttaacctctgcagaggggtacactttacccacaagacacgaacttactccagacactggccagccagtggttcgcgacaaagcctttcccaagccgacccagggttacctcacgccacatagaaggatcaaatcctcacgtaagtataggccattttaggcattcacaaatcaactccaaccaccttgatcggtaagtgagcaagcttctcgtccttgccttaccaggaacccggtttgtccgaccccgccccggcgttcccaactattggcatgcgaggtttccctgaaccgactagttacttagccagggtgtcccattccaccttgtggttgcactttgattatgttcgatgagtttcccacaggaatcggtccttatatgcgaatacgggacagtgccacataggcacaaccccccgcatcgcgagttttcacaattcattttattttcaaacacaccgacaccacatgtcgggttttgaaggcttcacaaacccatttcccaagttttcgacaaacaacggtgtatgtgggatatttggtatacgcgctcagagagcacgaatactgaggtaccacaagggtggagcgacaaggaatcagggtagtacgacctacggaaattagtgcgactactgggtaggtccgtcggtttggcacgcaaaccgaggccaagcaagttaagtgtgtgattctaataatgcaagttgcaaacaaaataataatgacttttcaattataggagcaattgatcaaagggtgacttgccttgctcaaggtcttcacgaagcttcacgaatcttcgagaaaacccgcgatcgacgaaaatccaataaccgcaactatacgcaaacaatcgaaaacctaaacaaaagaccaaaagaaagatcctgtttagacctattagtagtgccattaaataggatctcaattttacggaattactggaagtggaacggagtcaatcggagttacggattgggtgatatgaattttggaagtttaattggagtttctggagtaggagaaatggtttatggaatttatagaaataatattctcaagaatattattgacagtcactgtcatgcgggaccaaaggaaacggtttatggaattttggaataaggaattgatttatgggacaaaggaaaaaggatttattaaatccctggaaaaagaaaaggatggagggatgttaattggacttgggccgagcgaaggggcgcggcccgaagagatgcgcgggcgcggccgaggcgagcgggccggcgcgcggaagggaggcggcccaaggccgaacgaggcgcggcccacgcgacgcaagccggtggacgcggtccaccgtgccgggcgcaaggtgggacccacaaggcggcgacacggctcacgcgagcggggtgcacgcaaggcggcgcgttggatcggtggaccgggagacctttgaccggtctccgcggggccgggcggctgaggtggcatccacgtggatgccacgtcggatggggaagggagaggaggccgggcaggctgatccgatggccggcgacgagcgacgtgaaccggcgaacggcggcgaggtggattgggggggttagcaccggaagagagaggaggccaaggggaatcgattcaacggagcggattagccgggggaaaaacgacggcggctggcggcggcgaccaatctcgccggcacgccgacgtggccgcgcgcgagaagagcgaagggcgcgcgggctcgggcttagccgaaccggtacgcgaccgcgatgcgcacgcggggacgcgggacccgatggtcaccggcggcgcacgcacggcagcgttaggcggcggcggaagcggcgacacggcgcggagacaaaggagaaggccgacggccttggggcagccagggggaggtcaaggggatccccgggagcgtggcggcgagaggaatcgacgcgagaggagctgacgacggcggatttcgacggcgatcgtcgacggcgagcaaagagggaaaacttcactggggcaacgggggttcgattcgttggagctggagcatctacgcgaggtcgcgagctcattccaccggtcgagagggcacgggcgacgccgagagaggccggcgacggcgagcgacgcccgggacagagcaagggcgcgcggcgagatgtgacgcacggcggcgggcgcggcgcggcgtgcgacaggggaaaagggggttcagtggggagctcaccgacgagagaaacggagtcggcggcgcggatggagtcgcggcgaggcggacgcgacggcggggcggcgcggcaccgagagggcgcggccggggaagaagagatggagaggcgcgaggatgggggcggcgcggagctcctcgtcgactcctcatgctcgcaagctccccgacacgcacgacggcagaggagggcgagaacgacgacgaacggcgaggcggcagtggtgtgatggaggagaggaagcgagaggtatgggagggggtgtgggttttataggtggcgatgtcggtttgagagaaccgaccttggggcggtcaaggagatgaggcgggtggcgcgagcggtcaagcggcgcagaggtggtgacgccggcggtggtcgggaaagggaaaaagaaggggaaaaaggggcttggtcccttgccataatgaggagagggagagtgaggaggaggaggagagggagagcagctgcttctcccactcttggacgggtgcggcgtggaacggcgggggccatggatgacgtcggcgatgacggcggcggtcggtttgtcatggagcgggggcaaggcggcagcacgtggcgtcggcgacgcaagggctgatggcggcggcgttcggccggtcggccactgagcgagcgagcgcgcgcgacgcgggggtgcggccggatttcgaacggcggcggcgggaaatcgacgccggtgggggagcttctacgggagagggagagaaacggagagagagagagggagcgaggatgagaagagagtgggcgatctctctctcgagcgcggcgcacgcgcaacgcacgtgtggagggaggggaggggaggaacggctgagagaggagatgggccgaggggagggggatcaggcccatccaaaattagaaggaggcaaaatagacttatgcagagagatgatttggaagggatttggatttggaatgaaatttcgaatatgattacttggactcggggaaacagggaggagtcaaggaatggattcaaggtggactcggtatttttggaatcgggacaagtgtttggcgaggattcaaaggaggcgattgaatttcggaatttgatttcggagacttaaattggaagaggaatttcgatgaggatgattttgatggcgacgagagggatcaaggacggatttaaactgagatccacggcacgacttagactcgcacacaaagaacgaaaatttttgcaattaggatttttccgaattagtttttaacgcctcacgaaaagcggagcgttacatatgttgagcgatatggctttgtagaaatgatgtggttttgaagaatccaaactcaactatttttgcaagttatttttcaggggaacacattggacaaggcaatggttgttgttggtcaaggatgaagagagcgacactctgaagaatggttatcgccagatagagaataatgtcatggagtttttctctaaaactggatggaacttgagaagttgattggggatgtgatgtggtatcattgtgggtcttaagtactttgtaaggatgtttggagctacttgtttttcagaattgtgtgagcataattaagtgtttatgttggttagttgtgtggaaatcctttttgtgaggtcgagtctatgtacttttttgtattttagctgtgtatatatccccattggatatatagagggcgggtttttaatccattataagacattttatctaggcttgtgagatagacacttcctctgttttatattataaatcgttttgacttttttttacgtttaaacaaacttataaaaaggtataataatatttccaacacaaaacaaacatattattaaaatatatttaatgcataaaattttatggaatatgcagtactttctccatattaaaatttaagcacttttaactactaatgcaggtaatagagggagtatgtcggcatagcaaatgacaacttagacgagacacgatgagtattaaagataaggggacgattggaccagccttctgaagagctagtagcatatacgtacggtaccatacatgcaccgtccatcgatgtcgatagagagttgaacacaaacaatgtactcatacaaatgatgcagctatcacatgcatgatgcaataataatataatgctaaagcttttgtagcaccggaaaactatttatccatcatcccgtgaacccatcatggtcgtattctaagtctaatctagctagctacactctacacagggatatactctcttcttccctaaatgtttgacaccgttgacttttttaaacatgtttaaccgttcgttttatttaaaaacttttgtgatatgtgtaaaactatatgtatacataaaagtatatttaacaataaatcaaatgatagaaaaagaattaataattacttaaatttttttgaataatacgaacggtcaaacatttttaaaaaagtcaacggcgtcaaacattttgagatggaggtagtatatgtgtactactagctatatgattatatgcacacaactgtacattaacctaacctgatgaccaggagatcgagattaatcatctagctagacgtacaaaccgaccgtggattaaactgctcattcgcgcctagggaatcgattccgctaattaattacggtgttcaaacagtaatctacactcattgtatacagatatcgcccatgtaaaaccaagtaatcctccatgttacaccgctgtcacacatcgtctttcctccatcacatcaggccaagcaggtcaagcaaaaaatcatggagacagccaaacaaaccacgggctgatggaaaagaaaggcagggtcggccagccatatttctgcatcggtctctgaaatctgaatactacatccatgtgtgttatccagtcactgagtcacggcttcttgtcgcatttggcccatctcccgaagaacatatatgttaatgtaccatttctacgtactcctactccattccgttggtggcgagtgagcgatctctatataaagccgagatcccccaactcggagagctcagctcatcacacttgcagttgcagtggtggtagactggtagtgcattctcagcttaatttgcttgagctagtagctgctcgtgagctgtgcaccaatggcgtcgtccagggcgtcggcttcctgtgccctcttcctcgccctcaacctcctcctcttcgccatcaccaccgcctgcccgtcctgcggcagcggcggcggcggcggccatggccattacggtggcggcggcagcagcggcggaggcggcggctacggaggaggcagcggcggctacggaggaggcggcagcagcggcggcggatacggcggcggcggggggtcgtcgacgagcgggtggtacgggaagtgcccgacggacgcgctgaagctgggggtgtgcgcgaacgtgctggacctgataaaggcgaaggcgggggtgccggcgacggagccgtgctgcccgctgctgaacgggctggtggacctggaggcggcggtgtgcctgtgcacggccatcaaggccaacgtgctgggcatcaacctcaacctccccatccacctcagcctcatcctcaacttctgcggcaagggcgtccccaccggcttcatgtgctcttaatctctcttttcatccacatttcgcattaattaattaccatgcattttacctattacaatcttctaatttgggagtcatttagttaataagctagtgtcgtcgttgttgcgtgccaaggttttaggttagttgtgtgttgattgctagctaatgtcctactagcattgagttgtaggtaccagtttgattgctttcctttgatgcgtatttgttcgctcgctgggtaattgtcaccagtttgtgtgtgttgaaatgtcttgttttagtttcactgtttcggattcaaatttaagatggaacctgaacaatccaggtttttgaaaattcccttgtctacatgaatggttcaattcactactacttcagttaaaaatgtcccgatggatgaacaatcgcacagacaaacatattctcttgcacaaacatcctgcaagagaataaaactatagcctgtgtttgtagatacgccaacatccgcctcgggcatcgtgctctgcacagtcagactcgtgcatgaatccaggccatggagtctctgcagcagcagcaagatttttctgctgggtgcagtgcaagttgatgttcacgggcgaggtttactggcgcttgggcctcaccaaggccgaggtgatcatgtgggcttgtagggagcaaacggaaagcccactctatctcttgggctgtggcacagatggcccattgggttgtccatgtattctaaacaggcccatttttaactactctatatatactgcaagtgcaatagtagtggctgacggtctagactctcgtacgttattatctgctatgatgtactgataatacaattcccgttggttaattagtagctatcagctcatttcattagaaagaaaatggatagagtttcttacataaacaacagatatattttacagggcaaatatcattgttgactcttgggtaactcaaaggacaagcccttgaaggaataattgatatacagtttgtgaacactgaatatgcatattgcatacacctcaataactcaatctctatccacaaactgtgatattcaattctacacaccaacatgaacaccaacgcccttaaatatacgtaagatacatatatacactgttaatcaaaccgaattacatccatccatcaacttaacattcatgaacatgaaaagaccaacaaattagtgcccttccaacaaactgaacatttacctgggaaagtaatgcgaccggccaaccaggggaccatgtatctttaatttcttggtcatcgtctaattttttgttttaatttacttgtttcaggcacgaacatatacataaaaacatcagtaatgtcggctcagatcaccggtcagtccgtgacgctggtactagcattagtactctttgcatcttaatttatataagtgggcgagtgattgacactctgctccatctccgtgtactttgatgatcagaaacaccaaccagaagttgcaatcgccgggacagatgctcccatgtcaaccttctgctttgcctgaatctgaatcaagtttgcccggaggctcacttcctgcacctgcagtccaaacacaatgtaagccatgaaacagaattatttgtcatcaactaatccaggagcttgagctttcgttgcaacaaaagaacaactagactagacaaaaacaaatagaattagggagtaggcagccaggcagcactagtgctggagaaatggagtatatgacaatcaatccaaatcttagtagtacagaagatactgatctcactagaccagattagactagactaaatctggttctggtgagagtgaggcatcagctaaaaacgaccatttaccaacctgcaagctagtgacaatccttgccagcttcatggcttcctgcaggccctccacctcctgctttatcgtcgtcgacagttcttccagcgtgctgctcgtcaccccagcctgaataataatgcaccaccaaaaaaaaaaatcaatcactcatgcaaggttcatataattgcatctaaactaacctttcctagtaacctcgcctcaaaatcgcctgtttgttatctttatcagccaaaaccaaattttaaattttaaaagttagtttaagtcgttgatttttctaaggttttttcattgtagtttatttttaatattggttttaaaccgttaagaacgcagatgtaaaatttttccattagattatttttagttgctcagtttatttttcgacagtttagtggttgatttatcaaaaagctgaattaattaagcgtgtaccgtggcgaagaacatgtcggcgttggcttcgatgtcgttcaccgtgcccacgcacgcgaacatggcttcgtgcaagctctccatgtcgccctgcaaatgtgagcaatttgttgatggttggttggttgatcaaagagtgtaaatatttctgtcagagacgacgaggggagtagtggagtatacttgggcgccgtcggctaaggggagcgcggtgcaggcggcggcgaggacggcgccgaggtcgtcgacggcgtcggcgtgcggcttggcgagggagtcccacgacgcgagcagcgagagctgcggccggagcagcctcgccagcttcagcttctgccgccgccgctgcgccacgatccgcttcgccgcctggatgttccggagctccgccacccgcagccacgtgtagaacagcttgttctgcatccatccatccatggcgcgccgtcagaacatgtacgggaagcgagctagcgtgcgtccatggcgatcggtgtcacggcctcacctcggcggcggcggtggcgcgggccatggccttctccatgcgggcgttggcgaagcgccactggagcaagcgcgcggcgagcatgcgcgcgcggtgcgccgccttcttcttttcgggctcctccttcctccgcgtcatcatgtccctgagcacggccgatcctctggtgctcccggcgttctccggcgacgacgacccccccgatgagctccgcctcggccgcctcgccggctcccacgggcccctcgccggggccgtacccagctcgtgcacggtgttctccttgctgctcagcgcccgccgcggcggcgccgccgccttcacggcaacggcgccgtcgtcgtcggcgctgtactgcttcttgccgccgccgccgaacgaggccgccttacggagggaccgcgcgaagttggtcgacaagaagagcggcgccgggcgcatcccatcgtagacgaacgcgccggcgccgccggcgcgcgacgccgtggtgctcgcgctccgcgccagcagccgcctcgacgccgtgagcggccgcgccgcgccgccgccgacgccattggactccataaattaaataaattaataaatataagttaataaatatcgcggcgattaagcttggccgatcagagcaagtacattgctggcaaaccctagattctaagttggggagaaccctgcagcactagctctcgatcgagctagtgctccggcttcaagaaacttgttgccgcctatacgttgcatcgtggagaggtagaagaagagtgttcttgagagggcacgtcgctctcttgacatgatggaagagctagattttattcttctatatacgcactagctaattgcaattaatcatgtacattagacatttgtacaacacatttcctgccaattgaatacgtccatgtgctacgatactttcagtgtagatacgtagagaaggatgccttaatttgtgacgtatttgatgggttcagatactaagattattgtttaagcatacacacccacaaaaaagggagagatttgtagagagagagatgctcctccaaacattttttaagaaaaaaaaatatatctggcccatcgttttgcttattcggggaataagcgaaacaacatatttgcaaacagaaaataatttgtgaataaaacttttatacacatgtttttatcaacctaaaagcgaaggccaaaaaataaacttcgatgaaaaaaaacccaaaatgaactccaaatttaaggtcgaaaaatcaaattttgtttgataagtataagcgaaaagatgagacccttagggttaaaatcacgcatcccttaccacgtactgcatctcttgtttaagcatacacgtgaaagaaaatgtccaatcattttctttttgtttaagcatacacgcgaaaaatgatttctttttcacgtagtctttttggatgcatgtggaattgtggaaagggagatgagagaaatgcgaggtagaaaatggtgtggggtttggtgggagaaagggagaggagagctcgatcgatggccattgttcatgcatggcgacctaaaaaggggggccaatttggccattatgcatgcttcatcctcgcacacgcaggagctggctgcttgtgatggtgtaatctgcggcggaagaaagggagagagagatgtcaacgttgggagagataaaatggcgtatttaggtgagatttgtgaaggtactggctacctatctaccgaaagaaacctgtatcggtccatatactactgatcctgagtcaaggtcacggccatctaataattcttcattttatttgatttttaaaactgacaggctcaccaccctaatggattaaatttaggccttgatgaaagttgtctccattagttcaaacccaaattaaataatgggcctaatcctcttgggccagatttgctgattagctaaacaacaaactatactgtttctttcttcagagcccaagaccggggttacagattgtttgctgaaaaacggtatgaccgtatgatcagtgcaaactttgctgaaaactgaacaagcaggggagactcctgccgatgaataagttgtccatgttccagattaggtcagaatattcatcacatgcatcatgttgaaggtgataataaggtcatttgattaattccaatccctacgcatagaagacatgcaacacatagtaggtaggagtatatgtaatgtattttgagtgattaattaattagtggcatgcaaacaaatattgggcctaacctctttggacaaactactgatgggccacatcctctgggccaaatttgctgaagtctttagaacagttgtgtgctattacagttcacggatgaccttaccttatgctggggctacaaataactgtttaaacagtatgatcactgctatttttttatgttggttgctaactacagtagattcttatatttggaacagaggctgtcaatattggataacccacggtgtacaactgacattttctagtacagtacctaatcctctctgaatctgaactctgaagaaacaactgtaacatatgtgactgattcatctaaagcgagaaggaaacggtaaaaaacagagatcttcgactaatttctaggactaataacagcatgcgcgttgtggttgcacccatatacgcattcttctttcttctaggttggttgaccttgtgctagatgacaacctgaatatgttgaagataatatctgaataatcctgctacttgtggcattaattaattgtggccttaagaagctacctagacttttttttgggagtactaagctttcctcctcaaatgtgcactacactactaacacctgaagcatatttcaggtcatatatcaccaaactaatcactgattaaaaccctcccgagattgtactctcattctgaatttctaatctatttccattgcgactctgaatttctggccggtgagttgagtgtggccgccacgcgatatgatattatctggcaggaagtcaatacgagtgacgtggacatgcataccacatgagtggctgacagatgggcccagctgagctgcccgaagactctgacgagcacacacacacgttcgtgacgttggttaaaattggtcaaaacaaagagagtatcgatccgtcgcggtcgccttgccctagacgtattactgcatctgcgaatcgatcgaccgtatgaatccgaagaaccgaagcaaacatatcatcgacgaaaaggtcaggtcagcaccactcagcaaaagtgcagcgaattaatcaacgtgtgcgaaaagtgcgtgtgcactggagtacctgataagtagtcgacaagtcgtgtcttcaccgcgtgaatcttccgttggaattaatgaatgggccttagcccactcgaagattaattctttggaaaatcacaaaagcccacctcatgggatggtatgcatgtggagtttagtaccaccttgcttattctaggagagggggacctccttaaaagggaggatgccctcctagttgcttgaagcatgtgtggtggagagaagaggggaaacacacgcgcgcgctcgctcgcttgcctcgcaggctccttttgcagttttgttttgttgcaaattcggattcgtttttgttttggaaacgttccgaaagatccggtgcgtgcaaacggcgtggagtccggataagttacgcgcgacttatccggttcggttacgcgcagtagagatcgtgcgggcgccctgatcaagcgacccttctctatataaaccgacctgccgtcttcacgcaacatacaaaaaaaatcaatctagggtttgcttcctacctctgtactgcgccgtcgctcgtagactactccatcccgctcgccggcgtgcaccggcgatcgggagagcaggtctccggaacctctgccttcgacgttctgcaccgggagaaggcggcaataaggtttttgggaagcgcttcgcgcgactgctccctgttcgttcgcgacggctcgccttcctcttcgctcgcgtgtttcgtgccttcgtagacacttgcgaaaagtttcgaccaagcagccggtctttccgtcacctcggtacgtgttcaatatgttgcgcatatttgatctgttcatgttatactgtgtagtttacatgtgtagatctaatgatgcgttcatgctagtttttatctgtaatgtcatgatttatttatggaatagattaaatcattatatgtctataatctcaacatcttcatcgcatcgtatcgtatcgtatcagtagtttttatggagtagttttattttttttaaccttgggtaatgtattgctagtacacactatacacacaggttttgcctgaaagtctgaatgtgcgagctactgagctggtcgtttctgaaggagtccgtcgtccatcgagatactcctcttaggagcagtaactttcatgctttatgtgacagcaaaggttggcatgactgattaaccaaaggtaatggtcgttgatggtgagctacagagctagtggtgtgtcctcttgttgtgccagtgactagtgttaacgatcgttaatatcctaaccgtgtgaatcgatcggtcgtatactactggtaatagtaatattgtggatttgtaatactccatccatcacattttatgtatagtttttattctgtgttcaacgtttaacttttcgtcttattttacttttttcttaattattagatgataaaaatatgaatagtattttatgtgtgacttattttctaaaaaaatattaatttcttaaataagacggacggtcaaatgttagacgcatagactgaaaactgcacttaaaatgagacgaggaagtaggagaagtgaaattctaaagttgagcggggtgaagctagatatatgaggggtgcccaggaacccgataaagctttatctcatctattttaccatgtgtgtatccctaaatataaatttatacaaccgaatcagtttaaacttgatctaaagtaaaataatttaagcaagtgtcacctcttttcatttcgttttagctgcgccccttacttgaatagtactccctccatcccaaaatatttgacgccgttgactttttaaaatatgtttgaccgtttgttttatttaaaaaatttaagtaattattaattcttttcatatcatttgattcattgttaaatagtttttttatgtatacatatagttttacatatttcacaaaagttattaaataagatgaacggtcaaacatgtttaaaaaaagttaatggcgtcaaatagggaatactagtatatttcgtttccttcacaggcaagtgagtccggccgcatttgaagtcaaagagtagtagtagaagagaagaggaggtctgaagggaagctgcagcctgcagtttcgtgaaaccccaaagtatcttcttgcctgcatctgcatctgcaacctggaacagtagtactcactctgcaagtgccaagtagcagtagcgatcatgggcgttggccggcccactgacgtacggtgcactagtagctttgagagttggaagagagtgaccgtggcgctggctacctctgaccacggccatggtcacggtgggttcaactggcaactgctgccaacgcgcatccgacgcagcacggctaatccgctactccaatatgatgccaatacgccgctgcgcctaaccgggcggtggattggtggctgcaatatattgcatggacgtacgactctacaagtcaatcgcggcgtgcgtgcccgcgcagcgcgtggttggtgtcgcgattcaattcaaacttgggtcagcccgttttggaagcagagatcacaaggggacaaaccgagcgagcgagcgagctagaccggcaaccgaagcaaaaccaaagctaagctagcgaccggcttattaaccggccgggtacgttggtgacgaccacgacgcttcaatcccctttttttccacttcgatacgacgaagattttttttaatgaacgtgcaaaaaaaattacacgactaacatagttttaattacacaatacaaatcggtcagactggcttatgccagggaaaagggagaaaagataaaataaaaaagctgaagcttagaaaactaccgtggctaaacataaactccaaacagcgggaaggggccgaaccacgctatacacccaacaagtctctaaaagcagcaacgtcagcttaaaaccacagatggccttccgagtggatggactccagaaccactaagactgaagagagcacaaagtcgaaaaccctacggtcccgttcctttcacagctcccaaaagaccacgagacatgacgaagattcaacactcgccgttgctataagtacgatcgagtctatgagtaaacaaaagatattttggattagctggaagctgtcgagcgagcgtggcgacacggccattctcttcctcctaggcaaaacgtcctcgtgtgccacgtactactgtagtgcgttgctactggtacgtgacaaagcacactagctacgtactgttggctcggccttatcgcgacgcccacgagaaacgaaagctgcatattcttggcacacttttcacccaacacttttttggcctttggacgctcatccggccggataaataccggacctcactctcacgactttatccagttttcttcattagtaagtagattattatcatgtaatctttttagttacagaggtatacaaaacgtggctgggttcgttcctagaggaaagattgtcacacatatcctaaactattaaatgatgtgtgttttaaaaaaaatacaccaatttttaaagttcaaattattaatattaattaattatatgttaatgactcatccatcatatcttttcaatattattcttttcacatctctctggttaaagctaaactgttttaaatttaactaaatttataaacaaatatagtaatatttataatattaaattagtatcatcaaatcaataattgaacatatttttataataaatttgtcttgggttgaaaatattagtacttttttctataaacttagtcaaacttaaatcaggctagctaccagttagctgcacgcgtcgggtatgtacgtcgtccttgtaataactttggttttttcttttcttgtattttgaatttttcttcttcttcttcttcttcttcttcttcttcttcttcttcttcttcgggtattgtattcgacgtatttcgccgggtataatttgggtgtattctcatcgcacgtataattaattaattaaccaactacgtaataactacgtggagttaattaatgtgtacgtacgtggggtgtatgtagaaggaagatatatacgtacgtagggaagggggagatttatacggcaatgtataatttgccacaaagtgtattactgatgtatatgtttatacgtcttttatactgatagtgtgcagggcaggaggaaattcctgcatatgcgaggtgcgggcgcacctctcaatctgatcaataaattaaacacaaaaaagtttttgttcatatgagaaatgtgtgtgtactggatactccacataaatggattgaatcagtgg

SEQ ID NO: 7406 - DNA, 38570 bp, Oryza sativa
cgagaggttttgaattggagcttcgtactcatttacctggagatcatgaactcgagggcgtcgatcgttgtcccgtactcatcctgcagatacacccgcaatcccctgcacattttcagatagacgcatgattatgaacacgacactgaacattgcacattgcagggcaacctttcggagttgcattttgccggcgtaagtcttttcatagtttcagtttttattttgccttttctcccttcccctagcataagccggtccggctaattgcgttgtgtaacaaaaactctttttcttctaatatattgatgcagggcaaccacactgactgactgaacattgaacagtgcagtgcagtctgcagctttgcagccacacgcaatgcaacgcacctgtcggccgcttggacggcgagcctcccgacgacgctccgaaccttgttggactgcggcgtctcgctcccgtcggcggagacggggagccccacgatcagctcgtccgcctcctgcagaagaggggagaaaaacgagcggcaaattcacaaaccgccgccacatttggggaggaaataataatcaaaatacgcgttgagtttgatcattcatctgcacctgctgctgagctatgtcaagcagcatcagctccagcttctgcccacgcagcttcagaacctaagcagaggactccgatttcagatcgcccacccaagacgacgcagcaaacgagagggggttcgagcgagaatgcgtacggtgaggggacgggggagggtgatgcccctgccgacggcgactccggtgcgtgcttctcccaggtccacgccgaggctgaacccgcagccgtcccgccgccgcgccgcgttgggcaggagcgcggcgggtagctcgtcggggctcccggcgccgttcgaaggaggagaggccctgatagcgttggctctgacactgcgtggtggctgcggcggaagctggaatctccggagagcggcggcggcggcggtatccgcgccggctcgtagcagcggcagcggctccaccggcttcgcggctgccatggcggattgcggaggcggagccgcggggaggaaagcgcttcggtcgttgtggatagggaagtttttgggccatactgggccgggaagtaaaccggctgagattcgagcaggcccaacaagatcgcatcagactatttagggtcgctgacacgtagaccctaataaaaagttattacaaacctcaacataaaaacatagcaattaccccacatcaacccactaaatactactccctccatctaaaaatatagcaacctaaaactagatgggacatcatctaatacgatgcatctggacatggacatggagcctgtaacaggtgatgtcccatctagttctagggcctattcactttgatgccagaaaaaaccttaccaaattttgttattgctgaaattttggcaactgtgcttgccaaaattttagcaggatttcttatatagttatcaaaatttggcagcaaactaaatgtagccacttttttggcaactttaccaaaatttggtaaggttgaaaatggcatcaaagtgaacagacccctagattgttatattatgggacggagggagtactactacattcgtgaacttggtacggagtatgcgggaaaaattaactgattctgatggagattatctccgagctttctgctgcaagtacatctgttccatgtgtgattgcctatctaaataaatgaactatgctgattctgaatgtttgacttcgcatttgtgttttcagctacagacaagatcacaagatcgacattcagaatctggtgctagtgatctgtctgcatccagcgtaaaaggaacttggaagtgaagcacagatgaagagagtggtaagtgcttctgacttctgaacatttccttccacactgcaaaaatcttacttctactcacgaagtcaacattctttgtcagaaatactactattactgctactaagattcagttgaccagccaactgaaaccctcaacttgtcaatttcgctgatatttttcctctctaaagaagagttcactgctatcgcacatgatcaattttgtcatccaatgtcacaaacatcccatctttgttgcccagtgaatcatgagatactgatttcccaccatgagaaactaatcatactactagatggcccatctaaaatcgatagcgcgtaaagtatattttgcttgcaaagattccaagttttccaacccatcgatctcctgtttttccaccgaaagatcatatcagtttaacagcaatgcaacctttttttcctctctagcaaagcatcttgagccactgtttgtctgtgtggatggaccagttgctgctagctgctgctgctactgctttcactgtcaagcatcttgatctcaccctaatgcagcactgttcggataatttacagcatgtgattgcacatctacattagcaacatctgggaatggccagccgaaagagttcatcttttgtatcaggcaagcatccatccaatgctgagctactagctactgatttgtgtaatacaataatgtacagggagatgcctgcagccacaagctacattcgatttcgcttcacccctttcactgttcgatcacccgacagccaactaatttggcacgtatatgtagtactattgtaggtcatctgtagagcctacctggctggctgggctgcatttcatcatactgtcagtaccactaccttgtcttttaactttgtcatgttaccttcatgactgtatttatgcaacgtttgctttccctttttttttctgggttaattcacctaccagcaacctgaattccaaagcatatactgaagcaaccgctgatcatctgaagagcttgattgctttctgcttgtagcagatcgagcagggttcagacagttcagtatcattagtcgagtgacaactgacagtgtgcttagctccgatcttgtttggcatgcatggcccacgatttggtagcattgcattggcattgcaatgcatctggtactgcactgtggatgcatgatctttgattattattgtaactgcacagggggggacaaagctaaagtaaagttcagttagtaccacagatgagtgaagcgaagatcgaggagtagctaattaagctatagctctgaacattatacacatagcttgacttggaaactacggttacttctgctagctagctggtcctcttcttggttggagctaacaaatggaggggggaatctcgtacagagccgatcgagatcgattcttcagagaaggcagcatatgcatccttgcatgcagaattgcagatcgtcgatcgtcgtcggctacgtacagatcgatcgttgacccagtacaacaagatcgaggaagattatacaattgggaaactctaatcagatgattaattgtcgtgtcaggaattgggggttggtgctgggttagccagggtaggtagtaatgtcgacgctgccgtaccagcaaccgaacattgcatatgcctgcctgcatgctttcttctacactctctgcagctagcagatgagacttcaatttggaagcaagtttcctgtcaatatatctgatggggatttcctgtacattttttcagccaagtttatacagaatccttttaatttgctcccagcaagtttaaaaagcatctagcatgagcaccatacaccaattagaaagatgtcaaactagagtggataaattaataagaccaatccctaattaatgattacccccattgacaaagcctagatttcatcatccaacattacaccatgcacgcaccactgaccaagtgagatcagacagtggccaccacacttccaaaaaccttttatatttccccagttgcatgttgtgcacgcgacgacgacccacctgtgcgacagaattctattctccaatttgccgccgagataaaatacatcaatcgatcgatcagcaagcaatcaacaccaccacctgatatacatcgatcgtggattaattgatcgatcgagatgcatggctcagcatgcgagagaaatctctcatgacatggtagatctagttggcaccgagccaccatgcatacacgttagaacttagaaatgtaagtgaaccgacacgtgaatctacttatataaataagtgggtaacttgtgtgttcccgcgttatagcctgacttgttgcacatagggatacaagtggattaactctatacctacttatagatcaaattatcaggtgatccgggatcaatacacaagttaattatccactaattttacctataaatcgattcacgggtcgatctactcgactccctacgcaagcatacactcgaatgcatccgcccaattgagattattgacatgcatgcatgcgacttacctactttgtccaccgaatcatcggccgtccaactgaatgatcggacgtacgaactccgtccaaaagggaatggggcccaccacgacgttgaccgggttcaatcttgactgccaccgtggcagcaatgcattaggcatggcaccacacccctaaattagttggtctccagtccatgggtgaagtgtacgtgcgagtcaatgtagaagatccccttattaaggcctaactaaacgtcaaatctgtaatgtgtgtgttggaagctatggctctccacgggaaccaagccaagtgatcgctccactgaaaattctgaagaaaaaaaaattctagaagatggagatcgatctgcaatgcatggtagaagaagattcctactgctactgctttctactccctccgtcccataaaaagctaacctagtattggatgtgacacattgtagtactatgaatttgtacatttgtccagattcgtagtactagaacgtgtcatatccggttctagtttcgttttttatgggacggagggagtatgtgctcacactacactgacatttcggcccacccaccagactcctacctttcactgagatgatactagtagtaatttttcggaccaaaaagataaatatagaactaaatgtgacatattttactacaacgaatctggatatgacagaggtatgtttaaattcgtagtattaggatgtgtcacatacaatattagattgtttttgtagatggaacgagtagttacctagtactagttgcctgatttgcatggttgatcttgatagaaaggtgagggagtgtatgaagaaccaaacgaaaaggagcaaaatcgagagtcgcgctagctaggctccaaagcaacggcgagcagttggcaagctcatctgagccactgccagcccgggcccactggcagagccaggcttccatggccccaccattcatcgtcacgcccgtgccatgtgggccacacgccctgacacgctggaacgaacaagtactagtgcgagcaggagagccttttttgcattggcagccaacagagacaggcacagctgctctcctgctgcctgctgcccagctgcatcagagtatcacagaagcaaagctccaaccagctaaattctagtttaatccactaccactaaccaaaaaaaaaaagaagctaagataaactacaacagctaatctctcactgacattgtggggcccagtgcaggtaccgggccactgagcataattaagtgaagtgtgtgcacagtgcatgactttgtgattcactatcgaacaaaaaaacggtgtggcatgagcatgagttgtgtcatgagtgatggggtgtactggtgttaggcaaaaggacagtgtgaccaccacctctggaaacatggaaggcacagagaaatctgagctataaattttggtttttttagtacttatcaatgagcattttttaatctgatcaagttagaggaataagtaaactgttactggtaatgtgaagttcagagtagcagaggttaatggtaagacaggttaagaaacgaatgaatgcgttcaatgagataaatggagcaaaaatatcaatttgatttagatacagagcgcccaaaatgaaaaaaagaattttcagctgctcaactgaattttcagctctagcaatagcagcaacagcaacagtaactgaagcttaagcaacaagacagagaattctccatgatctggtattctggttcttgcaagagatgcagagcttcttacctcgaatgaatccatccttgcatgcagctaggaagcagtttgtcctaccgatttcttggtgatctggagttggcagccatggatgatcagctggttggtggtgtgtggtcactgtctcgtgctggcgaactcggcgtcgtacacggcggagagctcgaagtcgtcctccattgtcgccggcatgttgagatcgatggagccggagctctcgccgcatttcgccggagacggcgagggcgagggccgcgcgccgccggatggcatgtgggcgcgcttgtggccgcccagggcctggccggagtcgaacacgcggaagcagaatgggcactcgtggatggccggcgcggcggcggagctcgccggcgccggacgtggcggtggcacgcagccgccgcccttgcctctcttgaggctcgcgcggtggccgccgagcgcctggtacgaccggaacaccttcctgcatgcgccgcactggaacctgctggtgcggtggcgcgccgccgccgcctcgccgccgccgtagctgagctcctcgtcgtgatcctcgccggccacgtcgcgggcgtcctcgtcttcttcgtcgaacacgttgacgacgttgttgttgttctgctcggcctccgagctcgccccccggtggtgggtctcgtgctcggatctggaacgcgtccacgagtcccgagacagcatcaagagcgacatggccacgtcctcctccgtcgtcgcgtcggagacgctgctcgccggttcgggatccggcgcgcgacgccgccgccgcgcccgcttcgaccgcctccggctcacggcgaagaacgaccccgctccgccgcgcggcggggacgactccgtgtcgctctcgccgtcctgcacgacggaggatttgccgcggccaccaccaccaccaccaccaccggagaattcaccggcgctcaccttgtagctcctcttgggattctcgcgcaacacgtacgacgtcagcgtcttctcctgctccgtcttcttcgtcatctccttcttctcatccatctcgatctccgtcgacgacgtggacgccagtgacatcgccggcgacgacggacagtacgcggcggccgcggcggcggccatgacatgggagcgcatgtggccgccgagagcgcggccattgtggaatcggcggaagcagagcttgcaagtgtgcttgtccatcaccagcaaaccgatcgatcgatcgatggatcgatcaagcaagaattcacttacttgcttgagctgagctgagcagctgcttcttgcttcttgctttgctttgcttgcttcttttctcctccctttgctttctcctcttggttggcttttggctccaaagatgataatagttttatggggaagagaggtagaacaagtgtgaggagagtggggaactcaaaaaggagtaggtgacaagcatccttccaccaaggaacaagatcagcaaacaagaagaagaaagaaagactgaaagaaaacaagtgggagaaggaggtgacagacaatgccacttaaatacacagcaatggcagggtgagagaagcagaagttgctcaagggttttccctgagatttgcaaaaccgaagatccaaagtaattaactgctaaagatggggtgggcccacctgtcaatggcactgtttcagaaacggaaaattggtctgtaaaactggccacaattcaatgcaggatcaacctggcaaatcttcaggtcaatatactgcaaaatggggctagtgggagttacttgcaatttcagagtttgatgcattgccttttctttagcagggaattaagcaatataggctgtcacatgcctgttggcgcaaacaatggagggaatttataaagtaatttgtgtgatgcttttgtggaggtgcattggatttgaccagtgggagattatgtgctcatggccaattgtgagccattttttttagataatgtaaattttaagggatttagataatgtattgtgagccaataaattggaagggattaaacattgagatacgctcaaatctccatttcaatgcctccttcaattgatcagcaactcttatcttggtgtgagaagattaatttagctagggggacatatatgtaaagcactaaagcctatcctgatctccccaacattaggttccattttgtggaaacacatacttgcacagtgggcaaagaagtactgcaagatgtgactgtatacaactacacatttcctggaactaccacagtagtagaatattaaattatcgatatcatcttgttttactcaaagaaaaaaacaaacatgttgctaattagggatgatcccatatgcaggggtatgttcaattgacatggatgtgcgcacgaattagcatgccctttttctgtcggtgtgctgattatacacagaccaaaattttcagaaaaataatttatcacagccagatgagatcatgagataaccaccggttgctagctaatacatccaaccttggttcagagaaaattgtagatgggatggaaggaataatggcaatgaaaagatggtgtctcccttgctttatttctccaattcatcctcctttattttctttctttttggttgtatcgaccacaccagaaagatgagcacgcagcagacgtcggcgaatgaagctgtccatccacttcgatcagtagccaaggaccaatgtagcaaaagctgaggtttaattaacagaatcatcagccatatactactatataaacagtgatgcatgcaacctggtcaagctgtgatccggatattactgtggccatcaacgcctttcttcactcgaatcatgtcgataatcttgaattgttgacagtggctgcgctatttttggaacatatgcaagcagagggatgatgataagatcggtgaaaattcattgcacatatattaatatatatactcctacctctgtaatgatttattctaattcagttgcctactggagtatatacatttttacacgtgcatatcgatcgtattttcagcagtaaataattatttgctggtgctaggcactgccagcagggagtgttagttagcgtgttgatctgcatttggtgtgacctaatcgatggaggaggtaattactagagcattgatcttcttcctttcttttccttttagttgtaggttcacctggatggacttggttgtttatggttattcatcatgttgttcctcgaattatttgctccatgcttctataaaaattataatatttatctactgtatttattatgttcatagcatataatatttaattattgctacaatcaagtaaataatccatcacttttggccgatgaataaataaaagagtgaattacaacttgtgccactttttgttaccacggtttcactttagatcactcattgaccaacatttttctttgggcaaggtatttttacctttgttgtaatttcgaatactctaaaccacttatttaacgcatcaatgacctcaagcatattggtttcgaaacaccggcaaactcctccacctctctgtagaccatatcgttacagggagggagactagacatggctaaagattaaagaatagagttgaatagtccaaagtgcaacaaaattaaaaaaattagtcttaaataaaaaaattagataaaatgtgattcatagtgaaacttaaacagcgcaaagatggttgaaacttgaaagtacaaatcgctctaattaaaataagcactgctcatgaggaggcatggagagagcaaatctgtaccagctgcgatactcaatttaggcagatgggccacgtatgcatgcagctagccagtcacggccgtgagcattagccagggcccactggcccagcttggcgttggggcccacatcgcagttcacgctacagtgacacggtcttaatctagcaggtgatcgatcagatggaactacggattcagattgtgatagatagtagacagagagatcgaatcagcacgatctcttcaaaaacaatgcaaatttaatttgatcaaaaaattcctcgtttattaatttcctaccgatccaaaggttttcttttggtttaaatagatctaagtaggaagtacgtgtagttaattatggacttggtaatcgatcgacgtactgcacgttgtctgtggcggggacgtaaccggattctggccctacgtaccagcccgatcgatccaattaattctctggagcagttggtgtcactttttaattagggagtttctgtccgctgcaattcctctcgaatttttctttggaacgcagcaagatttcaaaaccacaagaacaaaaaaaaaagaatcacaggagtatgatgccatgatataacgtctccaaaggaaataaaaccattggattttgcaaagaacattgtttcgtagctccatgcatagaaagaaacaaaggaagtttataagtcaaaacgaagagaaaacattatgttagacctcatattagttttcctttagaattcctataaatagcctatttttacaggattttcaaagaaagttgaaagagtcattcttttgtttcaaaataccttatactacgtacgaattatttttagagtgaagtacatgagcggtctctaaacttgtaccggtgtgtcatctagatccctgaactcctaaaatgcatttgtaggtccctgaacttgccatgtgtgttatatagatccaaacaggttctaacccactcaatgtgctgacgtggcaatgccacggtgatgcttacgtgtcagtggaatccacatgtcaataaaaaataaaattaaaaaccatattttctcctcttaggtagacagaaaaaaaaataaaaattttaaggtagagaggagaaaatatatttttctaattatatttttttctatgtgactgacacgtggatccaactaacacgtatgaactatcgtggcatgccacatcagcgcatggaaggggttggagctcgtttagacctgtatgacactccaaaacaagttcaaggatccgaaaatgtattttgagagtttagggacctagatgacacacccacacaagtttagagaccgctcgtgcacttcactcttatttttatatatgtatccaatcctctccgaacttcctctaccttttctttgttccaaaggagcccttaaattaatgagaaattttatagtcctttagaaattacctgaaggtaccaagatttacactagaaattttggtataaattttacattagaaattatggtatctcttggtaccttctaaaggatggtaaaattaccctaaatcaatagtctaaattatcacttgaattttaaatcctgaaaatcagtaactacaaaacttagaattaaaaagaaactatagcagtcaaaagttaaaaattttaatatttttatattctcacaagctgactacttaacagccgcatccgagaatctaaagctttgtcaaaggaagcctaattaactcgtcgtattagctacacgtactccagctcgtacgtacgtacgtacgtgtgctgagttagccagccaaacctgcgtacttccgttgcgcccatcggcccatgccatgctttgcttcagtcgtctaaaagtctgaaacttgtatacacacacacacacaccattcgtacgttttgcaatcggcatatacaaattgatcgcagtgtgctgctaatgtacatgcatgtagaattgtagatctatcctacatggcttatatatatgtacagatgtactgatctaccatctctatttaaatgtattttgatgaaacagatcgaagaagtgagccatgagtatagctagctggctggaagcaagcacagcgcaaaagctcagtactattactttggtcatgcacatccggtgaaccagagtactagctatagctagctgcagcccatgatttctcatcagcatgcacggtcagatttcatatacagcacttagttcaacaattaatataccccaacagcttaatgtacagtacatatactctctccgtttctaaatatttggcgccgttgacttttttaaatatgtttaaccgttcatcttatttaaaaaatttaagtaattattaattcttttcctatcatttgattcattgttaaatatacttacatgtatacatatagttttacatatttcataaaagtttttgaataaaacaaacggttaaacatgtgctaaaaaatcaacggacggagtactactagtgtacacgtacacagtgcccatcgtggtgcactgctggtatacagtgtactataattaaagaaccaattcaaccgagacaccgagtgtatgtatattggactcacaatttaattacaagctagtactaactactagtcatgttactggttgatgttacctaaggatcactggcttacgtacatacatgctgcgagatgatgcagtatgcaagcaaagaaggtcatatatggccctcttaattggatggcagaattaatatagcttaatgatttatcataattgttcaaggttataaacaaatgaattaaactaatataaagatgaaaaatgattttatagtaaaccatattcatgtacaaaaggatttgtaaaattaaatcacaccgtttagaagcctaaaaatacgtgtgctaatctattcaccagttcatcagagaagaaacaaggccaaatggaccattgcatgcatgcatgagctgaacagggtagcaaccattgatgcatgcatggatggatgcatatctatatacaggccggcatgaggcttcacgtgaatggccgaacggtagaattggcgttaatgtgctagctagctagatcgatcgttggatgctgcatgctgtctgtgtgtgcagccaggggcctggccactgcagcttgctccacgctacagttggccaaaaggttcgaggcccaacagcccggctcacggcatgagattttgatccggcttagttacgacacagcccaattgttgggtcgtgtttgtacctctgcctcggcatggtggaccggtccggcacggtccaaagatcagggaggcaaaatggatgagtgagccaaagtagactgatcaaaccatataaggcacgatgaataagtctattttgcctctctcatctcttgtcctcgatcgaatcgcatcccctaaccacaaaaccgggtataacacataccccaacttcaaaaatcggtataaataaactcctttggtggctttggatgtggtttttgctgacgtagcatgttgtgacttgtccaaatatggacgtggtagccaatcatcaaatgaattaaaaatagaagtgggtcacacgtgtaagtgaaaggggtaaaagtaacaaaatgcgggaaccgcttgacagccccccccccccccccccccatcttctcttcttcctcccttctctctctcagccgccgccgacgcgctgcgcacgcgcacggcgactgggcggtggtctctcaatctgatcacggcgatgaaatcaacggcgggaattttgctcctatctcctcgccccgcaacgatagacaaatccggagcacgtctacacacgagtgaagtgaagtgacgagtgagtgaggactcaggtgaggatgcaaagatatggcaaatagagggagtacgttgttgctgttctttctcgttgatgtattaagcccaatcgatcgatgcagtggaggcttttgtctaagataggcaagccggtggatttcgagagatctgatgcggctacggtggctagtgggagcgaagccgaacttccctttgcgtcgcggcaccggccgcctggtcagcctaaacggagcgggtttttggggaggcgccaatggcgagctcgtgggggtattggaggcggagcggtagatccatgctaaagctggtggtggccttgtgcttctttgctgtggcatctccatgaccatgtgcttcgtctgcttcagctcgatcggattgcagtggcagtggctgtggctgtggattcaggtggcacactgtgctgctccgtttaggtaatgagattctgcgcacttgttcactccattttggtagtctccagctcagtggctagttctgggcagaacctacttgtttggtgtttcatcgccgttgatttcattgctgtgaccagagaccaccgtccagtcgccgtgcgcggccgaatcagcctcagcgcaggcgcagcaccgcagcggcggctgcgagagagaaatagaagggaggaagaagagaagggaagtggggctgtcaagtggcgccgccattttttaatttttacctctttcacttacacatgggacccacttctatttttaattcatttaatgactgggctgccacgttaatatatttggacaagtcaacgtatcacgtcagcagaaaccgctttcataactaccaaaggagtcaatttatatcggtttttcaatttaggggatatgttatacttggttttgcggttgaggatacgattagatcaagagcaagacatgagggaggaataatagacttatttcaagacacaacccaaatagacaagggatacaaaataaacttattctagccatgtcaagactgtccaaaaagataagggagccaatagactttttccaactaggagcacactgagcttttgtgtcttcgagtcgggccgtcattgcctaggccaatggttcaacaagtgggcggacacggcccaactcggcgtgtaggtcgggctcgactgatcaaaatatatccaatgttatactccgtatttaatgacggcggcgacggtggtgaaacattgggacacaccccgattaagatggaattcagctaataaaataaaatatataataaaatattacagcacatttgcctaatgctgacatttaagtgtcactttattaaattaattagcagacatgcttcctcgtgaagttggcagctccacatgcatataatcaacctgaataaacttaatgttgttcttagccacaagataagcaccaacgaagtttgtctggcactgtggaaaaacaccatcagctaccatttttgattctttactcttccatttttcaggaagtaaaggaacaaaatatttgtgtctttgcagtgcgaaacagctacagtaaaaatatttggcgtaaccatggtcttatgatccctttcataaaaagccgtactcggctttgtattaattttaggccgttctttcttctttggctccataaatataacagttatcataacaacttttttacccttaccatcattcacataaataaaatttataccaaccaaaataacagaattatgtgagccaactaatactgatatgaaagaaggattcttgttcacatcaccaagtttgagcaaactcttctacccaagctcgagccgagcctattgtaccttcgagcttttattcaagctcggtttgagcttgttcgagctcaagctcagcaataagtagtataatatatattattttaatgataatatcctgagaagtataattattttctatttgatcacactaaaaaaagagagtagaaaatgactaagataaatgtattacgctaacacatgctagtttcttgtgtaattagatactaatatatatattgatctattagtttattaaatcaataatgtgaataaacaatatgaactacacacagtcaagctcggtaaaagctcgagttcagttcggtagagctttcaagcttttttctcaggctcaggttaggctcgtttggagctcgatccaagcttgaatcaagcataggacgagtcaagctcgagctgcttgctaagcctcaagcttttttgacagctctaatcccatagtacggattacgggttatcaaagaaataatcaatcctattgcatggatatatgttggtaatataaaatgcgaaaattaagatttatagataaatagaggggtataatcagtattgtacaaaacaaactaaacctagtcattgttggatgtcactaacattgacactgcatctaccttatagttcaacaaatagttttactcattcatcattcatcatatcacacatccaacgatctaaagtcatctgatgatttacatccgatggcactggaggcgcgcctctcctccctcccagatcctcttgtcccacaccttcttctctcccacttcgcatccatgccgccagtattgccgcgatttcctccccatcccctccaacaacgcgatctccgccaaatcccccgcaaggccgcaagcccgcaacacatcccctcgcatcgcgttccatctctcgctagatcactgtcgcctcgccgccctcacggtcgcactgcataggccgattcgacgccgccacgagtcgctgcccgtcttccgcggccacgccatcaccgcctggccgatcgatccccgtcgaccacgaccacgccgcccgccgattgcccattgccacccgccgatcgtcgacctcgaggttgattcccgaatatgtttgtttcgctcatccctttttccaatacttgcgttgccgactaacttccctcgatcagccgtacacgattcaccgccaccgccagtcgccacattgctgtcagatccggttcttcgccattgacatccaccggtcgtccactcccacaacgccgctcacgtccttgttcaggtattaggcatatttgtggcatagtactcgttctcagttaaatctaatgggttttctttctaatttctgatgaaatagatttgctgtgtagtcaaattgaaggggagagacttttatatcagatcactgccggcatttatcttcatgcttgaatttttacagtcattttgaaatgagattggctgattgggtgtgttctttctgggatatattaggctgtagctatagtagttggtcattgattaatacacctcctatgtatgcatttggaagctttatgtgcacttccaccaactaaaacttggccagtaactgactaactgccgaaaagcagccttgttaaaagaataacttttctgcatttgctttcagggtaaattatgattttctttttccttttctgccgtaaaattctcttccagggactgtcgtgaagcttctcccctgaatttgttagctgtagcatgtgacaatccaattattgtggactgtttaaagaagaagcagtacaagcttttattaaataattactttaggaaaaacagagcagcgttttccatgttgtttcagtgtactattatgaactgtggtttctaggagctaattgggaggctgctgatttttaattgtttaggtttggatatcatgaaagatcccatattggagattatttgtatatagcatacatgaaacttatcaaacaaacttgcagtttattaaaaaaaagaatagagttatttttttaaactttctggaaattcaaaaaagaatgcatctgaatcttctattatttcatattcagatcgtaaagataaacgtggcaacaattataaattgttatctcttgtatgtgtcagtctgcatatgtcaggtcagaatgactcttgtttgctgcctgaatttatgagatgactcaacaaatgtgtttttcacatgtgcagaacaacggcaattgatagctcaagtgcttcttgtagcaaacagaaaactttgctccattagaaggaaacaaaccaatcgagaagaaagcaggtgagagagatgttttatagtcatcccatgtgaatagctttaatgaatggatatgtatacattagataagcttattatgagagtaaattgcatggattgtttaatccgttgcactcttcaatgctgatccatttgtagatgactgtcccttatatatgcacttttcattgactcgaacaacatatcattgcagggccctgtaatttaatttaaatttataattatgccaatgccaaattttgtaaagataaatttttcaggttcagaagttcacagtataaaatctatccatatcctgaaattaaaaattgtactaggtttgtatcgtcaaaggaatggtagtgatattttatcgcaacacagcttgcagtcaagtaaacatctcagctaaactagcattaccacattgttacaaacgaaactagagagacagtgctagctgttaattgttggattatacaaatgtgttttaagatgttaactatatcatcagtaacgagagtaatttatagaaaatttggaaaactcaataacataaataagatttatgctgcaaaaaaagaacgtgatgacgatatagccgagtaggtccgagacatcaaattaaggttctgatccgatatacgaaaattcttttaatagtattttataatttaagagtttattgtgaaaaacatataaaacatttagtgttttttaagaaataatattattatgatagaatatatgtgtattagtatgagaaaaaataaaaaccctaacaaataaaagaatctttcaaatattttgtgattgtaacatatgaatattgtaaatatttaagtgtaaaattgaagcgtaaccgcataagaacataattcattttagtggaggagagacagtgagttggtggtggttggagatttataggaggtaggggtgtaggccagttgtttatctttttttttttttcattcttactacacttcactttttgtgaggcattggaagggtctagagcacccttgttttgatattaccgtttactctttactacctctccctatacaatccaatggtcttttttcatttcgatggacatccaacgggttatatgtgtttgatgacgctggctattcttgtgctattttggggttcacttttcaatgggaaagatgtgcatatgagatgccaagtggtggcacggcaacgctcgccggcgcacagacagagcgaacggtggggatgaagggggaaaaagaagaaagaaaggcagattcggcggtcttgggatttccgcgtaaacgtcaacaatttcagcccacggatccgctatagcaaactccttcgggccggaacgggatttctggtagcctatgaaggcaccggaaaatatttgggagaataagtttgcattaggtccctctatttgtcgttttcgtccctgaaccacaaaaccgggtacaacatgtcccccaacttacgaaaaccaggcaaacgaggtccctcgatggttttgatagcagttttggctgacgtggtgcctacatggctaatttgactcggtcttcatccgacgtggcacagacgtggcgcttacgtggcaatttgatctaagaaaaataataaaccctgtgggaccacatgtcagtttcacacataaattaataaaaaaaatggtgggacccacatggcccccacatgtcatcctcactcctctccttcctcctctctcccctttcttcatctctctcccctctcctctctcaggcgcgatggagagggagcggtgcacgccctgtgccgcaaccagcctccaccaccgtcgccttctcacgcttgtcgatgccatcggcagcagcaaagcagtgtgcggatgtggagaaagagggaggggagagaggagaatacaacctcaccgtcgcccctctcttttccaccgccaccaagcttgtcagcggccgcccgtcggagcgaggagcttccccttccccttcttccactcggacggcaccatcatgcgcccctttgtcccccgacacgccgccctccgccttcggcccggtcctctcccgcgacgtgccgctcgacgcctccctcaccacctccccaaccccgtcccgccgccgccaccggcatccaagctccccatcattctctacttccacggcggcagcttcgtcctcttctccactgacaatgtcttctaccacgcctcgtgcgaggccatggctgcgaccgtgccagccatcatcgtctccctcgactaccgcctcgcgcccgagcaccacctccccgccgcctacgtctctaccgtgctctggctctgcgacgcggcggcgggggacccatggatcgccgcgtcggcgagggaggtcgcgggtgtaggggccgtcgccgtcgggtgcctggccctctcttccctaccctactccggccgccaccactcctccccgccgccaccgctccgccccgccgctcaggctgagagagagaagagggagagagaaggggatagagagaagtggtagtgaggatgacatgtgggtcccgtaggttttattatttttgatcgaattgccacataagcaccacgtcaatgccacgtcaaatgaagaccgagtcaaattagccacgtaggcgccacctcaaccaaaaccgggtcaaatactaccgagggaccttatttaaacggtttcgtaagttgggggacctgtcgtacccggttttgtgatcaagggatgaaaatcagactgggtgacaaatagagggacccaaagttaacttattccgtatttgggcctacgtgggattctcaacattcgtcaagccagcaatttgtgtacgtgatgcgccgcgagttgggctagaacatgtgatgacgccctgatgtgatgacgcgtttccgatcccacccaggacctgcattcttgtgggccgaaggaaagaattacacggacctcgtggtggaaaaaagttcacctgaggttcctcgtattgttgccaagttacaaaatcgtccataaataaccccggttttgtcttatgtggtagctgagttaacgtaagacccatatggcagcacctcaatcttcttcgacatctatcctctcttttcccatctcaatcaagccttcgggatggctggcaacgggcggggagaaccggggtcaatactgcctaagcacctataatgatccggttatataagtttagggatgccatatatctgattttcggttcaaagacgattttttaacttcgtgacaagatgggagatcttaggtgaacttttttcctttgcgaatacatcaatgtttgctagcctctcctccctattgtgttggttcattttgcaatgggaaaaaagtccacttacatccctcaactaatgttcggtttcatttaaccgcgtctctcaattacaaaaccaggtacaatgtagccctaatctaaagaactggtagagaaagagatggggtgtttacatccaaatttggcacctaggaataaaatagagaaaattaccaaagtttggaagtctgccggttttcctctgagatggccggtctgaccgccgtgcgttggtcggtcagaccgccgccagtaggtctgtcagaccggcggtgtgtagccggtctaaccggcagagtccgatcccgagtctgtttcgtcgggtttcgagttttccttgcttgggaagtcatgtttcgggtttcctttggtttctatcctgagttggacgtggaggagggcctgtagagggcaagaccaacccctatataacggacaaggccggttcaattgtcaagacacaatcaacaatcaatcaatcgaatcgtttttcacattgcttttagtttttacttagtttgttcatctttgtcgatttgcgctgtaaatcgtccgccgccgctgcgagagtacgacacctctttgtaggtttgtcctgaaaaccttccatttttcccacgagacgggtagttatccatcattctatctagatcggctccgctagctggtttagtttatcaaaacccatcttgatttagcgtttgctaaattgaggtggttggcaactctaggatcaccgcaaagctttaggtgttgcaattgtgcttgtcaacttgtcataaaaggttgccaacacagggatagggatttttttttcgtgtgtgtctgacatgtgagtctcatcgtatttcatttctttttgttgaccataagtatcatgtactccctccgtttcacaatataagtcattctagtatttctcatattcatattgatgttaatgaatctagacatatatatctatctagattcattaacatctatatgaatgtggaaaatgctagaatgacttacattgtgaaacggaggaagtaggatcttgggattatatttacatccgttttataagatgaggttcccggtttttctggttgagggactcgattgaaactcaactcttatataagggacaaaaggtggactttttccttcagcaattaacttgttcctccaatgttaccacggccacaggcaaaggccagcggccagccgtgggccatccaaatgcgagcgaccacacaacagcatctcatggcgcagacagagagaaagcgaaaactcggtccatccatccatctgggtccaagctgaagaaacaccaaatgatggagcacggtcttaccgatcgttaaccggtcgttgttccacgaaacaaaccgactcgccgccgccctgccggcccccccggccagaccggcccggtagttagtggtccagcaatgtccaccagttttttgccccgagactggattggacggcccacccgtcatccaatttccatcgttgataattttgctacttttttaaataatggaaatggattacatttccggcctctacccgtaggcaaacaaccaaaaaaatccaaaaataaacagaaaaaagcttaaaataagataagatgggacaaaccccccaacttctaccaataatatgatatactaaaataatgcttctaaaatcacgtagattctatcacaaaattgctactatagtttggttatatccacagacatgtcgcaatccgactaatccaagtgtggctttaatatggtggccattccatatccttcccttggtataggcagcataatgattcatcaacgtgtgatgaggaaccggacgaggcagtgcacatggggggagctcagctgagctgctcccttgccgctttcaccttttcaatgcccctgcctccttgccaaagctaggccaatcacaccaacaaaccaaaaaaacaagaacaaaaaacgtactactaatgtcaaatgtggctgcgtagtgtaccgggctgcctctcaacgtgggcttcattgtctcggtattttgctttcctctccaatcctcctcactccgggtcaaattggagtgacgtctccaacagttgatcactggcatattgtcatgtgaggccggatgaattttcgtgtgttttttcttttcaacgaacctgtcacgacaaaggccgacgtgcacatcactccggtcacgttaatcacgggatatacactcgggtcagtcagggccggactccctgaaatccgaacagaccacgtctacattattccgcccggtaaccaccacttgttcccctgatcctcccataccataccataccacactgcaattctgcaagcaacgcgaccatctgtatgtgccaccgtgcaaatggcagctcacgtgttcacttgcttcagcttgtaagcaactgcaaaatatatgaaactacgctgagttcctgtcattctgatcacgttgcaagttactcgcaatcgatctcgccgtgttctctgcaccgatcagcctgacctgcatgcatttcaggatggataccaaaagttcaaagttcaaacattccgtctgcaggataacaatggataaatagcgtgccagacaacaagaacaaaccgatgcctgaaaagcaggccccaaaacctgcaggtttgttactactcctactagtactatccacacatcataacacactgtacagccattggtcgaggagtgcacggttttctctttctttcttccttttgcgtgcagccgtagccgcgccgcagcgagaacgcggggggcgcggcgcggcggcagacggggtgcacgagcgcgaggcgggggatcggccggcgaaagctcagtggatggatggatggcgacgcgaggacgggtagagtgagagagagcgcgcagtgggtcctggaaatctgctgcaacagcgccgttttgcgtgccgaatagccaaaaaaacaaacaaccaaccggagaatctgagcgagcgagcgagagagagcggtcatatatgcaccggtgagcagcagccgtcggcgtgaatccacattgtctcagcccgcacatgcgccgtcgcagtcgagcctgtttactttgtcctctttttcagtctgggtaactgtcaggtgaacgtgagatgtgcaagggtatcgttcttttttttcacatatctcacgtaaacaaataaaacataaaaaaatactagagtatcgatatttttatcgaatgtaatacttttactttatctactgccaatacatttatttcatatttttagaaattctgatgtacttcttccgtttcatgatgtaagattttctagcattgtccacatttatataaatgttaatgaatctagacacatacatatatataggagtaatgattatttagaaatgaacttatttggataagcgggagagaaaaagaaataaacttagtatgaaatagagggagtaattagagccttatttggttccatgggctaatgtttagccctcaaggatccaaacaggtgggctaattttgagctaatatgaattagccccctcaaaacattagcccctccaaggggtactaatggggctaattttgtatggggactataaaaaaaacagctctctctcatctctttctactctctctctaccttttagccttgaattagcccatggatccaaacataccaccctaggctaatgtttagcctaccaattcatgactaaatattagctctcaaaattagccctgggctaatcttccaaacagggcctaggtgcagtggaattcgagcgaaaacttttcgaattaagcagagccaggaattgaaccggtttatggtgagttccaaaaaaaactattgccttcgatcactgatgtgaagcacaaaaaaacaaggccctgattgattctatggactaattattatctctcaccttttagccttgaattagcccccaagaattaaatatgtgggctaatttggggctaaagtgaattagccccccttaaaacatcagtcccttcaagggatgctaatggagctaattttatattgggactatcaaaaagcagctctatctccctctctatctactctctcttcaccttttagtccatggattcaaacatgtcactctagactaatatttagcttatcaatttaagactaaacattaggctaatctttcaaacaaagcctaaatcctttgcaggcttgagctatggaatgaccagtcatgtttctctgctggcacgcatccagagctgcagaaagaatcaagcttcacggaatggggctaactttctccatttctcgatgaccgattcatcgttgacaagtgtttattacagtagaaaagagacaagttcttcagcgtgcatcacggttagtactcccatttatgacctcaagccagtcgcatctaagttcgataggcgtgcagacactgaagttaaccttaattgtagtcaagagtcagctttgcaaatataagagcgatggtttaacgccagtaattccggcgagaatgcagttggtcggcaggtaattttgaagccggcgtcgttgccgagcctagctcacataacttaactgaagctaccaacgaccatgataacgatatcttggactgatagtataccagaatgctggggatttgtatcatttgggttcaatcagcgcagtgatcaccgtaattgagtatacttgatttgcacctcgcgataacaattatgctgaacctttccaggattgccaaaactagagaaagataaagttaagcttttcgctctgctgcggcctagcaagcagtacagttctgaaaaatggtatattccaagtcagcttgagatctgcctgcactttttccctttttttttcttgatctatttgtactaataaagtaccaatccctgactcaacctctaaatttaattcccagttgctagtgtgggtttgttagcctcattaaacctatctattggtaatgctgaccaaaactgactgtttggtttataatcagtacatgaaaattcggtaaccatttcctaatgaaattgaaaatttggtaaatccaatggaatctaaagttaagctgggggcaatgtgtagtaataatatcagtctgaaaattgttaccagtttttagcctttttttttttccaaaacacatagtacaaagcaaacattcatatacgcacacaagcacatcctatttgaaaagaccaaatcaacatatcttacaattaattctcaaaaaaaaaacatatcttacaattgatggaagttcttatctgaggtacgcccaattcgcttcgttccatatatatatatagactttgacaatatatggcagattttagtttggtttgctgggagcctaaagtcacctcaaactgggagcgtaatggtattctgcagtacagttctccaggtattagagaatggcatatttttcagagatctgctcctccggtatatccatacattgttgattcccaaatcaatttgatatgtatgtgagtaccacgaaagaacatggacacgtactacttaaccaacccgaacacgagattaaatcagagaatctatcagagagagccaccaggaagcacatgattaggtaattaacttaagcattgtatttataattctgtagccttaagatttggttacaaagcactgggtagtacagtgacagtgggcgggagagcacatgcacatactgtattactgtgcccctcctccattttcccacacatgcatcacttcaccacttcacacactagaccagacagcacatgaggcctcgcctaataaaaaaaaacacctcaatcccacgcaaattttgcagcagcagtagtagagaataaactaatcgatcgatcgatcgatcgcgagccaatatgattccatattcgatcagcagtggatgattgatctagctgaactggacgatggagcggtagttggagttgggggaccagttcgccgggatgacgttgttggcgacgagcgtcttgccggagtcgctgcggatgcggagggagaagggcgcctggaggcggtggttggagtcgaggcgccagatggagccccacgactccctcatcggcgtccagacgccggtggcgccgccgtacgccgacttggactccatgaggtcgacctgcacgacgtcgccgtcgaggtcctcgtactcgacgagcacggcgaagtacaccgggttggagccctcctcgacgtggaagttgatcttgaggcccgggtagttgcaggggacgcgcctgaactggatgtcgatgatgcccgagtggcggagcttgtcgttgagccccggcttggccatggcgccgaacgccgtgccgctcaggtcgaagtggtacctggccacggggtagtagttcatgtcggtgatgatcaccgtctcgatgttgcccgagcacgacgggtccttgttgcacctgatctgtaacaaccaagtcaaacaaatggtcaacaaaatgtgccgcactgcatgttactcctacatgcatgctatagaaaaatgtagtagtagtacgtcctgaccaatcaaatcaaatgattgctaattgcaaaattggtgccatggtgaagtaatttgactagttttttcgtacctggtagcatgagccgcagcccttgccgtccttgaagatgggctcgttgccgcaggaggtcatggacgagaatgggtactggttcacgttcttgaacccgcaagcgccgcctgcaaattaaaaccgaccaaataatgccaatgcgtcagttcagagaccaagcaaaagcacagatgagcaccacaagcatcatcagtagctgcaaaatgcgcaccgttgtcgtcagggccggcgccggtgggagcgccataccaggttgcccgggcagggagccagccggagccgtaggcggaggcgtcggagacgttgtagttcacaggatgccccttgcaagagccatgcaccacgagcacggacagaatcgcgaggattgcagcgaccttgctgcccattctggctgccatcctagctagctcgaaaaatcttcagctcggagaagagcagtaggctagctagaactggcagcagcagcagtagtagtggtagtaagtattgtctggtgtgtggtttgatggttggaatcggaggccattgccggtgtatttataggcagggcaaaacgagaggggaagggaaccaaatgtaatggacgagcaacacggcggcatcaaggggtcgttgcacccgacgtggccaccggccggcgtggtagagagagagctagctgtgtcacatggctagggagaaaatcatggacggatggagggttcggttcacgagttcgtaccattataaaatcacatctttggcagttatcccatgttatgatattgtggacgatacgtacctgccaaatgatcgatcgtatgaattttttttttgtggtaaggaagatgaatgatcgattatattccagaatatgtatatagtttctcgtttcagatttagatcgatgcatgcacagatcgattgcatgatgggtcattgacgttgtttcggggaacggaagagattccataataaggcaccagaaataaccacgcaatcacagagagagatcaatcagcaggggcaggttgattagggacaataatctcggtatcatttgaagcaatcatttgtacccaacgctcttctagggtgaccatatcattgtagtatcaccattgtgcgtaactaacgcgtaggtagtgtgaaaccacctagtgaccgtcctaaatataatcgccaactctaatattgtattgacagagtgacacggtagtgtgatacatatgtgcatagacagcatagttgcatactagccgtatttttgtcccttacaaaaatgtggatatatatggtagttacaacttacaggataccctgcaaaaagtgaatggaaagaaggcatctcactaagattcaggacacatgccaagcacgactttgctgacttcccaccggtgttttaagggcacccgcaatgattatttataagctctttacaagagatccatgtcagcatatttttctacttggaagtgattaaatgaagagagagagagcaaagctatctactaacctgaagatagtttatagagaaaaacgagacaatagattagagagctatagattcccatgtagacataccattgaagtggtttaatattaatctaatttattgctgagatgtacatgttttatagataacaccttactttaccattacaggtgctcttaagtaaaaaaaatgatgcgaggatataccgatcacatccacacagtgatacaatcattgacatatgcaccgtatcgagatacggtgctttgggctctggctggtgagtctggttatatagtagtatatacactgacacatccattagtaactgtgaatagtgaattagagcacccgcaatggtaaagtaaggtgttctctataaaacatgtacatctcagcaatagactagattaatagtaaaccacctcaatagtatgtctacatgggtatctatagctctctcatgcattggctcgtttttctctatagattatctccaggttagtagatagctttgctctctctctcttcatttaatctattccaagtaggaaaatatgctgacatggatctcttatagagagcctatagataaccattgcgggtgcccttactccctcaatttcaaattgatctatatatttcatgggtacaccaagatcaagaaaagctaataactctctcatactatatttactctagcaacaaactcaatgcatacatcatccccattatttcctagccaatagcaaatcaagatattgcatgtgggttataaatgcttgtgtacgcatggatgcatgcatcaatgtccatttattcccaggcacaaataacgaatagacctaataaatgaacacaaatatgtaaatcatttaggaataacctcaaaaaaaaactatatgtagatcaatttgaaattgagggagcagtactaaacatgtacaaaggcaatgtgtaaaaaactagaagaggcatcaagagaattttttttttatcatagcaaaggctctatactgcaaacacgggtcttaaacaccaagcatagcaaaggggttcttcccttaataccaggtactttaaataaagattactatgtccgtcccagaatataaagagttttagagttagacatggttattaataaagtaggtaaaaagaaattatagaatattatgattggttgataagtgaaggtttgtgggaaaattgaatggtgaagggttgtaattggttgagaatggaatgttggtgaataagttgttatattttgggacaaatcctaaaggctaaaagttgttatattttgagatggagtgagtagtattcatgaagaaatccactttaatttccatgggtgtgagaggcggatctagggcttgagcccccatgaagcccccacatgtttttttttcatacgtagataggagagcggactgttgtagctttgttctagtttgttcagacattactactattcttcttggatccgcccctgatgggtgttgatcctattatagagttaggtgtgttctatacactacacaaatctctattatatttatgcatagtgtgtgaactcaccttaattaatactcatggggtttatatgaatgctctaacactatctgcactatctactgattagctatacccagtgtcagatgtaccgtaaattctcaaggaattttagaaccacaatctaaatattaagttgtagctcggattaggcctgtgcaacaagcaagaccaataaaatctaaatacatgatattgttctggggtgaaacctacgtactcatgatgtagcgagttgaattaggttacactcctttttatttggcaaaaatacatttttaacacgaaatttgtgttccaaaatcaaagccatgagaattttaatttaaaacattatggacaaatcaatccataaaggaaccttaaagaaaaaagtgattattcaaaagataacagagcaagctattatagtgggtccataattttctgaatttttctccattttgtcctttacctcatccaaacatctattttcctagaatttatatgtttttgaatcatctattttacacgtgcatttctgtcctattcttgtatttttcatgtattcctctatttcaaaattatatgtttcaaaggagcccttaagtttcccatacggccatacccattggacataagtaaaactctggactcatgtttttaaaactcaagttcacactatacagcttcaaatttttgctgaaatttgttaggacatcacctgtcagggacccacgtctctatgactttacgtcagaggagctccgttcggctgggccttagctccaccattggtagtgaggtggatcaagttttattgatactttgtatataggatttttttttgaaccttcaggtatgcttgtatcttactttacttacacagctgtgggtgcgtcctctaatacatgttgaaagaaatgaatagaccaacggcaactccctactcttataaaagtccttttgaaagcggagttgagggtgtgagcacgactatgtctccatagtattggtactttgccaactcctacctattttgtactctctttacttgatataagttcccctttttttttctcaactatcatctagttttactgcttctaatcaaagaatggaacttagggcatgtttggtagagctccaactcttaaatttagtttcaggagttaagtctgaagtgaagttgtggagcagcctatacacagctccacctctctggttcattttatgagagtgcttcacccaacttcgctcttattttaggcagagatgaaattgtttggctgagctccagcattaggagaggtgaagctgaagctagagttttaccaaacagacccttagacaaagaattggctgatacggaatgcagactgtgatttaattaatttgtctttggataataaaattaagtcaacttcagttagaacatgccctaccccatcattacaaacttacaccacacaaaaccgcgcgctcacacgcaagaacatgcaccatggccgctgcaaccgtgctgcttccagcttacggtacatggcttcacgcaagacagtgtaatgaacctcgaccacacatgacggacgtttttgttgtgcgtacgcgcccggggcacctcacgtgcatccgccgtagtacggctcgcgtgtactgagcaacccatgctgctgctgctgctaatggtgtgatattgtactactctgtgatctgataagcaaacacaccgtattaattcagttcaattacaaacttggttttggtcacaatacaataagtctgccaatccggtatatatatatggcatattggcattgggtcatttgtcaatgtgggcggttcagagcaagcacatggatactgcgtgccctgcccctgttccatttcccacacatctcgctgacacacacaactacaaattaaaaagagagagagaaaaaaacgctcttaattgatccgttcgcaatttgcattgcaatcacacacacacacacacacacacagaatcgtagtacagtactagtgccgaactgccgatcggtagaatcaaaattcgttcttgaccggcgacacaagacgacgaaggcattgcatgcacataggtagatcgatcgatggatcaacggaactggactttggagccgtagttggtgttggccctccagttggccgggatgacctggtgggcgatgacggtctggccggactcgctgaccatgcggagggagaaggggccctggaggcggtggttggcgtcgaggcgccagatggatccccaggagcggcgcatgggcgtccagacccgcgtcggcttgccgctggggagcgactccatgacgtcgagctgcaccaccgtgccgtccttgttggcgaactccaccagcacggcgaggtacaccgggttggacccggcctcgacgtggaagttcacgtagaggccgcggtggtagcacgggacgcgcctgaactggatgtcgatgatgccggcgtggcggagctggtcgttcagccccggcctcgccatggcgccgaacgccgtgccgctcaggtcgaagtggtacctggccacggggtagtagttcatgtccgtgatgatcaccgtcctgggctgcccggagcacgacgggttgttggtgcaccgtatctgatgatgaggaatataattaagggcaaaattaatccatatgtgcatgtaattaagcagcagctagcacaaagtcaaacgctgaactgaagaacgtgttacccacggatttcaaggcccgttgaccaatcaagttgtgattaccaccaactgcagttaacgtggcgggcagtacggtgctcgtaaacaaaattatgttggtacggatttatttatgatcagaagttccatacccactgttttgtacacttttcagatgtagggtacaaaggttaatgttgagatgtactatttattggagaccgtgtcgataagccaaaacaacatatgtgatcacgaacgtggttatactatacctggtagcaggcgccacagcccttgccgtcctggaacagaggctcgttgccgcaggaggtcatggacatgaacgggtactggttggtgttcttgaacccgcacgcaccgcctgcgtatcgatcgaacaatgccaatgcgtgtcagcattcgaatgtcagaagagcacatacgtacgacagcgtaatttgcaaaaaatgcatgtactacacgcaccgttgtcgtcgggtccggcgccgttgggctggccgtaccaggtggccttggccgggagccagtcgttggtgtagacgacgccggcggcgaagccgtacgtggcgagcacggagagcagcatcgcgacgaccttggcagaggccccagccatcttgggaactccctctgctacgtacgtacaaaagcctgtactactaccttgtctgctttgtgttttggcgagaggagatttgcccgtgtatttataggcagaattaggctaactggcaaaaacgaaaaaaaccggatcgatcggcaacttggcaccgataagtcgttgcacccgacgtgcgtgccgtgtgtatgtgagagatcgatcgagcgagctagctcggtctagtcacatggcgctggagcgaatcgtggaggaatggagattaagcctcggtaaacgagaattcctattgtcaaatcgcatcttggcagggcggttatggcatgttggggaggtacactctcgtacagtgcagtacgtcattacctgccaatcattactatgtacaagtcaaccatcgcttgcagaaagtcggtcggttttcgtaaaccgtcggatctcaacacccaccgtgcttggattgttaacacgtgtatatatccctcctctcgctcatataggtagctaacgtacgtgacagtactgccctaacattcttaccgtggtctctaccgttacgagttacgaccgatttattaaaaaaaaatcagttttattattggacacatattacccctcccctctcctctgtcctcgccggatacgatgaggaaggggacagcttctcgtaagttttttgagtttttttcaatgtaggttggaactatttggtgtctaaggtttgcctttcatgtttttcatggaattaaatctatttagattttttcttgtcttttttaatctatgtgttgctggctacttcattcgtgaggtcctcgatggaaatcaaggagacttgcctgtcggtcatcaaatattacattgttggcgttagttttaggttccaaattgtcgacttgttcggtggtattggtttgctcttttgtcgaaggatatatgaatatggtgagcaatattcattttacatgtttttgcgtgtgttacaatgtcagcattgtggctacactcatttgctcatatctcttgcggtatttcaatatgtggagcctccttgttctgtgttggtagttcttttatttccagatattgcaacaaaaagagttgtaatctcttttataatttaatatgagctgccctgttttgcaaaaaaaaaagataaaagtttctagtaattgagctggtaaaaaaatattaatatggtcgctgtgataatataaaaatggaaggtttaggagaatatgatttctaccccttataaatatcatggtatttttcgaatctctcggttctttccactgcgtgtcatacagcagccctataatacaattatttttcgtgtcacaccaccgttatcttcatgacacactccctagtcattgccccatccccttccctgcacaccacatcattgctaatgtgtaccacttatagcaccatggacaagccaaaatgcttaaagaaaaacgcgagaagaagaaatgtatcgttttccttgcagagactcgctaacagtgatctgattagcgacaacttcaccataaataccaatgatggccaaacgcgatatttggtttggtttcgtataaggtttaaaagaggacacttgtcgttactttaatggaagatgcatatgagtacttatggagaactgggagtgttctttttagcttatcgatttatggaatatactatgtttcatattataaaaaaaaatttctaaaaaactgatcacatttaaataagtttatttagaaaaaaatgtttcaaaaaaagtttatttagaaaatatgtattataatacgaaacaaagggagtatgtatcgatgaatacttctccaaatacaccactgaaaactacattgtcgactaccaatgaaaaaatataattatttataaatacaaacacatctgttaaatctgatatttaaatatgggcgattaggtttcagtgcaaggagccttaccagcttattagttactcagttcgcttctcttttttcatctctttttttttctactccagtgatgtatagaaatccattatcttcatattctactctatgacgttgggttggattaggagacggaagtcacgggcagataagccagctagaaaccaaactgcaatagtatttccgtcgcttttatttcgtgagcaccgagcccgtacgcaagaaaaataaaatacgtgtcaaatgcattatggagcgagaaataacagtacaaatacaggaagcatacgacaaatggatacggaggactacgtggctcgccgacacggtcacagtcgagcatgcctttcatagttgcatccacgaatacatagatgtactccctccgttttaaaatgtttaacgccgttgattttttagcatatatttaatcgtttgtcttatttataaaatttaagtaattattaattcttttcctatcatttgattcattgttaaatatatttttatgtaggcatataattttacatatttcacaaaagtttttgaataagacgaacggtcaaatatgtgctaaaaagttaacagtgtcaaacattttgaaacggagggagtacatgtttaattacctcgatcatatccatgatcattggaatcaatcattttgtagtatctattgtctcggagcacgttcgttaatgcctgcaactaaccatatgcgtgcaaccacgttataccgaccaaaattcattttggtcgttgaaaaaagatatgatatcatcgtgatatgtgcatgtgtctaccggtcatgctgctattatcccataaaaattgtgaaatggtagctggacagagcgatcgacgctgtaaagagttatttaaactgatttctgacgtttcaaagaaaccacgtaatttcattcaacttatattcgaaaagaaaagagaataaatctattttttgaaatggagtactagttaccaaacttgtattttgtgatagccttcaactgtgcttatggtaagagtttaaacctttgtaggggtaggaaaaaacactcaggcttatattggtttggtttggctcgatcgatagccaaacgagcagagccaaagcctcctccgaacctcatttctagaatgagctgggttcgagctagctcatgagttattcggtagctcgcgctagccagcctattatagtttggtttatttgtctagctcaaagataagcactagtaaaaaccctaattctctctattcttttggggcagatgacagcgcaacaggagtgcatactcatgctacaccgccaagtcatgcacacagaaaatagcgtagaagggagccacatttgtacgattacacaatattgacttacgcctacgctgacaacgcaaccaactagtcgcttccccctcaattgaaattggaaataacgtcgccgctccttgccagcttgtcctcgcaggtgtagtttacaacctatgagtcacaagttcgaatgcctgggtaaggggcgtggtgcgctagacttggcctccacctatgcttcaatctctccaatgtctatcattgcttgtctgtttcgcaactgttcaagtgaagaggctcgtgagccagatcgagttggctcaagctagaaaacatagggcctgtttggggagctttagattctgaaaagtagctgtttggtagccagcttctaagaatctggaaaagctctgaaacccagcttctggcttcttagtttatttttcagaatctttaactacatattctcaaaagctgtggactgttaggggcagtttctagcagaagcagcttttgggaaaagctacagctgggacaagctcccccaaacagcgacatagtatttccaattagctgatttatatattagcatggactactcaacataatctagggtcatgataatccaacccatcaaattaacagccggttctttctgtagcttgtgagtatccttagagtgaccaattagtataggtataaatgctcagtctaattaaggttagacacaaatttgtatgcaagtgtagttgctctctcaaacatatgtttcttaggttaaaaagaaaaggaaaaaaaacattattcaaccagacacccgtataataagtagttgcaccaaacaaagttttcataatccaactcaacaacaaacaaatccataaagctatcgttaccaaagtgacaaaaaaaagaacaaactctttgtaagaaagtaaactcccccaagcatggcatttgtaatttccatggtca

SEQ ID NO: 7407 - DNA, 36683 bp, Oryza sativa
caattctacggtctttaatagcaattctccggtagatggcagagatcgagatggggagggatcccgagtggccgcgtggccgtgtgtgtgtttctttttttacttttcctctctgattcccacttgcgacgaaatatcggttgagatgaacctgtccgtgttcttacctgttcttgtgatcttcgtgtgatctgatttcaattttttttcgcccttctcctgttcgttttcttgtctgttctggcgtcttcgcggcatgcgccctctcctgcgaagcgggcggtgggagaatttaggggaaaattcatgtgcgtagagaggtcaagaagaggcgcggcggtggccaacctccgacgagtagagaggcgcggtagtcggcggctcaagagaggtgcaacctcatcttttcacttatacttatcaaccaaactttaaactttaaatttaaagttgattttaaaatatttttcatgaaaatttatttttcaacatttgattttaggtcactaagaaaacgtacataaacgttttattcacaaattaattttttatataaatataccatttgacttattctctcaagaagtatgcagtggagagaccgaaaagaaagggagaggctactcacaatgaacatgacatttttttatttttatttttactttgatgactagattgccaccatatcgtcagtcagatgaaaaccacctcattctcattctggaattagcgatgtaaattgagcggttttagaagttgagggtgagttatattcggtttttgaagttgagtccctaagaaatgctgtatggctaaactaaaaatcatacagctaacaaacactgtagttcagaaaaaaaaaaaggctagaaaaaagttacttaaaccgtattagcttaaaagcatggcactaatcgatatatcaattagctgtttgaaacacgcactgaggctaaacggcagcatcatatgatcgatcgtacctgtgatgacggcgaccaatccccgggcatcgatcccggcggtgacctcctcggcggtggaggcgccggagaagccggagggccctttgcggttgaaccgccacatcgccgactccgtatggcgtactggtgtttgcaagctgagttcagcttcggcaccagatggcctgaaattatatggtcagactctgacagtgataccatgtgatgtggccacagcagtttcagcttgttactctaccaaagtactaaagatattgtttttatgccaaaaattcccagaagacttcaataagataagaacaccacacacagccgatgaacagagcagagaagtaaagccgaggggggtgctggttttctgttcagctaccaccacatccgcggttccggcgagctcttggaatcaggcgtttgcaatccaagttggggctaaaaatactactaatgttaatgcatgcctctgagcctctgacagtcacattcatagcatatgatgtagtacaacgaccggccaacagtaggctccttcggaatgcagattgaaaaaatataggaataggaaaaacattagaatatgataaaaatgtaagtataaaacagaggatttgaaaacataggaatttcatgtgaatatgtgtttggatggagtaaagtaaaaacataggaatctttaagaaaaggtgcactattacaaaattatcacatgctactagtaaattaaacaacattaatcaacctaatagtatgctttagttgcttgatggcatgatttgcctcgttcccacgcggagggagagaaaaaagaggtcagcgtggatttttttttcctgtgatcttccactgatatggctagcgcaggaattttccctatgtattttctacgaacgttttcctgtgatccgaatgacgtcacagtaaagtaatccataggaaccaaaatcttttatttttcctgtgtttcttctccattccgaataagctctagttcgataccgtacctccctccattaaaaaaaatagcatcatcttaagatgtgatatattctaatataataaatttggacatattttatatctagatttatcgtagtgtatgtattaggttatcttttttagatggagggaggaatgattccattttgcttccaaaaattcgcttgcagaatgctttttaaagccggattttttttctctctggatttgcccaaggtatttggaattcgtttttttttccgtaagggtgcttctgtttagctacagctaagctgcaggtatgggtcaccaagaagaatagcagtcgacgttatctcagaaattaataatgatgtttgcagtatggatgagcaactgcaggcgatggagacgccaatatgtaccgaaaatttgacaatccggcccttcttaaaaactcattataagagtcaactgcgctaaaaaacttattcaaaaaatgagttagataaaggttgaacatcatctaggctgaaagttgcacaacaatttaacatgatagaggctagcgctagtagggatggcgctaacctatgataaatatagcaaatatgtgtcacctctcggatgagatgttagcgtcaaaattagtggcgctaagatgttggatctccgcgtcgaacccgatgatgttaaggtcctgatttctttttggcatggttcatttttataataagtttttgaaaaagtcaaattaccaaattttaccttcttacaatctgctaagcgcctaaaactcaacatataaaagcatagtaattatatgtacatcctaaagcctaatttacaagcataccacaccaacccactaagtgcttaaagtttaatatggaaatatagcatattaaatctaaaacttaacatataagcattctgaatcatcattactcacattattttcatagcattttagctcaattccacctatcatttatataatatttaatatatagtagaaaatgtgccaatgtgttgcaacgggaagaaaagacgagaaaattgagcaaaagttgagaaagatttagattatgtaattaactaaaatacaaattttctggaatacttaggtattttttaattaggtaggtgtagaataaaattaatttacaagtaaagtaagtgtgagaaataaaatgacatggctggatttaattttgattaaattattcgtgattaattacactatctgaaattttattagaatttttagagctcaagtgctaattttattaatacaaatatcatttcaacatttatttaaataaaaatataaataaaaaaccattctttatctctgggttattttcagcccattttctttctcagcccgcagccaagctagcctgctttcctcccttctccttccctccgccttggctcacaagcatgcatccggcccaacaaacaactgaaagtctaatcggtatccccttttcctcctctcattgtcgcgtgggcccattgctaaagtgttatcccttaccttcgttcagagtctctcagctacttgacaccgccggaagccgtctcctccatgaaatccgattgagggaattccgatccttatctcattctttttccattttcctaagaatcgaagcaaatccgcttcgtatcgagctcggaatcgagccctaccctaaacaagcaaacacttttgcttaaaaaaaatcaattagtgtgcagatgacgatgacgatggacaaaataattccggaagtcttacgtattttttaattaggtatagatagatggatgtagatatagattcttccatatatccgtaacaaagcacgtgcgtcatagcaatagattaatttaacttctatggatggaaagttcttatgtcaagggtaattagcaccaagattggtaaaataattgtctgaatgaatttgcaggcaaactagtttgacttagggaatggtgatgcacacaattaaggttaggttgctccaacctgagcttcacaaattctgaagcaagggaaggggcaagcaatcactattcaccgcccattttaagtaaaataatattttaaaaacaagttggacacaagaggagaagcttggtgtcgattaaaagaaattttatggtacttcagaaagtacatagagtattaagattttacacattaaaatacctagtatctagagatattaaattttacactagaaaatatgatatctcctgtaccttgtgaatggttaagaatgataaaattatctgtcaattaatcaataagacatgtgaatgtgagtcaaacatgagatcctaggattgaatccacacacatgacacacctagcactatactagcaatggcacctcaaaagaatatctctagtccaatacctcagcacaagcacgttacatctactcagtgtttatgtaaattttaggaaagtagaagcactggagtgttggtccatgaagcgtaaggcttacataaagaggtgaggtgggcctccaaagtccaaacattagtttaagaaatacatagccagagccagcccatgattataggaagaacttctaaactaaactgaggcggatatattacaattcagattgttctaactagtcttggaggaattgcacggatctctttgtttgtttatgtgaaaattttatgttcaaacttgcagaaaatagactgtagcacatgatgcataacacaaactataatttgatagccacatcaagaggacacaatcttggagctaaattcccatagtttatttgccaactctgcatttgaagcctgtgagcttggggtatctaaattgcagttgctgaagtacttcccacttatcccggtgaattgagaatgtagtgccacataacatgtcgttgcagcaccctatacaataaaaccatgaggttagaaacacataatatgttccacacctacaacgcacgaacatatactttttttaaaaaaagtcacctgttctacagttttgtgtacgaatcttccaatggacttcactagagctgcaagagagaaccaatgcacaagaacagttaagaaatattatatttataagcagcattgttcgttgtgtttaccagtaatcaaaatggttggggatcatcctaaattggcattatggagtatgtgcttcttcaagtactaattgttccaaaattctaattacactccaaaattttgttctgaatggtttgggaattaccatttataatagtcctgtgcctgaacaggttggttgtaacaacaccaggatggactgcattagccgaaatgttcacaccatcttcctgttcatactcaacggtttcccggttattctccattgatttgacatataatatatatgatcagagattacatacgaaatttaggcataagctactaccttcagaactcgtgacagctcagttgagtgcaaaatgttggcaagcttagactggccataagcaataagactgatgaatctggtaagaaaagttaagtgcttaatattatctaataagttgagtgcatactgcgtaataaatatacttatctttactaattggagctcccttgataaggggaccttacgctaatttttggatgataaaaagccaaaaattcttatattaaacagtcaaaaatttaacattaattcaaagaaaaagaatagatcatccagttctcccacagacagcaggaaatcatctccttgtgcactacccactaatgtaaaattgggttgtttttgttattatccatatgatatctagtatgtgtcatatacgaaaatggggtgtccagtcctaatttttagaatctcagaattaattaccttgaaggctccttcaccttatcgaaacatatccctttaggataggtcacaaaatgtgctgaagacgacacatttacgatccttccttcaacaccagttttgctacttgtcctcttcatgttctccagcaagagatttgttagaagaaagtggcctgtcattcaagtcaacagttagtgcactatgagcatcctctcacaacccagaaagtctcaagaattaaccaaatcactcaagcagctaatccgttaataagattgagatgcatgaagaaatgctgtgtaatttctcgtaccgatgtgatttgttgcaaattgcaattccaggccgtcaatggagcgtgtgcagttccttgtcatgattccagcattattactgtttataaccacagttaaaaatttattatttaagttgacaaaataataatactccatccggcttttaatagatgatggtgttaaattttgacatgacatttgactttgttcatcttattgaaaaaattttagtacaaatataaaaaatatgagtcaatccttaaaagttattttaaagtgtacaaagtttttcacttttcttgcttctaaggattgttttttcttctgctatactcaatgaaaagacacaatctagtgttgttttccctaaaaaaattattttgatggtaaaacaagttataacaaaataaatggtattttaaatagataaatagtcaagcgtcatgtcaaatgtaaacggcatcatctgctaaaacaaacggaggagggagtacatatagaagaagcgttcagattcttgctcttacatgagtatgttgagaggtaggttcagagcctcaaactcggtggcaaatctcctcaccgaatccatggagctgaggtccatctccagcacatggataccggcgccggggatctcagcccggatcgcctcgctggccctgtgcccggcggcgacgttgcgcacggccatgacgacgcgcacgccgcgcagcgccatgacgcgcgccgtctccagcccgatgccgctcgacgcacctgcagctcatcagcccactctgaatttttctggccaacgtcgaaaccgtgagctaaatggcatggcagcagaccagcagcagcatcatattcgtacctgtgatcaggggcggagctagtatagctaagggggtgcccaggaactggttaaaaaaaatttaactatagcttatttattttcaccatatatataccccgtcagtttcactcatatcaagctaaatttgattcaaaccagagtaaagcaagcgagtggaacccctttcattttgttctagctccgcccctgcctgtgataatagaacttcgcaccatctttgcgcgagtcgttcaaaaaaaaatcatatccgtacctgtgatgacggcgaccaagccccgagcgtcgacgccggcggtgacctcctcggcggtggaggcgccggagaagccggaggggcctttgcggttgaaccagcacatcgccgactccgtaccaagctggcgtacgtcgagctcagggaatagtggcgtactggtgtttgcaagctgagttcagcttcggcaccagatggcctgaaattatatggttagactctgacagtgagagaatgtgatgtggccacagcagtttcagcttgttactctaccaaagtactaaagatattgtttttataccataaattcccagaagacttcaataagataagaacacctcacacagccgatgagcagagcagagaagtaaagccgaggtggggtgctggttttctgttcagctacagctctgtgggtggctgggtgcaaaagaataatgctcttcagcatgctacagacgacagtatggaggaaaaactgcagccgatggcgatggagatgctgatatgcattgacaaactagaaaccgcttccaagttacaactgtagccgatggcaatggagatgctgatattgattgtcaaatcacaaaccacttccaagttccaggtgtgccaatgtcaaccggtggacaaagtatatcaaattatcattttttttcttcaaagtcatatagtagtagtatatatctggtgtcccatcatttcttgtgagtaatccaattactagaatccaaatccaaaacgaaatactagtacattctagtattgagtagatataagagcttaccgttgacgaagtggaatttcatttctgaagaaaacgggtatactaactcagaagtatgtactggcttccaaaagcatcaccctttataacaattcttcttcttcactctacatccaatcatctatttggtgatttgagttgcctaaacctttgaaacagcattataaatgacgtacccatttgtcttaggtcgcaaactttttttcttaccagaagggaagcaaagcgcactggggcattgtatcgaacacctggcgggcacggacagacaacacaacggatccggcgggtcatacgctctgaagccggagcccggcgcagcggcgcgcctcctcctccgtccgcccgatcgcctcgccgtcgacggtgccgtggacttccaagttccaacgtctcctgcaaagagccacccaccccaccaacaggttaacagatggtggtcctcgacgcgtcgaggctgagtgatagtactattttcttctctcttttcgcctgaggagttcgctgatcctacgaaccctctcttccgtcgcgagcacccttcgtcgtcgccatgggcatcgccgggaaggagagaccggagacggttctggttgtgctgccgaacggaggaaaacgccgagacgtgtgcctcgccttcttcaaacgtctcgccctcgtcttttcacttatccttatcaatcaaaatttaaatttttcaccttaaattaagagttaattttagagggtttttttatcatagtttattttctagtctttagatttagatcatttagaacacgtacgtaaaagttttatttataaattatttttatttacaaatatgatatttgacttatttcaaactatggggctgctcatctggttgggtcaaaatcttgtttgacctcggtataacagcctcgatgtcggcccatgaagtgaccggacttcctccatccaacctaaaatataaggtattttgataagatgagacatagtactatgaatttggacggtgctatattctagtattacgaatttgaacactaagagtgcgttcggtggtaagggatgggaactaatctctcccacataaaaaaggagcgattcattagcgcatgattaattaagtattagtttttttttgaaaaatggatcaatgtgattttttaaaactgtttttttaaacaactttcgtatagaaatttttttaaaaaagcacactgcttaacagtttgaattttcaaaaatacgcaccgcttaacagtttgaaaagcggtcacgcgggaaaaataaagtgggttctcaactagtcttgccaaacgcagcctaaagtatgttctgtccaatcagattatcagaatacgttatattttagaacagatggagtgcgtggtgaggtgggatgaatctccacactaactaggcaatatactccctccatcacggatactcatcggttttgacccagagtaaatgatgtataagatattattggtaaaatacaatttttatgcgaagttaggcaactcaaagtcaaaacagacttctttttttaatggagtataacagagaagattcttgggaggaactacactctctttatttgtagactttctatgaaaattttatgttcggcttacacgaaataaaatgtagcgcatgcatatatgaataactcaaactacagtttggcagccgacacaatgttggagctaaattcccatagtttcttggccaactctgcatttgaagcctgtgagcttggggtctctaaattgcagttgctgaagtacttcccacttattccagtaacttgaggatgtaatgccacataacatgtcgttgcagcaccctaaaaaataatatcacgaggttagagtcgcctagatgttccacactacaacataacaacatatataaaagacgagatttttcattttttttaaaaaaagttcacctgttctacagttttacatacgattcttccaatggtgttcaccacagctgtaatggagaagaacaattgaaaatggtataatggtataaaaggagatgcattcacaaatagcatcatgtgtttaggagatgcaacctttccacgccagacagcaaggatcaaaatgtttgggaatcatcccaaattaatattttgaagagtatgcttcttcaagtactactaatttattccaaaaatatcttcaacaattttgcattgaaaggtctagggattaccattagccatagtccagttcttgaataggttggttccaacaaaaccgggatggatcgcatttgctgaaatgttcacaccatctccctattcatacttaacggtttccaacttatgattcatagatttggctataatcatatgcaaacagagacaacatacaaaatttactcataggcatgcttagcaaataagaacactaccttcagaattcgtgcaagctcggtagagtgcaaaatgttggcaagcttggactggccgtaagcaatataagtggagaatctggtaagataaatcaagtgcacaataaatatatttatctttactaattggaggccccttaattcctcatgttaacattagaatgacaaaagctaaagttcttacattaaccaataaataaaaggaacagattaacataaaccgctggaagaaatattttcttttaactcaaggatggccgagatggccctcctgaatgtattgattcttaaatgtaaaagaagaatgattttggtcatccaattctctaatggatgacaggaaattacctccttgtgtctgtaatgtaaaacagagttatattgttaagaataatgtaaaacagagttatattgttagaatcgacatcatatctatgctccttgaaatgcaaaaatggcctagctagttagtcctaatttttagagtctcggaatttattaattacctcgaaagatcttttacactatcgaaacatatcccttcaggataggtcaaaatgtgccccgaagacgacacatttatgatccttccttcgacaccagttgtcctacttgtgctcttcatgttctccagtaaaagattcgttagaagaaaatggcctgtcattcaagtcataaaagcaatcaatccacaattaagcaatatcgagatgcacgaggaatgccatatgcaatttcgcataccaatgtgattagttgcaaaatgcaattctaggccgtcaatggagcgtatgcagtccttggacaggattccagcgttattgctgtcgtaaaagtaagtttgaatcagtatagcacaggttaaattcgctgttcgagttgacccgtgtttctgttcttacatgagtatgttgagaggtaggttcagagagtcaaactcggaggcaaacctcctcaccgaatccatggagctgaggtccatctccagcacatggactatggcgccgtggatctccgcccggatcgcctcgcgggccttgtgcccggcggcgacgttgcgcacggccatgacgacgcgcacgccgcgcagcgccaacacgcgcgtcgtctccagcccgatgccgctcgacgcgcctgcagccaggtcgtcaagttcactctgaatctctctgaccaaggttgcgagcttaattaaatggcatggcagcaacattggttgaatgattgtacctgtgacgacggcggccaagccccgggcgtcgacgccggcggtgacctcctcggcggtggaggcgccggagaagccagaggggccatttcggttgaagttgaaaaaccacatgggtggcgtcgagctctgggatatggggtttgcaacctgagtaaagttcggcatagattactccgatgatatatacatatacaggctaaatgctgttgctaaggtatggctctgacagtgatagcatgtgatgtggccaaagcaatctagtttgctactcttccaaagtactaaaagtttgatttttcttcaaaaattcgcagaataatttatttagtaagataaagacagctgacctgagaggctgagacagcagagcagacaggtactaagccgatgggtgctggttttctgctcagcagtatgtcagcgacaacctgcaaccacagtcactcgagcagagaacgcgagagagaatgaacacaagaacacgatgaactcaggtgtgttttggcgctgcgtagaaacgttccagcattttctctgttttttcttccttttattcagtacagaaagtaaaaacgtgggatcaagccgcgcgacgcgctccgtgcggactaagcgcacgtcaagctcgacatgtgcacgaccgagcaaatcgcagtcatgcactcgactggaaaacagaagagaacaagctaaaaaactgggggaggagaaactgactaacaggaaacaaatgaaagaaccaataaacgagctagcacaagttttacagctaacgagctatagcctacagatgctggctacacgatcgaagggaagcttgtagagaaaaccttctgatatcgtctcaagaagatgtttctcgtcacgctagctgcagtctggaggagcaactgcaggcgatggagacgctgatatcaatatgcatgaacaaatcacttccaagttaattccaagtgtgccaatgccaattggtgatttaagtggtttgaccatttctaacagcatcacaaatgatgccatgcaccctaagaacataggaaaacaaacattccgaagagaacaaggtactaacttctaacttctttcaaagagttctactaatattctgaagaaacaaagcgcacagtggggcattgtaccgagcacctggcgagcagggacaacgacacccgaagccggcgcgcgctgcctcctcctccgtcaacccgctcacctcgtcgtcggcgcaaccacttcctcttcttcttccaacatctcctgcaaaagatccacgcaaagggatagtagtttcttgactctcttcgcttgtggagctcgctaatcctgttgtcgccgtcatggcgtcactcattgtgtcgccgtgtcggactcgcggagaaacgattctgcatatatgggccgtatctaagagcaaacagagcatgcctcgtttgtatgggccttcattccggcccatctacgtgaatgggtcggccttctagttcagttttccgggcatatacaagtggattggcccagaactaaggcccattcaaattaggcccaaggatttgatgcacaatttagctcagtaaaactgaacaaactattgcagaactatatactagtatttattaagaccagatcttcaaatttagcatcgaatttatcataaaactaagtagcaaatttatcacaaaatggtaagtttagtgacaattttaatcacaaaactacatctccaacataacggtaaaacagagaattgaactctgcacaattctcctcaaaaatcagtagaatcagtcgttttgtgatttttctaaagataatgatcagtagttttgtgatactgtcaaatctgtagttttctaataaacgcttaaatattttgtttaagttttgtgatagcttggttaaaggatatatggttctataaaatttactgtttttaaagaaaaatctctttacaccgaacaccctcaaactcaaaagtttgtcttcaccaaacgaaacgcaagttgagctaatacatgcgtgaaattttcgagaaaaaaaagagctaatacatgcgtgaatttttcaaaagaaaaaaaaaattaagaagaagagctaatacaccaagctgcacaaacgcgagtgagaaagcagcgacgaacgatcaaacacactctaggaatccttcttcttggcgtcgtcggcgtcaatggcgccggcggcggcggtggcgtcgtcctccttgctgtcgctgccgcagtagtacctgttgaacgccttgggcaggtagaacggcagcaggaaggcgaagaggttgatcccccagtaggcgaggttcgccaccgccagcaccctccccgccaccaccctgcggcgcgccacggcgggcgcgccgccgacgccgccgccgaactggtcccgcttctccatctcctggcggagccactccgacgccgcgaacatcctccgcgcgccgtacatcaccaccacggcggcacgcacggggagggagaacctcccgggccacgccgcggcgaggccctcggtaaagatctgcgcggcgaggaggaacgcgtgcggggacgccgcggcgacgcccgccgtgtcgcccgagcggaggccgtcgaggatgtagagcgccgggagcgcggcgccgacgaggaagccgagcgcgtcgtgggccctgaggaggaagcggccgcggccgaggaagaccggcgcgcccgggttgggcttgccgggcctctgcgggaaggcgaggacggagaggacgacgaggtaagggatgacgaggagggcgaaggcgatgtcggagagtggcacggtggtggagaaggcgagcacggccgcggcgccgaacgagttgagctgcttgatggagaagaggtagtagtggtggtgaggccgcgccgtcggcgacgtcggcgtcgggtgcagcggggggagcggcgcgcccgtcgacggcagcgtgatgccgcccccgcacgtcggccctacgccgcctgacatggccgccccgcgcgcgacgagagtgatcaaagcggtggcgcgccgcgcgcccggtgcggattccttcgcgctctggctgcgacgtcgcgttggttggcttggtcggagcgggagtaaagtgagcgcgggtgatgaagcgtaaggacaacaagtgcgaggtttaaggcgacaggtgccgcgcggcgtggcgcgctctgggcgcgtcgcgctctgagcggcgccgcgtgtcgcgctttgggtttattttacgagcgtggaggaggtggcaggagctcggctcccggcgcgacgccgccgtgacgtggtggcgtccttggctgtgtttgttgtcaaacgatgggcacaaaatcaatggaaaaaaatctgacaggaaaaggtggttaaaacggtacgtgttgaggatgggtaggagaacaaggttctagacacttgtttgagaatctccattaggctgctgagttgggtgcttttgggttcaccgatagacaggcttaggcctcacattccttagcttttttttttgttagttacgacttgcttgctgctaattgaaaggtcaccaattggtttacaacacaaactgagaaggggggggggggggttggtttgtgagaagagtttacaagaagacaatatgcctgcagtctatcagggaaaaggtaattccggaaacatctcacgtctcagccctcaacacggtaagcaagcatatgcaggtttttcacttatcacagacaggtcggcagttcatccagccaatccatatgcttacagctgagtcaagaaatgcgctacattgtggttggtttcaccaaagatcagtgcttccaatttcgaagggttacacgtacacgagttgcatcagagccgtccagtacctagagcacgacgggttcaggtgtatcgccctgagaagccacttctctggggtttgcatggtttccactagctggttctgctgggaagttgctgcacttgactgcgttgccagaagatgcatctggaaatagagctcagcaggcctcaattctgcacgacgaatcggaaaaaggtaaattaaatggtgaaatttcaagaacagtgtgctttgtatgaagccatgctcagacctgggggccatgagaaccactctagacgaaggtttttctcccacttggctttggagccaaggctgccttctgcttgggccagtaagagggacacaataggtaaagaagcaagtgatttctgctgtgcctttctgaggctggaagctgcacgggctataaattgaggggccgcgaacctccaagcaatgtccatacaaattgcgcctacaagggtaatgtttcagtcagcacattgtcaaaaataaacatcaagattgttagttagaatttattccgggctagtgtagagtaaactactaagaaaaataacaataaaacatcccaatttagttagtcattatagtaaataagtagcatgccaattaccgttgagaaataagacacagctgtcaggatccccttcagcacatgcctgagcaatagctttttcagcacttgcaaagtcctcattccatactgaacactgagcgcatgctagataaaaaagagacatccatttggatgcattgctacctttcctttcaacgcatcctccgagatgtatctctatttcatcaggggtaccctccagtgaacatatagatgcaagttgcttaagtattacccagccaatttcagtatctgtacggttttgcaggcatttcatgtactcactcctagagttcaaaagattgccttgcatcacataggcccgacacagttgcaagtgtgcaaagaaagaatccacgctcgaagaagttactccaagagcttcagtagcttgagcaatacagttgccatggtcaccagattgcaaactaacctctgaagccacaagaagtaacaagtagttcccatactgaaccaccttattgtcttgtgaattgctaccactggagagaacttgcaaaatcagcctcttcaaaatggtgcagatatgtttcggatacttttcttcacgtgctttttggaaaagggtaagtacaaggaggcgacgtgcatcttggttccacggttctagatgaacccacctgcaaagaaagtcacacacttagttcttttttaagactcatgccattttatttattaatggaaggtttagaaatacaaagcatgaatggttgttacatctcctgtgggaataagcataagagcttgtttagttggatagattgttctttggaaaatatgtgcaagattgttacagtcaaaccgcaagcttaaggtcaagtcacacacaagaatattagatacatggtaaatatagtaagagaagatgtacctttgcaggcggcatattgcattgtatccgcttaggtattgatcttcacatgttggaaaagagaactttgggtaagaagtgcaggtagcatagcaagaaactgctgcacatgcttgaatttggtgtggagatcttaagcccctattggatgtatatccccgggacaatgaagtaacccttactgctttatgagaagccatccaatcttcacttgacagtagcagagatccaagttggtttctacagcatgcaacgaaggaaatatagtgcacaacatttcgattgaagccacaagtctagaacctagatattaccagtgcatgcaagatcattaccttactaaactgcagtcgggatacatgtgtagaacctttttcaggtaagacaggccaccatcaacccttaaaaacttgtctgattccccaccaatctacaaggattatttttaatctatatcagcacatttatgctctagcacattcccaaaagaagcattttttcacatagaatgccaagaattttagaaaaccatacttacagcatttccaagagcaatatttgagtggacttcactcatgacttcatacgatgtaagcctaggaggcatactcagctggggtaactgaaaacgcttgtttggctgtaaagcatctaatgcagagataataaatttcagctgtgtgctgtaattgagttgaccaggcagtttatgaatgaccgcagctgcagagtccttcccagagatgttgtatgtcaacgtgcatatgaatcctaaagctgcagttgcactctcctgcttcatactcgataagttttcagccaagtttcttgatactgaaagagcttcatcatgccgaccaagtttccataatgaaagagcatatatctgcaatccgtcatcattcagaaatcctagaaatttgagataacttgttagcctgtgtgttggatagcataagaaaataacttaaaggaatttatttgccatgcatggcaattcaggagaaaataggaaaaaaagatccttccattgctacatgaaataaaaaaaaaaccttgtcttttcaattcttcgcactcccgcactgcctcagttgcaagaccagtctacagtcaaagcaacggttaaaggataactgttccataaacatttgtaaataatgtgacagaaaatgcaaacttattgcgcataaaacatttgaagtaacatgatctttcagctgcctgatatggatttttttttgttgtcatcaaagcggatgataatactcttaccttacatagtgaccgggcaagattcacggaaatatcagcaatatgacatctgcagtctgttttggagttgcgcatcatatctaaagcaaattttgcttgtcggtacgatgcaattgcagattggaagtctgatcgcacttcagaaaccaagccatttatgttgtgcgactcagggtaatgaggtgcccgttgaacagcttgccttacagccatcaatacctaaataataggactaagtataaggggattatgtgttacagggaaaagaacaggaaacaagtgtcaaccatgtagtctggtactctaaaatatccaaaaaaactgagcaatctaaagtagcagacaatgcacggacagctagtaacacttcgcatacatgacaccataatgaagcaatatgtagctattgtggtctgggaccataacagtagcatttagcatcagcaattagaacattaatgataatagagcatgtgataattgccactaaagcacaccgctgcgggaaagaaaggacttatttcaaccatgaagtaccttctttttttaaaatgtttttgttcttttttgcaggggaggggggagtttgaaagcatacctgaggtgatagaagttcaccagaacgagcagcaattgttccaagaccaatctggaactctggaagctaatacaaaaacatcgctataatgaaatcaaaacaaacttgaaggagaaaaactaaccaaatcattaatgttatactgacaacaagtatgatacaaatgaactatcttacaggaagtatctgcacagcccgcaagcagctttcaaaacattcatttactggcccatcccttgaagatcatgccaaagcgtataatcagcttaataagaaattatctgtaacaatatatgaaatcttctatgaaattctatgggagaaatacccaggctggtggtaattttcagctgacattcctgcccatggcaaggccagtgaaggatcaatgcttcgagctcgatcaaatgcttgtcttgccaactgcttatcacctgaatgcctgtaaatctgaaggtcgaactatcacttacctctcaattaatagaagaacagtcagctgccgcataaatagtactaacaccggttatggaaacatgtcattttggatttttttttaagttaaacttaaaaaaactttaaacattatttttaatatttgtattccatgtgtgaaaatcatgtgtgtagatttacctcgaaaagtaatttcacaatattatatattttggggggtttgtcaaatgtttcgcaaccaaaattagcagccaaagatgtattcatgtcaatgactaaaacgacatgtttttgtgtccggggggagtactacctttccaaggtatgcccaagcttcagagagagacatatcaagatgcagtgctctgataaaagaatgctgttttaaagcttgattacttgacaccgagcccaatgtaacccaaaaatccttattgactggttccagtatcaacccacccaacgacattttctctggcagttccctgttgtacacagaaataaaattttatcatgtacgcttgttaagaacagatgccacatgctactaagctattaatgtggaataaaagacttaccaagttatgggatctagactattattctcctcaatggtataaatgagatcaagacatatagcagtgtcattgtgaatattagcttcccagggagtgagatgcaaagctcgttggtatgagaattttgcaccatttgcagccaacaaacatgtatttctccactcaagtacagtagtcctgaaagtaccatcatccataccccccttgatattaccatcaccccatggaaagcatcttgcaagtgcgagctgacataaagcaagaaagcttaaaattataggatactgaaatttaaatgattaattaacagtaaaatagagaatacctgagcatctccatgcagtttccaaacacaggaaaggtttccagtcaaagaagtacaaactttggcagctttgcatgcttcctagaacaaactacactgagacaatatagcaggatatgtttcaattgaaaccaagactagtgtccaaataccttcaacagactagctgcccagccaaaggccccagtcattacacactgccttgcccaagcaagcaatgcagaagcaagaccaaagtacgcggaatgattttgaggagccatctccaaggcagagcggaactgttcaacaccctggcattgcgtatttcccaacacgtataagatcatggaaattattagcggtagcagcagtaaagggctggcatagaatttgcaatggtaaattatacatagtgctgataaaattgtgtatatctagtaatataatagttccattaagtgaaaaaaattcctacctttctaaaataaccaagcattagctggatgtttccactttctatcaacgcaaagaccttggaaccatccagttcaacagctcgcccatacgactgccagcataaactgaattaagcatattcagaagcctcaatatagtatactgcagcattcactaatgatgctaaaaaaaagtaacacacctttactgctgcagtaaacatgcccaaacggtggtatgccagaccgagtgcctaataccataatatggaatattaattacatacaaatagcatgcctgacttagatttcaccagcattaacaaaataaaggaaacaaggggaaaaaatacccacttcccataaatctgcacatgttgggtaacctcgtattgcatactgaaggctctgtatagcctctgaccatttcttctgatgaacctaaatgccccataattgtcaatacttattgaaaatacatcagtgcataatttagcatgcataaacaagaaaactatgaagaaaaatctagagatgttaaccgcataactttagctttaagcaaagcacatagtctacttgttccttgctccaggaaaaaacctacattttcctaagcaagcaaaagttggagattatagctgggcaatggacattgttaatttagggtttgttttgaagaagaacggggtgttctttttcctttgggatgatacaaatcctaaggatttggatcctattctccctatcaaagcaggcctgacaggctgatatagtcacagctttgattagagataaggctccaaaactaggtattgcagagatgcgaaatgtcaagcctaaactagccatgttgtcctatagatttccacatattctctatcaactaatccaaaatgacaggaacatgccaatacgccaatactatctgctagtatgaggctaaaggacgtgaaggaaggtgaataccctggtggtcatggcgtgaaagaaactggcactggatatattaatggcatatgaatggtattacattttggtaaatcgaaaggcatgcatatggggacttaagcttggactagccctagattgggtcagaatttaattatctcaacagtgttgggacttgggatcacagtaactaatacctgtaggctttgtttgggtgtgtctgagatggtgtgattgaaaaccagtccatatggatctattccatcgaatgaagccataatattttgcaaatttgcccctttaggtggagccagagttgatcacaagtattacggacatgattacttcaatcaacaatatactcaagctgtcaagcaactccaaccaaggatagatagatacctgtaagtaccccaacctccggaacgcccaaaatgcccggggtgacttgccagctgcctccttgcacaaagcgatctccaagctttccttgccctccaaatctagcaaatcacagaccgcctcctgcaccaaaccacacaaacagcatatcataccaaaacaccctcacaggcaaaagaacaaacaccttcgaggcacacgctcatatgcattccaacccaccccagcctcggcatcatcagggttgagcgtcgccgcccgctgatagcacttggccgctcgctgcgcgtcgccggcaagcgcataatggtggccgaggaagcggaaggggacgccgtcgttggggtccagcttggccgccgcgaggaagcgctcggccgccgccgcacggagccgcctcacctcctcctcctcctcgccctcctccctcgccgccgcctccgcgcggtcccataggaagacgccctgcacgcacacgactaccgcgtgataagcccgcaatggaggagcgagagccgcagccacggcgaggattcgtgcaacgggatgacgaaggttacgaggttgtagtggtggagcgggctggatggctcgccggcgagggtttgctccagctgcttgcggaggttggcctccgccgcctgaagaggagaaaaccaaaaagggtgagcgccagaggaagtgaggagagagatggagaagtgagagatggacagagtgggataccttttcaggcatatcgccggcgaggtcgggcgaccgccggcggcggcggcggcggcgacgacggcggcgtggtggaagtgggggggatgaagtgtggggaaaggaaacgaagcggcagggaggttttgcgatttagcccttccaattccaggtagagcagattggatcgaccctaccactacatgtggtgggacccacatgtcagtctgttaaaccctttatgttcctccatgaacgcgattaaaagaaaattgctacacatacgacctaactgtacgtgaactgtccgactcacgtacgatcaaattcattcatacatgagtcggacagctgagtcgtatgcatagcaattttggtagcatgtgtttagttgtacaaatgggtcatatctatagcaatactcaattcagaaacaaataaaagttgatagagaaaaatcatttctgctgtatcttgaaatagttcgtttttttctgtttaactaatgaaatgggtatgatacatgatttcatcattccattatcagaaatccagaaggaaagatgaacatgaactcagtatatccattaagatctcatttagaatgctggaatttaacacacagttttgtaggatttccacatgaattagttcaaagaagacccaacccttaattttcaaaaactcaggtaaaatgaaaagaattggttcctaagttttaacttaggtttacagctcaactgaaaaaagaaaaacactattctaacactacctccttagtttcttactggcacagaaacgatctattacagtcgaagcacagatgaaactcaatacaggccactaatgctgctgttcatatagtgcaaatgacttgttcatgttgttctgcttgagatattcttgaatggccgaacgcagtgcgatattggggatagtgtcacagttagcaagtgtttggttagtcactggagacctgtcatgtcccttatccagccaatctcttatagcatcagcttcataggtgaagccatccgctgccatctgaggatctctcatggtcacctgaagatatgcaattgcagtaaatcgttattagagtttcagacgagaagcaatgctggaagcatcggtaacagtttctaacgaaacaacggcagcaacttataaattctactccctccatcctagaatttagctacctttagcttatgaatttgtaagctaaaagtagctatattttgggacagagggagtacctttctaacttgtagtacctgagagattgggcaaaggaagtaggacggggtggcagtttcaatggcactacagatagatcgaaaagactgggacaatggcgaatgagcttccttcttcataggttcaatcacctcccacacatcatgctcaagatcagggcgcctctgcttgctgagctctgtgcactgcagcgcaatgtgtgcgagctgctccacatgcaccaatggccagtcacctgcagaatggtccaacactgactgcaggtcatagtcgttcagcgcctcccgcactgtcctaatcaggcgtagaggtgcccgtccggtcaagagacgcatgatggtaacaccaaaagagtaagtatcagactgtggcgtcagctcccctgtggcgaagaactctgggtccatgtatgccggtgttcccataggcctggaggtgtagtgtgcgtcgcttccagtgacactggactccagaaggaggcgtgaaatcccaaaatcactgagtttgctctgcaaattcgcatcaagaaggatgttgcctggcttgaggtccccatgcaccactgggtgaggccggtgcttgtgaaggaagataagtgcagagcaaatctccgtgatgatctggatgcgcacttgccaagtgagtggcggggtgttgtcaacacagttgagtcggtcctccaggcttccatttggtaagagctcataaacaagcgctgaagcttcagtgcaggctccaataagggtgactaagtttggatgccttactctactgagtatagcaacctgtgaaaacaaattggaacggcagaatgcattagcttaacttttaataatgattagcttatcttagttccgttttttcaatgcaatattatacaaatggatgataggcctttgaatagtacctcttgatggaactgagattggccatgcaagctgtcagtactaagcatctttatagctactgtcgtattgcgcagagaacctttgtatacagatccaaatccaccttgaccgatgttaagtgcattgctgaaattctgagttgcctgctccaactccatcaaggagaactcagagcttattgctccataggcacaagaattcgtcagctccttctctatacgcatgctccttgcctctttaactgcatcatctcgctctcgcttcattttactgtactctaacttcagtgactggacacgagattccgtaaccttcatgctctcttctagataagtggcaactgagtctgactctgagatgcggtgttcaaggaggtgcttctgttggtttagatcttgtaatctattggctttctcattcaactgatatttgagccagtccaggtcattttggagcaccatagtggcatgtttgagagattctgactcttccttttcttgtgagagttttgcctctgtctctttccttagttccatttcattaatatacatgcatcccaatcttttagcctgcaaatgcaatcagcgattgttaacagaaaatactgtaaaagtttggatattatataatacggcataccaagcgcaaaggatctgaaacacagagtaaaactattttaacttcttcctgctgagccaagactaccttgtttcattttgtttcgagtttattatagcatttccacattcctaacttcagaacagttttagagacctcttggtatctctgaagtacatgcttaatggtcttcctgtgtgaacatctactaagccgcgctagaaaagctcatgttaattgtagtacaaagtggtatttacctctatattaggctcaagcaaactttgaagatccaccttgcaactgtctacagaagaaggtaggcgtgctgattttgacctttttacagggcaacaactggcctccctaggcgaaaagaaacagagacgtttagtggaagaaaaattcaaagtagtgaaaaattaagaattatttaggcttcaataaacttgtgataatcattctcttatggaaaaataacagatactttacatgacaaaatgcagatagttataagataaggcatgtcgaattgtagatcagctaaatatggtacaaactcgaccataacctagactgtcctaataacatatacaggacaaagtattcgcaaagaaagaatatacaaggcaaaaataaatgtacacatgtttttttctcagttctactcattctaaatatgtgaagttctgccagaatttatctgctgcaataggcttgtgatctttgattctggaaaactattcgtccttcagttacatacagcatgcttggtaaacagtcaagattgtgatcccttctgttatttgtccaattaataccgattcggtgccttggagtttcaaaactgaagtatcaatcatatggctgcctataggccctatactgaaagatttacatgtgattattttaagctgcatattgtactgttatgttgagattccttgctgtgaaataatgccaaaactggggcttaagataaatacaataaaataaagtcagatttatataagagtcccatttggtagttgaagccctacctgacacatgttagcttcccgttgcaaataaaccatatattgcagtatgaatgtgctctttgcatcacacttattgctgtttgtgattgtggtgctttcatttttctgggcaacaaaaatagtcatatttttgtcacaatcaataagaactgataacgtgaaactgtaccacgattgttagaactcagagaaagagaagagagagaaaccttttgtagtgtctgtctgatgcagcacccataacaagtttagtgaccccatatatttctatcagatgaagaagtccttcgtcaattttggtaaaaaagaacacttctttctcagctttaacctggtcaaggaagaataagaaatttgccctctgatgaagtaaatattactttttgcattaattttccccctaaactttctttacaaaatatgttaacttattgcaatcgattttttgttttcaacatcatggataaaatagatagaacagaattgcagaacatgcatccatagatagtcaaacaagttgacttcaatatgtaaacctcagtgattcatatgattcagcatacaagtggcagaaagccttgatgccctgttaatctcgatcagtttaaaacaaaattttggattattacctaaccagggtttgaaatatggattttttacagttttgtcacataaaaaaatggaaccagagggttcattatagtattcagaaaaaaaaaatcaatgcaaaaatagatatggtgaaagcttcagcaaaaataaaataaaataaaataaaatagaaaatccccctagttcttccaaaacttgcttctacccaaaacaagataccctgtataaatttcctacgaatggtctttatggaagagatgtccccaaccttcattagcacggagtggatttttgtacctttgtaaaataattctacttcaataccaactgtttttgtttagacgaaaaaaaatacctggacgtggctttggttgtgcaatgataatactactataagaactatcttcagttataatatatgaacaatcagtatttggacatatcaagtaaaaaaataaccattttcactcttgcttggtgttactttttttttccttatgttctataattagttatttactcatagaagtctttgtggggagagtgaataaaaatattttttacatgaacttttcagaaaacaaaataaaatatcattatcttgcaccttttttcttgagcactggtccagatagttgtccacattttgcatccggctttcttcagcaaaaaaggaatcaactaagacaatagaactttgctaaggattatgcaaccgaaaacacaatagaaacaagaagtaatggttagaggaaataaaccagaatatggcagaaagccagaagctaaagattatggtacaaacatcataagatagctatatgactatatcacctcctttattgacatcgagaaaaataactttagataaagccactgcacataactaaccaaagttcgatgtagtaattatgtggatgatgatgatctccgtgctactggatgcatgatcgataacccaagacagtatggacttgccatcggtgggttgctcagggagagcaacataaaccttgtctctaaacagagttttctgcctgagcatcatactcatgcatgcaactggtaaggccttgaagatggaactaagagatacttctatctaccagtttgcgtttcccactttggacaactaaaagagggaacacactgcgtattagcattaaagaataagattccagtttaaccaggtaaaaaggttgactcttgactgagactatcggaagacaacgcaacactcaactaccaagtcgcagtgaatggattatctgaggaaagtcatttggtacgctgtcatgccatgccagtacaacacggcaaaatttgctgggaacagggacatgttatgaattaatgtaagactctacctttctcacatccttcacccccattgctcaccacaaattccctgcctttcatttctaataaaaaaaagatgtagtgcatcgattgtgtgccagtgatagagccatcagtctatctggtgatctaatctaaagatctcggcctcatatttcagttactccatatgaacgggagaaacaacctacgggtagtgacgattcagcaataatagcatatgaaatttgaggcgaacaaaattgacaacaagcaaacatctcatcatcaccagtactgcatatgaaattaaatcatcgtggtacagtcaaatcacctttgacgattgactagaaatggcgaacaccgaataaatacatcgcggcggcggcggaatcgcgcagggagacggcaacatcggcgcgcggcgaggcgggagttgggggaagccgtcgccggctcacaggatcccaccggggtcgcccgcctcgccgtcggcgagggggaagccaccgccgctccggcgagcggcgaggcccatatttatccctcgagaaaaaccctcgcctcgcgtcccagcccaagttttaacgtgcggcccagtaagaagatacagcacgagacggcccattttaaagtgggccgcgaatctgcggcccacgaggaatttttttttttttgacgctactggtttgggagtttgacactgtgacgagtagaggtcaagttggtggggaatctaggcggcggaggcggtggagcgtgtcggggagaagccgccggcggcgaggggagatggaggcgacggtggacgagctgagcgaggcgtaccaggagttcgtggcggcggcggcggcggtggtggaggcgcgggggcagtcggggggagagaagaacgcggccacggacgcggcgctcgaggcgttcaagcagcggtgggagctcttccgcgtcgcctgcgaccacgcggaggagctcgtcgagtcgatccgccagcgaatcggttccgagtgcctcgtcgacgaggccaccggcgcctcctcctcctcctccgcggcgctggccgcccccggcatcaagcccatcagcgccgtccgcctcgagcagatgagcaaggccgtccgctggctcgtcatcgagctccagcacggcgccggaggtgcctccgccgcgggtcccggcggcgggggcggcgccgcggctgcggcttccggcgttgcggggcagcacggccacggcggggtcgacacgcgcttccccgaggacggcgcccagtaggtatttattttgctcaattatcttgtactagtagtattttcttccaaagaaaacaaattactggtggtatctctgtgtaatcgtctaagaattgaagcattagagcttgtgatcgatattctaaaaaaaattgagcttgtgattttctcagcattgttactttatgcctactgatgttaaaatttgggagaaattaaccgttttcttagtgtcgtggccagatcacgcttagtaactgatttaattttgtcctattgcttttgttaagtgactaattgtgtaacggacttccttccagtaggttttagttctgatttgtagctcgctcacataatgttcgtgcatcgtactaaggtaaggtagtaaacctgaggtcccaggaaaaaatgaacaatttcatatatactactcaactagcatataactgtataagttccttcaactttcaagtacctactctggatgttttgctaatcttgcgtccgccacaatgtgaatgcttttccttctgattttttaatgaacaacattttattgaagaataactaagcagccacaaaaggcacaatttgtgataataaactctgggagattgctcatggtttgtgaaacccagttatactggaaagtgatattggttattagctactagtttcctcatataattctctatcgtacatttttgcgcctttagaattagctgccaattttggccaaacaattcaatgtttgtagcatatgctcttcttttattgtcgatatcatagtagtaattcactgctctataccaaaattgctctgagcactcatactctatcacaagcattagcagcaaagtttcctcaaatggaatatgaagagatgtaaggagataacaagaaattttggaaatgatcaactgaagctgctgcattaattcacctcaatctgtgagaaaatggtgtttccttatgcatgattttgtaaggcgcaacgatccaaacacgagcagctctacacacctgaagctgactgtatcagagatggatttgatccatcatcatagcctcataggacatagcatcagaaatataaatgactataataccatattgtgttattatgagctaaatgagctgctcactgatagaaacagcagttattttaggtccactttgatcagtagttcacaggaaatggtcctattgaatgggtgattttctagtagcaattagcaaatcactctgtcttgtagagcatgctgagctagaccagcttttcctggcaagacaactaaacactagcttcaatttagctaaaccagttgtttactgagctaaacatagcaaaaacatagcaggctagaagccaggaaaaactgagaaaggaactatctatctgaaaaagcatctttcatgttttcttaagagaatctgatagtaataggggaggacaagataggagtcagtttttctttcttcttctctgaacttctctcaagcgagtttggttaagaggtctgttgatggccgctacacggaggaaaattctccaagcatggtttgaagtttcccaaaatgcatgacagcatcccgtggccaagcatctacccccaaagcatgttattgtccatttaacattcaacatctactgatcattccaaggtacggacaaaagaaaagaaattgagcacaaaaacaggaaacagtaaacacagcatatccatatgatcacttttcttcagaactagccgaattcatacagatttttcttcagaactagtcaaattcatactgacttttattcagaactagccaaattcataccgacttttgttcagtgcaaaagatgagtgtagttttcagatctttatgtcgcgagtttgtcagcctctttctgaagaagtttaaatgcaggcatagcattattcgcttgggttacaacacgtaaaatggtagtaagaggcaaatgtgtatcctccattccgttgcgaagtgcgatggccatccaaaactcagagatcagtcgaacaacgttctgtgcaggcaaaaaatgttagagaatttttcatgaaaaacgatcttgatgggccggcttttctgtccgagcacgtattttcggcccggaacgtgacagcgagcaaaatgcggcccataattagctgggccagaacgggggtgcggcccattataggtagcaggagcacgatggaataagttcatctgaggtcccttaactttacaccgaatccgattttcgtccctcgatcggaaaaccagacacaacaggtccctcaactattaaaaccggtgcagattaggtccctcggcggttctgagagcggttttggctgacgtggcgcctacgtgactaatttgactccaccaccgagctcgtcagcgaccgcccaccggagcgaggaggacgacagccggcgatgggtgaagaggacgaaggcggtggtctggagcagaggtcggaggagggcccccagccaccatgatggtgctcgatccgtcgcgtttcaccaccaccgagctcgtcagcggcagcccaccggagcgaggagcttccgcttccccttccccccattgacgccgccgccaccgtagctgcggcgccgctccccatgccaccgcttctgtggtgcacgccggatgcggacggggaagccatggccgtggccgcggacgacgtcgacgtcgacctcggcatcctcggcgactcctagggcccctgtgccgccgccactaccgaggggagcagcgcacggcggacgtcctcctcctccagctgccaccgccacgcctccccgcatggctgcatctcctcctcctcctccggcggccatcgctgcacgccgccctttctccctgccggccaccgcccttctcctgcccgccactactggatctcaattgccggcgctgctccggggggacctgccgccgcccgtgtcgatctgttctgcccatcgccgtcgctgatccccttttatcgccccagcttcctcctccagctcgctactctcgccggcggacgccggtctcgccgccccctccagctcgccactctcgctggaagaggagaggagaggggagaaagatgaagagagggagatggggagagaggaggaagaagaggaagggtgagtttgactgacatgtggggcccacgtgggtcccacaattttttattatcttctatgtgagactgacatgtgggtccctaggtttttattatttttccgggtcgaattgacacgtaaagcgccacgtcaatgccacgttggacgaagaccgagtcaaattagccacctaggcgccacgtcagccaaaaccgccctcaaaaccaccgagggacctgatctgcaccggttttgatagttgagggacccgttgtgtctggttttccgatcgagggacgaaaatcggattcggtgtaaagttaagggacctcagatgaacttattccggagcatgattgggaagggaggacataaggcccatgtcgcatgtgtttggacggtccagatctccagatcactcagcaggatcggccgcgttcgcgtagcacccgcggtttgattcggcttcccgcaaggcggcggccggtggccgtgccgccgtagcttccgccggaagcgagcacgccgccgccgccgacccggctctgcgtttgcaccgccttgcacgcgatacatcgggatagatagctactactctctccgtttcacaatgtaaatcattctactattttccacattcatattgatgttaatgaatatagacatatatatctatttagattcattaacatcaatatgaatgtaggaaatgctagaatgacttacattgtgaattgtgaaatggacgaagtacctacgatggatggatgcaggatcatgaaagaattaatgcaagatcgtatctgccgcatgcaaaatcttactaattgcgctgcatatatgcatgacagcctgcatgcgggcgtgtaagcgtgttcatccattaggaagtaaccttgtcattacttataccagtactacatactatatagtattgatttcatgagcaaatctacaaaactggaaagcaataagaaatacgggactggaaaagactcaacattaatcaccaaatatttcgccttctccagcagaatatatatctctccatcttgatcactgtacacactgacagtgtacgcataaacgcagcagccagcttaactgtcgtctcaccgtcgcacactggccttccatctcaggctagctttctcagccacccatcgtacatgtcaactcggcgcgcgcacaggcacaaattacgtacaaaacgcatgaccaaatcaaaaccaccggagaagaatcgctcccgcgcgcggcggcggcgcgcacgtacgaacgcacgcacgcacgcccaaccccacgacacgatcgcgcgcgacgccggcgacaccggccgtccacccgcgccctcacctcgccgactataaatacgtaggcatctgcttgatcttgtcatccatctcaccaccaaaaaaaaaaggaaaaaaaaacaaaacacaccaagccaaataaaagcgacaatgggatcgctcaccaccaacatcgtcctcgccgtcgccgtggtggcagcgctggtcggcggcgggtcgtgcggcccgcccaaggtgccacccggcccgaacatcacgaccaactacaacgccccgtggctccccgccagggccacctggtacggccagccctacggctccggctccaccgacaatggtaatgttactatcttatcgtgtaatgttattctctccgcctcaaaatattagttccgccgacaacggtaaagttactatcttatcgtgtaatgttactatctcctcttcaaaatattagtttactggctcatcatgtagtgttactatctttgtctcaagatagtacgatagaataacgaatctgaacagtgtctaaatccatggcgatggagtaactgtgaagctcatccatgatctatggcgatcgatcgattaattggttgagttttgtttttttccaggtggcgcgtgcgggatcaagaacgtcaacctgcctccctacaacggcatgatctcctgcggcaacgtcccaatcttcaaggacggcaggggatgcggctcatgctacgaggtaacctcaccaattaattaacacaacctcatcgtctcgtactctcccaatcattgtcccgaggacatgcattcgtacatctccttcgaaacaaaggaatttcattttagaatttcataagggttaatttagaactatagtgattatataatgaaaatatatccagtaaaactcttgtgtttcaaattaaggcggcctgatcttatcaacaagtcaatgtttaatacattgctatttcacaaacatttttggcagtttatatttcacaaacattcaatgcaatatatatatggaattttgctaaattaatggacatcgatttacgttaggtacattttgatttgggcattaatttggccgagtacattttgagtacaggtgaagtgtgagcagccggcggcgtgctcgaagcagccggtgacggtgttcatcacggacatgaactacgagcccatctcggcgtaccacttcgacttctccggcaaggcgttcggcgccatggcttgcccggggaaggagaccgagctccgcaaggccggcatcatcgacatgcagttcaggagggtgcgctgcaagtaccccggcggccagaaggtcaccttccacgtcgagaagggctccaaccccaactacctcgccgtgctcgtcaagttcgtcgccgacgacggtgacgtcatccagatggacctccaggaggccggattgccagcgtggaggcccatgaagctgtcgtggggcgccatctggaggatggacaccgccacgccactcaaggcacccttctccattcgcgtcaccaccgagtccggcaagagcctcatcgccaaagacgtcatcccggtcaactggatgccagacgccatctacgtatcaaacgtccagttctattgagatcggacggaaacgatcctcctaatttatttccctattaatttgttcaaatggtttccttctataacctatatttttcccgttgttagaaatggttccatttcctcctacagcttactttaagatagttgcgcttgtatatctgcgccatcttgtaagttgtaagatgctgaagaacactatgaattctgagcatctgattctccgggaagatttactatgataaacaacagtttgatttactatgtgtgtccccttgtttattgtatgctatcctaatacttatgaaaagttttgataaatatgtgtcactttgcgaaaactcaaattcaatacatacaagttgaaaaaaatattatacggtaatatttgttcctataatattacacgtacgctaagagaagacggacatggattttctactcctagctaggtggaatcgcacctatgcaaacgtttgcatgtcatctaaatagtcgtgcatttttttttaaaaaaaggtttagattgatgtgatgctagaagtatatatacatgtatagttaaatatgatctcctttgagaaacaaaaataacaaaatttgaacaaaaaaatacaaacacaacttgttatttttatttacttgaagatcgaatttgtagttgcatgtttgtgtaccaaattatattatcacaatatatcttgctaattttattttatatttttatttaactatttataccacatgcataccctagatgcacttgctaaaaatattctcactaggagacggggaagtatccggtgcaatcacccaattcggtgcaactatgcatctctcgtcctacaccgttggattgagaaatgggcgtccgagattcgtccacgtc

SEQ ID NO: 7408 - DNA, 70472 bp, Oryza sativa
ggatcccccgttttttacagatggccgacgtcgaccgccgcttgccggtgcggcctgacttcccgcgcccctgccgccgtagccccttcctctcccgcagcgcgcttgcccaccgtcggccggccgctccggccctcgccgtcacccgcttcgcccaccggccaccgcttgcccggtcctccggtaggccggtgcggctgccacatcgccggtcgccggccaccggccactgaacctcttcctctcctgcctcgcctcgttggcttcctccccaacccgccggtcggcctgtccacctagacgaggagaaaactgagagagaagaggcgacgggcagagtggcggcctcgctggcgcgtgcctccactctcgcccacgccttcttcttcggcttccacttttgggtcggtgccggcctctcatcccgcgtggcggccatcggtgcctctccgccactgtcgcctccgccctctccgccacacggctcgctcgcccgccaccacctctctgccacgacgctggcccgctaccttccccttctctcgtgtctcagccaccgccgcatcgttggccggccgtcaaacctctcgccctggcgaccccctccccaccgccggccagcatgccgacgacgtggcatcctaacatgttgagaggaaaggtagggagaggctggcttgccaacgtggcatcctgacatgtgggtcccacgctgactcagccgccacgtcagataaaaccggggtcaaaatcgccgagggacctagtttgcactggttttgtaagttgggggatgcgttgtattcggttttgtgattggggggcgattttttaacctgatgagggaccttcggtgtactttttcctaagttgggcgggggaagaaatccaaacggtccaattaaaagagcgaagtaaaattccaaattaattcgaagaatcggcgtcaccaaatcaatctcgcccttggttaatcttgtacgattgttgtgaaaatcttaacatcaaattaagagattgatttaatcaaacattacaccaaattaaccgatacacgtttcagcatgtacgtaggagttaggataggagaaaatcaccagcaattaagccattaattaacaatgaccggaaaagggagcgcgtgatctacctaccaataattccaattcctaagccaagaaactaactaactaacgtacgtgctcactgccattgtcgtcatcgataatcgtcggttgcaatatcctcttttccgttgccatttcgctttccaagcctccaacttttatgctgttcatgagcatgacagcgtgcatacatggcattacagaatctacagatgcacaggctagctgctctgctgagataggcgcaggcgcagcgcaatccaaagcagctgacgccttttgcatcctgccttctttgtaggcttcgtcctcctacctctgccatggctcagcgacactggccatggcggctcgccgtgttcgtcgccgccgtcgtgacgccggtggctgccgaggagaggctggtggtgggcatgactctcctccaagctgccacatcgacaggagcaggcgaggaattcttcttgttcttcttcttcttgttgttcttcttcttcttcttctctgtgtgcgatttcttagtgttcgatcgattgcattgcaccgccgcgaatcgctggcgaggtcaacgagaaaggaaatggagattcatttaccaatttaccatgcaattggaaaattccttaattagttgaccttgctaggcacacacgtacacatcgtttgcattcttgatcgtgcgcgttgtttcaatcgatctttgcagtgtgcctcgacgggagcccgccggcgtaccacctccaccggggctctggcggcggcgccggcggctgggtgctccagttcgagggcggcgggtggtgcaacgacgcgccgtcgtgcgcggaaagggccggcacgcggcgaggctccacgcgctccatggacagcctcgaggtgttctccggcctcctcagcaacgatccggacatgaatccaggtgcgaagtgtacggccaatataaatttccaagttaagtcactgtgtttctttctcaaacaacaacaagtagcattgcgcaaaagaagaaaaaaaccattgatttatactcccttcagattagtaatcttaaaaacaaattttatcacacattttatatgataatatctatgctatttaaaatgatattagtggttgtgtccgagtctgcctccaatatcatctgatatgtggggtcataagtataaaatcatcaactcgtgaatggtattggaattgctaattgtaggaattttaaagggttacatacacaaccttcaaatttacctttcaccctctttatctaaaaaaatttacctttcacccatagatgagttataagcgttcaattttgtatatccgaccaaatggcttgtgaaaatagacgaagaggataaaaaaaaaagaagatcatctagcaacatattttagttttgactttggatatgacattatatgtctaatcgagtgactatgctataaccttataatttttttctttgcttttatcacttataatatccactataacacacgggtctttagctagtatacagaaatatcaagaaatatatgattttatcgaagtatttcttttttaaaactggtctatacatattatgatctccatatttcaaaataatattttagaaattatttctagttaaatattttaaagattaatagcggtctttttttaaaagattaatagcggtaacaataaatattatgaatgcggaggtagtagctcgtaatgagatgcctttttcttcaaataacttcgtacatttaccagttcatacggcaagttgttagcaacaacagacgtttccgttcttggtggtacgtgagtttgcttttgcaaaaggtgacagcgagcaagtacagtcacaatcgggtaggtaccatgaagggatgaacagctcatggtcaagaatagttagtgccgggatggaatgatagattcactatgcaaaatgtggaatcgtgcagtagtacatttactagtctagactctagagtcggcacatcgacatcaggctagtgtaaattcaggttcatcaacctacaacacaacttattaggtttctcgagttttagcctttcaggttgttgttttagaggattcataatgtatatttgcttgtttggtgatgattcaatcgttcgactagtaatttcagactatctaagtgactaattaagttggcgttcctaatctgctatatcacttttttattctaactttgattactttgatgcagacatgcagattttatacagtacttttgttttctactttctccatttcatatcataagactttctaacattgcccacattcatatagatattaatgaatctaggcacacatatatatccacatattcatgaatgtgagtaatgctagaaagtcttataacctaaaatgaagatgatatttgttcttcttttaccgttcaattattctatttatcatttaaacaaaaatgtagggattttaacatagtgtttgtcgtcaatttggcagatttttacaactggaatcgtgtcaagctgaggtactgcgatggtggctccttcgccggtgattcagaactcagaaatggcgtacgcttccctgtttccctgactgaaacaaaacatgtcttcaattgaattgcttgtgtttttttttcttctgcattgttcagtactcaactcactgttttgtgttttaccactttgcagtcttcagtcctctacttcagaggtcagaggatatgggacgctatcatcagtgatctccttccaaaaggccttgcaaaagcccaaaaggttcattggttctcctgaaaacagtttgttccatttcagtattttctgcacaaactcattttacaattttcatcgcgattaacttaagctggaatccaattctttgatgccaatgtaagcttttcaacactaacaataacttactagctactccgagaatcctaaacggcatcataattcataactcactcattcttcaggcttcagagcttgccctgttgcctttgttcttaacaagttctgaatttttcaggtattgctctcaggctgttcagcaggaggcctagctacattcttccactgcgacgacctcaaaggacgtctcggagatgctgtcactgtgaaatgcttgagtgacgcaggatttttccttgatgtgtaacagtggagtctaatcaagcaaaaaaaaattactttggttgactgattcttgaactcattgggttgaaacacaaaaatttactttggttggtgtcctgcagggatgacattactggcaacaacactgttgagcctttctttaggagcctagtagctttgcaggtaaccgactagttaagcgtgtttctgcacattggatttcacattatttggtagtgttttaatttttaaagccatgagtttttcacgcagggagctgagaagaatttgaacaaagactgtttaagttcaacagactatccataccaggtagtatcaattaagatttttttttatcttccctttcaaagtactgaatttcattgttcaaaagttacaactttttataatcttcttgtctcacttctctgcgcagtgcttctttccgcaatatatacttccatacatcagaaccccttacttcattttgaattcagcttacgacgtatatcaggtaaaaaaatgacatggcgcaacttgatgttttttagcatatggttatacaactcgcaagcaaaaacgcatgatttttaccttttttgaacagttccatcacaattttgtgcatccttcatgtgatcctaaaggccaatggagccactgtaagtcggatcctggtgcatgcagtacatcccaaattgcgactctccaaggttacctttttttttctctttcttggtagagctaaatactaatctgtgcaattttcatataaacaataggtgcaagtctattgctcttacgaaattcacactaaagattattcagatttagattccattgaacaggcatatgtgagatttctggattcaagttgttgtcttcgtgacattcttcagagttctgaatctgtctgcaggactcaggaatgcaatgttgacggctctgaagccgttccaaaatgaacagggtgtagggatgttcataaattcttgttttgcacattgccagagtgagctgcaggaaacatggttagcaccaaattcgcccaggttgcataacaaggtactggcaatctacatgaaaatgttgtgtatatgcggtgtatttgcaggcagacatagatgatatctggtttgtttcagacaattgcagagctggttggtgaatggtactttgagagagggcctggcatagaaatcgattgcgcatatccttgcgactcaacttgtcacaatattataccttctaatcaggtttgttccattctagaggagtttttttttttaacacaaaaatacagcattgtatcatgtaccatatccaaataactgtttgcttgcaattcaaacaaaatgaatgaaactgacaaaaaatgcttggtgactaggaattggggatttaggagtttggcaggggagcatccatgcccaactgtgatcaaaataacaaagatttcatttagtttggtgaataaactgaaggatgaacactgttacaatgtaagtacacttctctgcagaacaaaaagacatcttaattggataggatcatcggacagaaggttagcattaatacaattcatatctactgatccattaaagtaaatgcaagaaaaaatccaaaacaaaaataaagtaaaatgtatggactacttgatcttagcctgatagaaattgggtgttcagttgagattgctgtacgttgctgtggatgttgctgcagctgcaaccacaataactactagtttatatcaagctatactaggctactgcagccctgtgactgtgcagcactgcagccacagccacagccacagggaaccgaacatcccaaatgaatatgcagacacagttaatcctgattcctgaatgaaccaaatttcagtccaaacaattcgacatcttgcactctgcatttctgcaactaaagactgcacccatgttttatgagttccaacatcacttgattcatgttactaaatatgcatctgtttatgcagaatggagactcaggcatccacaatggaggtccctgcatgaacattcctcccaaattctacagcatcagcctacagatgattctttacctgtctatattgcacattgcagaacaattcataatttcatacgacatttgattgaacagtaaaacagagccaatgctcttgtaaccactgatgttctgacacttctgttttcctctcactgatacatgaagaaactattaagtctataacctcagcagagttaacaaaaaaagcgagagaatatgcattgcagaagcagattaacatgctacaacagtatcaaaagctctacacaattgattagcacttgagatcacaattgcagaagcaggactcatatatgacactgaactgtaaactctgtaagaggctaaagagctaaaccatgcacatctgagtcatgatgctatcactatctttaccctgatttgcttgagctgcttgacaatacatgaagagaaaaaatcgaagcttttcaccttgcgtcctcatccggatcaactgctgggaagaaccagaacgagtcgccgtcggcggggaactcgccatggcggtgcggcaccgtcttcttcagcaccagcagatcacccggcgccgcgcccaccctcgactccgaccagaaccacgcctggccacgggcggcgacgtccacgtcgggcagcgtcgacggctggtgcgcgaacaggacggtccccggggcgcggccggccgcggaggaaggcgggacggccgccgagcacccgcggccgagcagcagcacgcgctcgccggggcaggcggcgatcggcagccacgccctcgcgtcccagttgagcttgtagagcgcgacgcggttgtggcgctcgtccgagagcacgaggaggacgtggccgagcgactccacgaggtagtgccgcctcagctcgagcgacgggagcgcgaaccccgtgtccctgcgctgcaccttggggttctcgtccgcgagatcggcgcgccacagccgcctccgctcgtcgacgaggtacaccgtggcgccgacggcgacgacgtcgctgagggccgcgtggtggcggaaccccggcgcgcgcagcgtctcccacccctggaagtcggcgccggggcggcagaaggcgaggagcctgtccgcgaccaccccgaggaagcaccccgcctcgccggcggcgggagacgcgtgaggacggcgtggaacagtgcgttccacctggcgattgtttaagaaacgatcctctggtcgccggtgatggggttgaaaagcatcacgcggcgcggcgcgtccacggcgaccatgacgacccacccgtgccccgtggcgacgcaccggtgcatgtccctcgagggcacccggtacccgtacgaccgcccgccgggcacgtcgtagaacacgcggcgcgccaccgcccccgcccccgggggcgactcccgctcggggagcatcagccaggggaagggcggcggggcgtggccgacgcggcggcagtagaggcgccacgcgcggtcgacgaggcggagcctgaggtagtcggcgaaggcgaggaagggggcgaccgcggcgaggatggccccgcggcgcctagggtttcgtgggttgcgcgccgccgccatcgccgcctccgccgcgcgccgccgcggcgcgagcgaccgacgcatgcagcccacgcgacgcgacccgacccgacccgaccgaacgggttcgactcagccgcgtgctctctctctctctctctctctccgcgtctcctcgtgcgcagcgcacgcacacggccacacgcctagcctttgtatgatcccgcgacgccacgcccctctcctatatacccccctccgtcccgtattattgtcattttagattgtttagcacgtattaaagttaaaaaaaatataatagtaccctttattatttaataaaatatattgttgtatatggaatgatggttgagggtagaaaagagacaaatttaaattagaagtgattgatgggataagtagtactctattgtgaaaactattttaaatcccaaaaagacaactaatttggaacggatggagtatatttatatgaataaaaatgtgaaatggggaatttccagaaaagcaaacttgaaatctaaaattggatacaaatgaaatggtttttatttcagtatagtgaataatattgagggagtctataaataaataaataattaaagagctttcaagagaagtggattaattatttaatgttagtctatatggttattcaacaggtggtgatcaattagtcattcccacattcttcatgtttttcttcaatcacaggaacatgttgagcttgaataccaatgcataaaaaacacgggtaaatttatcatgaaaaaaatcattgtacaatattattttttttaaagaaaaatcgtgctacgagagaaagccatagtccaggatgtaccatatctctaagaccgcgtcactactcactacccaaaacaacatattttctttatataaaagaaatatgtcttatgtgcttgcgtaagctctattgtttgctctttggcttagcagcggcaaccaaaaaatattttttaaaagttgattttgatgtttttatcgtatttatttgtcagcattggtttttaagcaagtaaaaatacatataggaaattttatgtatattttttcgctaataaccgttatgattagatgtaggcaaaacgatgggactgccaatcgcttgatcaagtatcttgtaacgaggtggaggtcgaacaaataatttatattttcttttgaagattttgatgctgttttaatgtagtataattttgcatgatctccaaataaatgcagggtcttgtctatattggtatagcaaatctgctgctttgatttgcagcaataactcgagttggccttttcacatccattccaaaaccaaattcaatgtatgcagtatggcacagctaagcatcctgcagccatccagccaaagggcgtttcagttctcgtttgcatgcaaacaaaaggtcaatacttgtagtgcactggcatgcatacacggtgctagtccaaaaacaaaattcaaatctcccccaattcggggagaaatcaatttgattagcccaattcggcctggattcggagcgttcagagcctggttctcggactgacgtggcggctcatgaaggcccacccaaattggatcactgctaatcgaaatccatattgggccggaggagaattttggaggaacagcccacgttaattgggtcttagcaaaaaggcccaggacaggtggcatcgttgtcgggcccattttagcccatccaaatcgagacacatagattggcccagacatgtaggcccacataagattgatcggcggactggtacggcccatataaaattgcattgtggcccattttggaaatccacgtggcccaataaggtttggcccaccagtggacagcccgccgttactggtgctcgtcgccacaaaactctgcacttctctgacaaatcaagtggtaatcaagtcagcgagatgattctatcagttctcaaaataattttacaagcatttttaggcgcagctacacctacgtagtagttttggtttcttggcaagtaaaccgctttcagtcacaaaattcccgacgaaattcatatatgtaaatgtaaaaaaaaaatgttttttttcaccgggcaatatagatttttttttcaccaggggcaatgtaaatgtgttcttgttccagccagcactaggttcttggaaacagacggcctagaagcagagagcagtgctgaacaaacggcaacatcgacgaacaatgtcaactctgacagagaaaacaagctaagctatgttgaccttgatgatgtcctactgaacaatcgatctccaatcctaccaactaataaacaatctaatcctttttatcgtcttttgcacaatcactcgaactctagggaaaagtgagacgatcaaattaagcaattcgattcataattctctcgagaaagcataaggtcaaaccatttttttttttaaaaaaaacagaacatcctctatcctgtgcattaatggcgggtacgtgcaatgcacgccctctcagtactagtaacatgcattaagcaaaaaaaaacaaagaacaaaatatcaaaattaaaagggcgattaatctatacctaaggtaggcatcgtgacgggcacgtagtgcccacgactccagaatcctgattagtaccctccagatacaattctttaagtatgataagaggatgtgattagttggttaaactaattaaggagattaattagcaaacgtttggacgcctgagctaagcatctgctgctaatattgtattcaggcatgctccccttgatgatggctgtggctgccgtttcatggagctcatgtctctcatgctctgggcaatggctgtctctagccattggagtcattctgacgacgtttttaccccggatttagcatgtcttttctgagttttggctgcacttcttccacatttcaagtttctagatactaatttcatgttgaatctgcttttttttttaaaaaaaaagggggaacaccagtgacattatttctaacgaaaaagggggatacagtataattacatggaatagtgtaattcagattgtagcaactagcaacaagcttgctgcttaaactgaaaactatcacttcaaataggtgcagttaatagcaaactgtaaatgatgctctcagattacgtgtaggtaagaaaatggaagtgtcattaggcttggaaatttatttatttttttaaaaaaaggcttggaaatgactaatgagcatgcagttagtacaatattgtcaagctatcagcatagctaaacatgcttgcacgctggggcctaattaaactaaaattaattaaaagcagaggcacaccggccatgcaaccacgctgctgcgatcccaacaacaattttcgagagcttctatgctgctcgtgcgcagctgcaactttctcccctcaaaagaggcaaccggcctgaacattctgaacgtgcgagagagaagaattccattgcagtgccaatttgtcatttgtttaatctcctaatccaaaagaaaccatcctctgtttagccgtccgtaatctctgcaccgtccattcaaatctcctaatgctaaaaaaaagagttattttgcacgtcacacttctatcctactctgaatctctgaagaatttcaactctgaatttgtaaagttcagagctgcgtgaggttgcacgaaacagtgtattaatggccgtttgtgccgtgcaagatggaaaggtcgatcagagttcttggccattctgcacgcaaagttaaactgtagttagttgctcgtacctaattactgaatgcatcgatgattagtcatgagtgtactgtgacacgctgcactggcaaacaacctggcctgatgagttcatcgtctaatctcaatcatcatctctgctgggactgttagttctgaacctgaacctcgcacgaatgcctgaataatttgagttgcgttgcgtcagcgtcatacattacactaatcctgtcaaatctatcacaattcacaactcatcaggccatgatttgttgctcatcaattaatattgtaaccaacttatcatccaatcattagaatctctgtggtctgattagttcatttcaactggtttggttgaacgtgatgtgaagatgctgtcaaatccctttgtttttaactgaacttccatgtgtactttgtatagtttcagagcaggaatatcagtaaggatcaaatccattaatatcatggttgactctcccctaacatcaagcaattactactactttccaaggtcattaagcaaacataatcttgccatgatttttatacccatgcacttcctttccacgcctaataaaaaataaacaaaaatcagcaatgtctcccaatggcatgatcacttgccatggaccagaaaacacaaaaccatatgcaaaacagcacatcctttgcttaccattgactcctttttccatccaagcctaagcaagagaggaagctgatgcaggaattcttcagaggaaacatgagcttccaattcatggcaagaagatcattggcttgagtgtcttaggaatcaaatcaacatcacaaaaaaaaggtaagaatggccaatcaatccttttcttgtgccatctttggggggtgttctatcctttccatctcctttgcagcagtcaagaatattgcaaaagcagtgcttgttttctttcaatgtttttttctgaatcttggagatgacgacgacgatggcaatgcatgcatgcgtccaattgcacaaaccctgtatgtaaagaaggttcaaaagcaaaagcttctgaaatctttagagcatactggtcctctcaattccatttgcatctgcatctttatctgcatgagatgatttagtttatgacttggtgtcgagtagtactactagtaacctcactatcatctagaaagcagcgagctttgttgctaaacaaacaggggcattttgcaagattttctcaccgctgtcctacataggcacacaaacattggcaaaatgtgtttaaattaagctacagtttcaaatttaaacctaggactaggaggtttgaaatttttttagtgagatgggtttctcttgtttcgatgaacttgtcgtgtccattgcaaagaagaactcgttatatataaagctctctctcttcttgtttcttgcagcgttgagagctcgtcggcatcaatcgatcggcaatggagagtagctcgtcggtgtcggtgtccgacgagagctcggaggcgaacggcggcgggtgctgctcgtcgtcgacgacgccgagcatggacgcggtgaacctgagccggactttctccgacgtgtcgtccttctcggaggagcatggcggcagcggcagcagcgtcgaccacagtggcccgttcgagccgccgtccgccgccgccgtgtcgaggctgatcggccgccgctcgccggctgcggcggcctccgctctcagcctcagccgcctcagcatgaagccccgggccgacgtgctcgaccggcgctccaccgacgacgagctggagctcgtcaaggagaggttctccaagctcctgctcggcgaggacatgtccggcggcggcaagggcgtctgcaccgccgtcgccatctccaacgccatcaccaacctctacggtacgcagcgcgatcgacatgatcgccggcgaacttgttcttgctaatccgtgaccaccatgactaatccgacgagctaatgcagccacggtgttcgggagttgccacaagctggagccattgccggcggggaagaagacgatgtggaggagggagatggactgcctcctctccgtatgcgactacatcgtcgagttctacccctcctcacagactctccccgatggcaccaaagtcgaggtatccatccatgatccatccatggacgattcaatggatttctacttaccaaacgccatggctgattgattgcttgctccatctccattgctgttcatcctgcaggtcatggccaccaggccaagatccgacatctacatcaacctccctgctctggagaagctcgatgccatgctcattgtaagatcccaacaaatttgtcgcaaattaaaaacatgctgaatttgacgaattttggatgagctgaatttcgaatttgtgcaggagatactggagagttttcagaaggcggagttctggtacgcggacgccgggacgaggtcgttcgggtcggcgacgtcgtcgtcgacgatgtcgtcgtcgtcgttccggcggtcgacgcaccggaacgaggacaggtggtggctgccggtgccgtgcgtccccgacggcggcatctccggcaaggcccgcaaggagctccagcagaagcgcgactgcgccacccagatccacaaggccgccgtcgccatcaacaccggcgtcctcggcgacatggaggtccccgactccttcatggccatcctccccaaggtaattaaacaacatcaccaactccaatgcaacagtaacatcaccatttttttccgataatagaagctttatatgatacttcctctgtttcacaatgtaagtcattctaacatttcttacatttatattgatgttgatgaatctagacatatatatttatataaattcattaatatcaatatgaatgtggaaaatgctagaatgacttgtattgtgaaatggaggaagtacattctaacggagcttactcccggcctccgtatgaaatgcacacggccacaaaacaggatctaactagaccctcaacacaaaacaaaaaaattagtgactatcaagccgtagactagatcgccacccatattccagagtaaaaaaactcctatgccacctgatccaaacaacgcgataccaccaacaatagtatttgtcgtcatcatcttcttcttcgtcttgttcatcatcgtgttcttggcagagtgggaaggcgagcgtgggggacggggtgtacagggcgatgctgggggcggagaagttctcgccggagtacctgctggactgcctggacatgtcgtcggagcacgaggcgctggcgatggcggacagggtggaggcggcgatgtacgtgtggcggcgcaaggcgggcgccagccacgggaggtcgcggtggggcgccgtcaaggagctcgtcgccgacgacgaggagcaggacaagaacgtgatgctggcaggccgggcggagagcctcctcctctgcctcaagcacaggttccccggcttgtcccagaccaccctcgacaccagcaagatccagttcaacaaggtaatcaaactaactaatctacaattcatacaaatgcaacagcattagcatccaacattagcattcaactaatcaaagtacgcgaatgcaagaacagcattggctttcaactagtaagagcatgcaaatgtaagaacaaaattggtactcttgattcagctgatcaaagcatataaatggcaagaacagcattggtattcaagtagtaattcagagcatgaaaactcaaggataccattggtattcatgatccagctgatcaaagcatataaaatgcaagaacagcattggcattcaactaattcagagcatgcagatgccagcattggcattctgtgatctatatcttcttttcaaattcaaaatttgatacgttcctgaccaaatgagattggcaaaatttttcatgtaggatattggtcaggcaatcctggagagctactcaagggtgctggaaagcttggctttcaacatcgtatcatggatcgatgatgtcctttttgctgacaagacggtcaggaaacagtgagcgacagccagagcgtctggactctggattgaagcttcccaacaagagctttagatgtttctgttagtgtagctgccaagagaaaaaaaattaaagtaacagtaggtagggtgattttgctgaccttagtgagggaactgtaagctttagcttgcaacaattatgtcttgtatgaccagcagtggttgtatgtatgaagtaatctgctctgtattcctttttgtttcctaacctggcctttctgtcctcttccttattaccaaatcatggtagtactgcacaggtttaagagagtaaaaaaatctgtggttgctaagaacccaggactgactcactgaacatgtatgaaaatacctggacacataaaaaagtttcagtttaaatctagagagcatccaatttaactgaatacgagctaatccgcacttcaaatctagacgcaaactaccattgcatttgcagatttgctgcctccatgatcctactcaattacatttcatatacttgcgtccatcgatggattgtgtctttgtattcaaaatggaaaatccaccgagatgataagttaattgcatagcacgagacaggtaaaaacaggataagatctggttaaacaaatatagctcctcccaagagcgaattgctgacatacaacgatgattctctcaaacttttgctcggctgtatggcatacaactcgaagttcaacccaaatataaacgtggtttataaacattacaacggtgaaaaagtgtgataactaacacaaatactaacttagttcaacttgaaaataataaacataatagataatgcatactactcataataatcactcgaagcaacatggccactctcatacagtgttccatcttctggatgcttaagctcatctccacagaaatagcagtgttgtttgtcaatgggaagacctggaacacctcttggataatgaactctggcgccatagtaaccacctgtaaaagcaacttgtatatgttagtaacattttaaatagaatatcaaagttttgagttctatttttggactaaccaattttttctttcccttcaagagagaccatgcaagtgggtatatatccattgttttcccagcgtacttccgcgaaaaataactcctccgagttcttgcaatcgccctttgcaataaaatttacatgaccatgaaaaccttcgtccagatttccacagctagtgatcgtcctgactaactcatatttgatctatgtttcaacaaaaaaaaacagataccagtaattaggccacaaagatatagtgtgcataatattgcattaagaaaatgaaaatataccaagggccaatttcaaacaaattattcaccagactattgccacgaattatctacttgattataaggataaaatcaaatattttaagaaataaacttaacaaacgcacacaagcttccggtgtacacacaccaactaataaatgttataaaaaattccagaaaaaaatgtatacaagtacttccaatagtagtacacatgtatgaagtctaagcatcaaattatttttagccgtaacaaaaaaaaaagaacatatgacagcttgtaagagtataaatctgccagatttttttcttcttttctctctccatatgatgaatttaaagatgagactttacgcataggtgtaatactattaaataaatgtacatgtacaaaatttgctagaattttttgtggaattttttagttggtgtacacgatccatgcagacaaagttgttttctcaccggcggtacaaggaaaaggactgcgagcgcgaaaagacggaaaaataaaaaactgaaacttgttgctcctatagaggagagaggtggtggaggaacctcccaatctcccaacaggtcctcaaatatgctaagctattctcgataggggggctagctaatttgaggatatgataagtacctcgagctcggacttgaagatagatttacagaatgagctgttggcaactccacctcgacctccataagctgtggtttgtcatcatcaggaagtggaggacttttaacgaataaaagaagagaaaatcaatatatatataatataaaagggaaaaaaaaggaatcagcatcacttttaatgaacgaacaaaaggagaataataagatcaaaatcaatgaatagagcaaagggtaaagaggcacaacttgagatccaatccgtgttgggtctccgaggggatcagcatgttgatgtgagcggaggagggaagtagaggcggtggtacggacgcgctgcggcagatttgattgattataagaccaaatccctccaaattaacaacgaacttgtggtgcttataagggtggagagggatggatgagctagtacaacttacgcaagaggttcgtatccacctcttctgaaaaaaaaaaaaacaagaaggccttctttggttatttttcttcggagtaagttcactttttgactctgaatcggattcgtataatttgacttgttttggagagcggtttggccttcccgacctggggacttggggagagtgcttcctcgatgccttccggacctcagcgaggagggctgcggtggcggaggcggatctcggggcagtggaaaaggggggagctcagcggcgacgtgcgacgggcggccggtggcttgggcggcgtcccctccatcgccggcggcggacgacctcctcggcccgccaccgccgccgctccgtccctcgctcgccgcccaacgccgccgccgctccagccctcttcagcccgccgccgccgatggccgattggctgaagaagaacagaaaggagagacagagggaggaagaaggaaagaaagagggtgatatgtcagtgggtcccacattttggtgtgaatgacagtgtgtcccacacgtatttttttaattttaatacactacgttaacttcacgttaaacaaatcaacacgtcacatagacatcacgttagcgaaactatccttttaaatcaccgaaagaatcaaattacaccggctttaatagttgtggttctaataaattcggtactagtgtttagggacacgaatcagatcggtcaataatttagggagtcagagtggacttattcctttttcttctaacaattccattccaaaaaaagcagtacgtacacaattgggcttctttcttgggcctccaggcgcttccgcagccccagcctatagcacttggatttgtggattcatagtttcgggagtggaaataagtctattttgcttccatcgaccgtaaaaccggatataacccgtctcttttaactcccaaaaccgtctcttcttggcttcccaagaagagctttagatggttctgttagtgtagcttccaagagataaaattaagggataaagtaacagtaggtagagtacagtaggtagagtgattttgctgacctagagagggaactaagctttagcttgcaacaattatgtcttgtatgaccagcagtgcttgtatatggagtactccctccgtttcaaaatgtttgacaccgttgactttttagcacatatttgactgttcgtcttattaaaaaaaatttgtgaaatatgtaaaactatatgtgtacatggaagtatatttaacgatgaatcaaatgatataaaaataataaataattacttcaattttttgaataagacaaatggtcaaacacgtattaaaaagtcaacggcgtcaaacattttaaaacggagggagtatgaagtaatctgctctgtatcaaagcatggtagtactacccaggtttaagagagtgaattctgtggttgctaagaacctaggactgactgactgaacatgaatgaaaatacctggatacataaaaaaaagtttcagtttaaatatagagagcatccaatttaactgaatatgggcgaaactaaaaattaatcaccagtcgtggggataacaacgcaaaagttgatggatcaaatgccttctgcatacaaatttagttgaccacaatgtaaataatgctactagttgattagctacaatgtaacagatacctgatttctagcactttttatgctctttaatctttagtaagccatcagccatccctgcacaagccaaaaacaaaaggaaacaaaaatcttcagtgatagcagttacaataaacatggtaactcacatacatcacaagcgtggatttaaataaaacgctagaaatatcttctcatcactgacataacatgacttgcaatatacacacataacaaaatatctgaaaaacttaaaaaagtagtcatcgatagaaaattgcagataaatttattgatcagagcagccgaaggggcacttttacccaagttctcccggttttgtcctaaacatataatagcaaaaatgtactccttgttgtacttcaaccaacaattaaaaagagtaagatccatgaatacatggcaaaaggaggccaccctgattcatattaccaatggattatgggagacccaaatcttactagtatacaaacacccccaaggagaactccgactaactatataattatctatgtcataaagctaaatttgagctaccttgcaatgcagcctactaagcgcaacccttaagaacaaaggagatagtttcaataaattacatctaggaactatccactccagggttaaactgagtccatcttgattggaaaatgctatagcactcttccacaccatgtttttaaagtacagaagaatgctcgatgcattgcacatatgtatttacaacctacgggtttgcaacaaaattatgagggggaggtgataattgcgccggttagctgtcttcatccagagagccaatgtaagtcaggtcagtcctcctcacccttacagaatccttgagaaagctgcaagctttcagattggcatggtcaccggtaacaccatttgcagaattgctgccactgttggtatttggacagcttgtaccgtcttccagcaaagtccaaggatctatttccatgttaggatcctgtgaaggcaacgctgccttgcatcttcttgagagattggtaggaatccaattgaggggaaattgttggtgaggccctgcagcagatgtactgcactggaatggtgatagtgcagcagaggacagtagaggaggaccacatgttatggaggagaggcgggaagtaggtagaatcggcatagccacttgaatccgccgcctgattgttgctggcaactccatgcgatctaatgcacactgcaatagagcagataatgcaaagaagccatcagaccaagtaaagagaagtcacaggcttgaataattgcagaaagcaaaagagagcaataatatgcaaaaactaaacagacctgcaagctcttagtgacctctttatcaattgcagaaagatcacgcaaaaatttaacagctggcttggagcttggcttagtcttcagccaacttggttggctattgccaagcaaagcttgcaggacacataaaagcctatcgaataggctttcacttggacaatcaagcaggacatcatccatgtaaggttcaagtgaatctgcatcttcatagaccacacgtgttccaaccaagcttaataaggaggaagctagcgtttgcctcatgttactacaaaatatccaaagccaaaaagttagaatatagcataaatatttcaaggacgtaaagtgcaactctgtgaacttaagatgtcacacaactaacaattaaagcaaaagtatcgcaaggaaagattaagataacttatttaagcatgcttaaactcatatttatcacatttctccagctattcatggcaatctagaggagccagaacccactcagctaactaatccagtcaagctcgtaatgcaagtgattcaattctctatctaaagtcgatgacatgattgtcataaccactgaaggcttgatttgcaacaacccactacccaagtactaaccatcctgcttaaatatttattaagttctgttagttgaattccagatgccactcgctgatatctactgataattgaaaagtagccctctattttcataaaggtgttcagattgaagtcccagcaaacagaaaaaaaaaaaactaaatcgctgactgttcgtcccagaccggttttctaatttttaggacaaatcatgtaatgctagaatgtgccacaaaatcattaaatattacctgtctgcaataattactggaagtagcctaatgatgaattgcaggcgcaaccatattgatgatcgtaaagctgatgcggaaggagtagttgaatcattaggtacagggctatgcttcctgatattcggactaccactgaagattcctttgcggccattgggtttactcaaaccttcatttcctgaaggatttgaactattcagtttattaataccgttccacactgctgctttaatatgctcactgatcacacccatatgtttgatcaaatcaccagcaaatacaaagcgaaactcgctagaacttctgtctatgcatggcaaaactaactcagcaagggcttcctgagtaaatatttttgggtagatccatgcccttctgggcttgtacccacatttagcgacttcctattactggattttctagaatcaatcaagccatcaacttctctttcctcaattgaagtaacttctaacttccttttggagcttttattagcattagcatatccgactaattttgaccatcccccatggcttccaaaactgggtcttcattggaaatcctttgcgctgagtcaagtaacaagctgttgtcttacagagttgtttcccaaaagaacatcttgcccttgtaagaaccatttgatacccatcacgaatgactcttgtagctttccaagaaggtgaataagttctgagtatagaggagcagcatcaggtctgacaagtagcctagacaaaataacttcagtaagccccttttccctttcagagagggtaaaattctcagcattaggggatagggatcgaagtgcttttacatatggcacattctttggtttctcaataagagattgctcatccaaaagcagcctcaactcaacccattgccaatggaactttgcaggctgtaggacattcagaatttctataagcctctctggaaactttacatcattcttggtactagcttctgcacaaccaggctctaaagcatatgtaccatcgtctctcattgttactggtatttcacaatcaagaagagcattcaggaaaacccgggcacgaagaggtgaaagagctttcaaacattcatcagggcttcgaagttcaacgattgcagcaaactctgaatcaccaacatccgcagccagaagatcatagaaaagatgcatgttacggaagcagacatctcgaaaaggctgatgtcttgtgatatcactaattgcacccagtagagactgataaagctgaatgtcttcatgattcgatgtactggtgtcatataaatatggtcgccaaaggaccatagcaaatattgaataagctggaggaagaactatacccaatggaagcgtccgttgcaaccttgaaaaggcaaggacataagaatcacctagaatctctgcgatcactccattataaactgtcttacagttccctattagaatcttaaaccaatgtaccaaaacttcagtggaactgtcaattttgaaatttccaatggagtgggtcacaccatttgtgctagctttggaaattcttaagaactgcagaatgtccaaaccttcttttaatcttaggaccaccatcatccgctctagactgacaaccccataaataatagctccaacaactagtgcagaaacagcagcagaaacttttacagccttaacattaaaacattttgacggattacttggaacttcatttgcatgatttccactttcatcatgggtctcagaagactgttgactgcggtgagccttaggaggagcaaaagatgctgcaacagctgaagaagcttcaacagcaagagatatttcaaatattctactaaatcgatcacctaaagtttctcttagcaaggccagagagtttatgtggatatccaaaatgtgttgaatcaagtttaatgaattaattgaggtaacacctggattgttaccacctgaaatatccaagtgtttagctattgcatgcccagcattgtcaacaattgcagaaacagcagaagcaactaaagaatgatctccatctggatttgctcctccattttgtctgatacagtctgccaatcccaaaacaatgtcatgagcagtttgatagctatcttccgtttcagaaaaagatgggttctttggtgctgtagcattattttcccttaggttgcgtaaaaactcgtcagtttgccgttgcactatctccttcatacttggaagtactcctgctttcccattcaattttttatggacatgcccatcaagttcttcacctgatgaaattccagaaataattgaatcaccagtgattgactttccactatccagttcagcaagcagccttttatcagatgtggacctaaaatttctttcccacctagcaacactagtcacatctctgtatttccttaagaaatatcgagcataagcaaaagctactgaagtagactgcctttcacctgacttatgaacagttctattcattgaaacactcaaaacctcgggcaaaagatccattgcaataaggatgttctcatacctgcaatatccaaaagacaaagaaaacaataatgtgaacagcaagattgattttttagaaacaataaaatcattagtacagttataacaaaatttgaacatgcatgtctggttccaactacagttgatccattggatactttgtactacaagatctcacatactcttcagcaaacactaagtttacatctgcagctgttgccactgcagtgtatttgcccatttttcacttcacacaaagaaaaatatgcatggcattgtagtttacacaggtcattgataggactcactaggtcatgatgaagtgatgaactacaagtagatgcaccaagagtgttttccaacaaagcattcaatgacgcaaaacagtccaaacatgattgcttgaaaatcagatgcattgccctcttcaaacaatcaccattaaaccatataaatgctacgtgtatataatgaaaaagaaacgccttaaaatattgcacaacacaaatacagatgtattatagtgtgtttctgtacagccaatgacatacgatgacttgagacacaacttgaaagcaccacaaagtatattggtgaatctgccatcccctcgagttgatgggatcttctaagggtgtgttctatactacatgttcccaacttctactccctcgttttccacgtgcacgctttccaaactactaaataggaaagttgctttaaaaatcatattaatccattgttaaaaaattttatagctaatacttaattaattatgtgctaatgagccgccccattttgcgtgcgcgggggagaagttcccaaccttctctcccttctcttccagacacaccctaaggatgaataaatatttcttttgtgcatgtggcttgccttttttggttggatgttcgcttgctaattctatatattttttccgagaaagatacaatttccaagttaaaaaatttgatatattatttgaaattcattgcagtgcatgggtattttgctagtttggaaagcgtgcacgtggcatttcagtgtctaagaagggccaaacagagaacacaaccgaactatattagtcataaatagtagtggcagaacagagaaaccaatagaaccatagaagccataaaaaaatagaatctgcccagaatattttgtgcaaagatggatgcaaaagtacaaaaccaacaaacagacagagacaacacaagtaacagtttaattggtgttttcacgcgtttcttttttttttttgcactcttttaccatttgcaaattcatgcaaagacaaatttggaaagaaatttcttagttacattataagtgaatttaaaggacgaaagtcaacagtacttcagaagaaaacaatagagaaaaaaaaagcagcttacctgagcaaggatgagaacagaaaagcttcggctacttggaaaacttggttttctttatgttttgggtgcataacacctcttccaacttgaccagatgtggtccttccaatataaatctttgatagaagccatataagcaaccttacagaggagagtaaatcacaacatgtatccattatgtacagcactgacagaagttcatcttctccaaacctccatccagatgcaattttaccactatgctgcacagtggaggcacttatggagttattagccttagaatgtttcacttcatctccttcaattagttgttttatggacttcagcagccagattgaaatggatcttctttcaagcaatctaagtctcttaagtgatttgccaacttcagccagagtcaacatactcatatgatcagcgtctttaagaatgtcagagttagtgccaggtttatggtggggacacctcagattggttatcacacacgtgactagtagatgccccctggctaccatcgattctaccagctgcaaagtgtgctatattttgtgtctttgcactactgttgccttacctccacttgtttgttcaattgactgatgtattgtttcaacagtaaacaattcctgcttctgctctttccttacccaccaaaaatcttcctcatctgattgaaccaatggggacccttggaaaggaaacacgttcttatccaacttctgtctcttggtcctactactatccttacagccagtttttgcatgcccaacatcttcttctgagtctaccaaatctgtttgtcctttcttggttttttttgtttcttctcttcctgattcagccaagagtgtagagtatcccaaattcaacagacctgatatcataagttttacctcttctacttgaactgccactctgccatgattatcatctgttgaatccattagaagatcaggctgtttctgaaggcaggaactcaaagggaccctgccttcaacatttgcatcagtagccagaccacttgaaagctcagaaagcacaagtcgacgctcactagaatatgttgacacaatttcataaaggacttgatcttcagcaatcttagcttcctcaaggatattaaataagcaaaaccctggcaggtgcttcagaattttgtaatgcctcgttttcttttccagatcaaacaagctatcattccaaatggtgattccactaacaattagttgtctcacatatgtctgaggataaaatataccactgcgaataagttcagtcatgaaaacatccacacttttaaatcccgaagcatcactaatctcatgttgatccaaccagcatacaataatgtcatgcagtggacctgggctgctgaagatatcctttttgttattctcatcaatgctacctgtactgtctctaaatccagaagcagtctccattgctgtcaccttgatagaagaatgattcagagtagcacttttaaggtgatccttcattgcaagctgactgctgctcttggaagaagataaattatttatctcattcattttatccttcaacagggaaactgccatatagacctgagagaaatctttgcttcctgaaaattttacattttggcattgtgatgtacggcaatcacggaaagtacatgttgcccactcacaaatgaaaaacacagagcagacaagggataactcaacagctcccatccacatcagagaagatcgcaagcaagggctgacttctttaatccatgtttcttccatcagggtatctgatagataattgaatactgatgtatatgctgctgtcaagtttccagttacaagtgctttgtccaaagcttgcactacgttggctgccccacgaacttgaagattaggattagcaactaaagaaagatcagatgcacgtctttgaactgaacaaatggcataaccacaagagaggtgtcgagatgcattctgtctcctagagctagcaattttaccaccacctgctattttcagaagagcacctttaccgtatacatcaggagccacaactgatggaagtggaaagcaatccaaagaaacaaatgtatcgggaacagcaagtatcaagtactgcagtaactcaactaaagcagaggtaatggatgacctttttgggttattcttaacacttaagctgccaggagaagcatcactgagacgttgaatcagtatttccaccagcatgtggatatatgtctgtgagagggttatggtatcaaccaaagaaagtacaataggcaagagtaattctaaaacctcagttgagtctctctcctgaaaggaagtgggttagaaaaaaaattggtattagaagatcaacatagcacttgagaaacatcactaagcatgaacctactttatcaatgcactctgtacctggagctgattaaatacccattcgataagtaacgacggaacaagtaattgttccatgagatgacattgaacaatacgaatcatatacgaccatttaaagtgtagcgaaggctcctcaacatctgcactagcaggtgatgccccggtttttaacttaattgggctgtctccagcaacaaggcatggcaatgactgttcttgagaagatggaagtccaaaaaagccatttttagaacacaattcgtccaaaagcagctgcaagtattcaataacatcctttgtccagtgctgagatcgcaaactatcaggagcagcagatgaaacattattggatgatgtttgaacctgcaattaaagaggcatcatcaagcgaacatcatataattttctaataagcatgaaataacagaactaaattctagtgagcagtggcagtttggcacagaaataacggacctgattaaggtaagtaaccttcacaagccatgatgctcttaacagtgggacattatatcggataagataattaaagagtaacttcctccgaaaaccacgaggaacttgctctgctaatgaccatagacgcctgtttggttgcacaagggcctgcaaaggaatgaattacacagccatttcaagtcaggtggaagattaaggttgcaatgagatccctcgcagatcggcaagacaaaaaaagaaaagactttagagaaaatcgttttctaattatattgcagttagtcttcaattctaccaaaaaaaaagttggtaccaatgtcgccctaaatctgtagtttcttaaatgaaacattaggtgagatggacggcacagtgctcccgtttatacatagtgagtccagtttgaaatgcatcagtttgatacagtatgaaatgtttcaagaactcataatatacagaaagatagctacttaagatgaagggttatttggatggcacactcgccgcacttaattgtagcaaacttgcctcactttattcaataaagtgcataaatgaaatgaaatattacattacaggaaaagaagatgaaaatgacaggctaatttgattgacctcgatccattttctgcgtgtgtcttcattgctatgcatttgctctggatacatcccaggttttgtcagcaacgagccagaaagagggaccccataaacttggccagcctgttaggaaagagtatttggaatattttagaccaatattaactttaaaaagatcaaagttttgcaggaaaaatgtaaatagatgctagctatctagaattaggtggtaaaaatctaattaatgcagttaagtccccatttgtcaaattttcaatacaaacattttgaagttgtgaaatggtttaacaaaaaatatccttatttacagcagagatcctaatcatagtaactacaacaaatcaaaataccttcctcttctgagcacgagattcattgatcgctctgaaccgcttctttagtgccttgataaataaaaaataaaattgttagtcaaagtataagttttttcacaagacatatcagttagagaaggaaaacacaataatcgggtaggtcaaagggggaagaaaaatattagattcaatccattcaaccattcagttcaatccatcaaccttagggaaaagaagcaattcttcagcatcttccatatggatctacgtattcacataatattaatcctaagtttctgacagactatgcagccagtaacaatccaaaggtggcaattatccaaaattagcaccaagtaggctgtagagttttggctgttaaccccctgtgatgcatatctcagcttatatataaaagatgtgattcccataattctacccatcttagttcctgatctccagcagcattcaatcatgccgcataccaacctacttctcacttcactctgacaggaagaaatgttctaacaacataagattgcatgaaaaataaagctagttaggttgatgttggttgcctttttacctccttgcattttgtagcaatatctggtttgctcaagtatggaatctgactgagtacaatctctctggcttcctgtaaaaacaccaccaggaacaaatttcagtcaaaacaaaacaaagaaattgcggtcctaatgtacacaaaattatggactcaagattttaatggcatgagactcgtgaaaatgagacaaacaatatatgaaacaagattaaccctagataagcagtgtcacaaaaaagggataggatttgaaacttttggtttctggagcacacctcaattccttcaacggtatccttgtacccagattgcacatattctttggttaaggtctcttctgcacaactcaatgtctggggatagaagtcaggtgcaccaagcctacaaaatccatagtacaaaggaaacactaacttttagttgttttcgaatacaaatatgcaacttctccatgcaaatgaaaaaaaagtaagaatattgaagaatagaaaagctagatatgagaaaatggaaaacatttatgtacatagtcaataagacaataggaacaaatcagttgttgagtaaaacatgcctggcattgagtgattccttgtcacacttcagcttgtaaggagctaccagtggttgccgcctgaaaaatagaatcataagcatattaggaggttcatatgctcatcagtcagcactaagttaatgtcttaacaaacataggtagaaccttagtctgaacaaaatgtagaaaagtcctttgaaaaaaattaaatgtggaagatcatacatttgaaagtgctactcctacaactaatacccccattcttcctgaaagagagaaaataaaaaaggaaagagctaatgttctcctataatttcttgctgagattttaaagcaaaattgatgcaaacagaactattcgacggtgttggcgatagctgtttcctagaatcaatattctagcaattttctcaaaaaaaatattccagcaataaaatattatccatgtgagatgtcacagtacagcattggccatggttacattctcagctggtgcaattgtagtttacccgccactaacaaataatcttcccatcttcagctggaaaataagaagaatacaatcttgtcatccatgccaatctaaatgcatttgaagtccccataagaacaaccatcctataaactacccgtcagttacttggttcaaccatattgcttagcaaggtgcaggagagatgtgccagagtgatgtaacaggatcttgtgtttgttatctttgataatggaacgtggggagttaccctcatggaaaaagcattatctattgatcaataggtataagctgatagttacattatgcaaacaggttttttgtctgttccgtttgccgacctctcaaactgctagtaagaagcctccatcagccagaataaggtaaaaagtactccctccatcccattttgatcatttcctaaagtttttgaagtcttcctaaaatgatcatcatctaacaagtgtctttttgtttatttgtgcaaagagtacatgtgcatcgttgaatgtgttacatgcaaccaaccaagattaatttctattggtgcaatggcatgcaatatttaaaacatgagcaatccacgggacacgaagcgatgaaacactttaatcgatgaggattaatttgagaatgatgaatattttggtgtctttggtcttggtgtcatttacttagaggatgatcaaaatgtgatggagggagtaacaaccataaaaaagagcactgtacagtgaagattgtttgacctactaaagaacaaaatgttttctctttcatttaccataactaacagtgatacgttttcaaatgatatcacaccataaaaattaaaaaggcaatttttatgatattcatctagtttttgaattaaaaaaatgtccatctgattcaaaggacaaatcccactagagtagactgcgactgattttgattgaatttttgttcagaacacaaccatctctagtgccataattttaaaaatggacctgatcagcagacagtgactcatccaagttggacacaagataatcgaagcaagtaagcaactctgaactggtgaaaatacaattcgatgagctagtttcatgatatattgaagcagcggcggattcagggcccagccagcatgggcagctgcccgggctcccagtctttgccgcaatggacttcggtgctgttcctctgctagccaatggcatttgctcccgggcaacaaacggcaccaggcgtcatgcttctatacggtgcagtttgtagttagtatggtgtcctgcacgactatttgagcaccaaagcaggcttttaattgtgcactagtttaagacaggtagaaaaaaatggcaaacaagcagaacatgttattggactcctgatgctgatagattattgtcagaggtcactatctctcttctgctttgttatatttttttaaaactatggataattaatacctaattaaccataccctaatcactcgtctcgttttgcatgtggaccataatctcatcatagatgtcatctcaaacacagcctaagcatgctcaggctcaagaaaatttctggatccaccactgtattgaaggaatcaattggaccgactacttcacaaatcacatcaaagggtttacatgcaacatgggtttcgaaactgggacaatgagcttgaattaactacttattcataccaggaaaattgtgactgtttctaccaaataacaatcaagtatcatttttccatcttttcattaaaccaacagttgagctgttaaactgaccaaacactgaacagtcaataaattcaccaggatgaacactggcaagacttttgaagcaacaacaatggtccaaaagtttgctattgtttttctgaattcctttttatattttgagatgttccttttaacttctgtaagaacaaggttttgtaacagactacatggcagtggccaaagtattactgaataatatacttaaaaaaatatcagtatgaagttcttgtcttcttgatatgagatggctttcttcaggttaggtcatcacgagtaacgacaaatcacagtaaccattgccgtggtcacctactggttgctaacgttgccacattatcgtcacatcatcgtttcttctaccgtaacgagttaataacttcacagcaatcactatcagcaaatatcacagtctacaaagccgaatgcattggaaacaagacaacttgagaggggaagaaaaacagcaaccacctcaagttcgcggggtaattggcaccatggaacgaagaaggctccagcctgcccttctccctccctcctgccaccacccccctgcctggcacgccgccgccaaacccagcattgtgcccagcgcccgtgtacctttgcatcttccctcgcaatcaccacaacactggcccagccatggcgacagagctaacgcaggccatgcctgtcccaactgaactcccatttttattaaaagaaaataaaaacaaattggtattagtaactccaagcatcgaagcaatccgggggaagagaactgcatgtgctgtgtttggaatggagggcgaagaaatcaatccatgtcggattgatctccattccatccacgcccgcctcatggaagcgttgcgggcgaagaggaaggaaggaggaggaggaggaggagaatgaccttgaatccgattcgagccgaggcccgcgccgcgccgcgccgccccctccgaacctgttcgccggcggcgcgcgcgacgaggccgcacagggtggggaggaggcggctagggcgggcgggcgggcggcgcgggcgggaaggagagggcgagccggttttctcgccgtgactccgggcctactcgccggcggcgaaggcggcggcggcggcggagacagagaagggcgggggcgtgtgcctccggcactgccgatcggaaaacgcacaagggagatggagagaggtattggagtggagagaaacaaaaatccaatctctttgaaattgtgataattgattttaaattggtttctttttgggttatttatttgacaaaaaatggcccctttacacgtcttggttttgttttcttgttttctttatttgtttgtattaggtgctttgggctaaaaacaaattagtaaagtataatagttggcgtagagatattgagaaaaatgaagagtctatcacgcaacgagagagaggcccgtttgaattcacatggatctccgtagcacgcacaacaaactagtttcaattcatgtgggtctctatagcacacacaacaatctagatagattggagcaaccgtgttgtaaatagatgtgagaaagtgaaatgcttgttatcaatagataaactaatccaagtttgtggggatctttatagcgtacacaccaaaccaagattatagatctataggaaccaactcaataagaaagtagtaggaagtaagcgaaaagtcaaccgtcaaaacaagaaatcaatactattttggatagatctcaacaccattggaaacaagcttaaagattagcgattgccagggtaaaaataacatggagaaaaggaaaaatccataaaaaaagataaaccaatccaagttcatatgaatcttaacagcatcaataacaaactagatggatcaatgcaacaaacttgagaaattagattaaaagcaaaagcctgtctcctctaagagaaaccaatatgagttcggatagatctccaatctatttcggttcaattacggagtagagggcttgaaaaactataccttttagtcagacatcttggtggaagaggctttgacgatgtaccagaggagagaaagaggaactgatgcgagaaatttgagatgaatagcgaatagaagatggagtgacagtgagagagagagagaggaagatagatacctcaagggaccaaggaggggtgtatttattgttgttgctagtgctaagcatgtattgtcgcctgctatcatatatgttgctctgacgtcatatgcatcgttcacgtttgccatatcctctaccggtgactcatattgacaccctctcatcatgctaagccaagcttctccgtcatcaagcgcaccgttcatgttaaaacatttctaaggttgatgactcaccttgacaatcgtcccattagatatgataagtatgtcatgatggcaactttcacgtggcgcatatgagagtggaattgcatccctcattacacatttgtaatgtgctctctctatatataaaaagagctcaacatcgtcaatttttttatttaaagtgcaacatgctaactcccttttctttcgactttggtaatctaatatatccttatatctttcatctttgctaactccttgtgaatttgttgaatagattacataatgatcaaaataatttgaagtgcccatacttttaatctcttaggacatttttttttgctagggacatttcaaatctctcagactcttactccatccttcctaaaatataacaacttttagccctctgggtttgtcccaaaatataacaacttatccaccaacattctattcccaaccaatcacaaccttccaccattcacttttcccacatacctccattactcattcaatcacaaccctccaccatttaattctacctaatttcttaataaccgtgtctaactataaaacttcatatattctggaatggagggagtaccttgttaactgcagttttttttttaagaaaagaagaagaagaagaaaagcctgttgctgttttgcacaagcacaactgcgaacgcgagaggtccagtgactagtggtttaggcccatcttgcagcagactgaaaataaaataggcccagtagcccatcctcacaagcccataaatatccggcagggctagtggtttaggcccatcttgccgcagaatccgccagctttattaattattaacctcttctccgccattttttcgctccaccattttcgttctcgcgctctcgacgaaccaaccatggcggacaaagtgagaggatcgtgttcgtctcgtcgcccaccgaggagaggagtccgctccagcctccagctgcagaccagccgactaggtgagtggatcgatccccaaaatcccaatgaatccgcgttctcttttcggggtttattcggttggggatgtcgaaaatcggcagcggcatttgggagtagtagctgcggctgccctcgtacgtgccgattggagggagggattggtgtttggagtgaccgatttgccgttcgaatgcgtaaaatttgggtgaattacgcgagagatttgataatttaacactcttttcaatgggtttctattatttgacatcctagcccactttcattcactcagatggtcccatatattatcctcacaaatgtcaattaaagtaattggacaacgaagaaagtgtcaaattatcaattttttcgaattaagcaccgattggtccattttgtaggaataatttgaatcgcttcattttattttattttattttttgctgggttgttgggtttgggggcagtttaaacccaatgcggcatacatggggatctcacggtgtctggaattttgaacaacggatgaactgcgtcctgtgccgactgccgagtgcttgggtggtgtgtagtgaactggttaatcccaagctcccgcctcccggaacttctggattgggtggttttgacagctgagccgcgttgcaactaatgtagtttgcactttcactcacattaggagttggattttggatctacttgttttaccggttggtgtgcatgttggcaattgatttagtagggatgcttatttctcatcctttcagttgcacaaatttagcgcgcaagtgattctgttatttgtgctgtttggatttggcatgctcatgcttcttggaggtttacatgtattttgaagcataattcaaataactgaatgcatgaaaactgtaagcttactgagtgttgttcaggaaaagaaaaaacctcagtggaaatgtatattgtgtgatttgtttagaaagccttttacacatgtacttacaaatacaaacatgtacattgaagtgatctagccctctttgttgacaagcgtatcggggtaaggttcacaaacatgcacacaatggacaagagaaaaattcggactgctgtatgcctgggtgcctagaggcatggctgttacagactggccaatttcatccaaacaaactgaacaagtcagatattcacagcattgtaacttcagctgtcattcacaagaaactgtccactccagtcagacatttggaccagtaaatgtctccccaatcacatgatactttccttgggccgccagaacatagtgcccttgttattcttccgcataaaatgggttattgtcagcatcaaaatcaaaacctctacagttcatctacatactgcctatactcgtcacaaagcaacactgataagggatctgatcagaacttcaaatccacaaatcaaaaaccgcctcatctatcaattcatctaacacaaactcccatatctccacgacaattccttctgtctttgatctaatgtccatccatgcctgaacctccaaatcccttttaattatctgttccaatgtacttgggaaactacacttgagataaccatcaacatatttgtcaacttctgagatgagtttttctcctaccggaggtgtccgtatgtcatgtttgacaaaagataaccaagaagagagtctaaaatatctctcttggatctctgttagtgcttcacagatgcaatcaaacaaaatcttcatatcatctattcggtccccttgattctgtagttcttcgaacatgcaagggctgattaattcatcctctagataccacacctctaaattttgctctgcacataattctgagagctctagcaccagcattatataatctaacctggcattcttatcctcccaaaagacctttacacctgattcattatctgggaagtacagggtcccacaggaaacttcgtgcagctcatctgtatgtcataaaatggtgagtaatacagatactagagtacataatattttttatctgtgcagggaaagaagataaactaatttaaaccattgttcttgcaaacaattgtattaattggacttacattttttcattgttttgcattcaggagagctgtcatcttcatcgaatgaatcaagaaccgatacaggacttggctgttctttcttctcattgctttgctcaggacaaccatctggtaattttggtgatgattttggttcaggtgtttttggatcttgttgctccaaattttcaaccatgctctcaggagagctcatgaacatttgaacaggttcttttccttcagttccttctaatatttcctataaatagaagtatgaacatgtacatcttaaaatacactaacaaaagatggaataaggctaggcattcatttgagcttactggcaaggggctgtctgtgtattgttctgctgggatgcactgtatgttgcaaattgttttggaacaatccaatttgccaactccttcaacaggcacggtgtctacctcatcagtagcatatatgatacctgctcaatattcagagttatttctatttaaagaacaaaagagcactacgcagaccactctgatgataattgtgaatactaaagttaccttcttgggtgtcttctttgatgccacattcttctagaaccgccacctgatcatcaactgctacactagtactatatgcattgctctctgagttatcatgcagttggcttctctcttgggctggttcttctacatcaacagcttttacaagacaaacttctggctcttcaggtgagaaggcattgtggcattttcccctatggtcactcctaggaggtgacacgttgtaatgaggttgagaaagcattccttccaaagattttgatacttgggctgtcggatagctggcagattgactagtgttctttagcatatctgctaaatgcttcttggctttctcatagaagatagatgctcctgttgtatgatcactgatttcactctggctgtcattttgttgcttttgcttactgctggctgaaggtttgattccattcttaaaatttgatgcagctttgtctggcaagctcccttcagtgagatgtctaggatccttatcttcaacgacagaatctttgagctgatgtgaatctcctggaaggttctctgcaggtattgcatttttctctcttttgctgtcaccagtcacaattttgaatctcctcctgacttccttgattgaaaattttgagctttcccttccactgaattctggagcttgcgatgtacatggttgctgatgtaaatatcttgaacttgtagtctctgtctcatcaatccgtcttccttgatttggctttagtataactattttgctaacaggctggggtctattggctctttctggcttttgctttctatctgacctatcctttctccagaagaacacatgcttggtctctttaccctgtgcttttgtagccaactcatgatttgagccccttttctcttcaagaatactagaccgtccaagacttttgtcaggttctaacttggttgttaacctgctattttggtattttcggatattgtctaatatatgtgaatttggcttctgaagcagcttcaggaaaagttcattgtttgaactcagtatttctaccgcatccttgaattctttgaattgagctgccctgctgttagaacgactattctcacccagtagcccttctcccttgctctctggagattgctcattaccatgagtggcatggggattatttaaatcattgagcttgttatggattaaggacttcagtgaaggacacaattcacccttattcttgcaatcaccatgcgggcattcaccatggcacctataaatttcacctaaaaaatttgccaagacagattcaagatcatattcttcagaatgattcaagctcttggaaccctgagaatacactgatcccgataaataagacgcgaagatgtccgtgtgctgatttaaggctgccactggtttatttgtatgctctgagcctccatctagggagacatcatatcccaagtcaggtaatcctctttgaatctcattgcttggaatttttttcaaaagatttactttccccaattcgtcctccataagttttttgactgttcgtttctgtgaagcgcattcttctttgttctgaaaagaagaaaagtaaaatgatgtttaggaaagttgcgactttcagatgcacgcataatccagtatactgaaaacaatgatttggttgtaatacaaactagccattgagttgctttgtaacaagatgctgtccaataccaaattgtgtcagtgttgctattgataacaaagatgattttggtgtttatggttaaaacaacaacagatcatgagacagttacttgcttagttcttgtaacttacatcatcatcatcatctgtttccacaaaatcactggaattcttaactgaatgccttccgtctgaaaaatacagcgtacatcatcagaataatcatccaacagcataaaaattggatagaaaatttatgcgttactcagttgaactatcgtagcaatcaccattgactaattctcgactgtaaatcagatgcactgataggtcttatatgacttcaacaagtgatgcagagaatgaagaaactacgctgcacaggctcctgaattaagtaatgaagccagcaagaataaccaagtacacgcaaacaaaattttgataacattagcattttttttcttgtttttattgaaaagatagtgagcattgggtcaaatgacagcattttttgaagtaatagaaacttgaagcaaaacacgtagctttttccgtactgctataagaaactacaacttcatagcaactatgattactgaagaaattacctgccagctcccggaacgtatgcctcctgctcacttgctttgtatccaataagaattttgcatcacgccggaaataaagcatgcgcatgaggccccacacgcagcctacattgttttcctcttgttcagtggaccgcttgtggcttcgccttcccatttcagataatcagcgttctttctgtagtggaaataacttttcttgtatcttctattgattgttcagttcatcagggagttcaccgctagccggatttcagaaacactgcatgcagatcaagatcagcaaccggacatatattgatggaaaatggcaaatatctctggagaagccaaaacagaagaactgtgctttgttcagcagcataagggagatggctggccatggaaacctgccatccaaggtatcaatgtactgttcttgtttttcttatattaaaaaagctaatcgtttgtacaagctgttaaaccaatccaattaattaaaagaaaacatggtaaggactagggagaacccctgaatgcttgactgaataatcaatacagaaccatggtaaagagaaacctgatgtcaaaaaagaaaaaagaaaccgaaagtttcagttaaatttctgtacaaccaatccaactaatccaaacaattagttgcataatatttcataagtttcccccctttcgcaagcatgggagctcatcaaactccccacttcatggattaaaacagaactccaaactttcaagggttccaaacaaagcagagacaaaacagcctaacagtacaaaaccaacaagaagcacatccaagagcagggcttcatgcaaaacctacctgggaatgcagagatcatgaagagaagctccagcaaccggccctctctttctcccctcctctcctctctctcactcagcaagtcacatacaagaagagccaacagattactcagaacatgttcttgaccatgtgaacaggcgttgggacctgcaaccttgagctgtccatcctttcggcaatccggcgacgacgaaaggaatcggaggcttttcttgcgctgttagctagcctaatccaattcctggtcagtatcaggctatcagctttactctccctctcttcttcttcagtcttctcttccctttgttttccttcgctttgctttgctttgtggaatgagcgcagcacgctagctacggcaccacagcagcccaccacatgccatttctcaagtagaatggactttcggcaagtgcgccaccgctttccagtgcagaaaaagtggcagtagacaatagctgcaagcaagttacaattgctggacctaactctgattaatggctgtgtggttaatccctgtggtaataataatggactaatggtaagtagtagtacaatgaatcctgtgggggcacaccgatgaaaaagattgacaccactaccatggatggaatcgtgtaatactaggcaatagaaatctttcctttgaaaagaaaaataaataaataaattggtttgagataatatcaaagttttaaatctccggctaagcctcttagctgctgaccttctcaacagctaagcacagctatagctggagatagctgcagctaagccatttagctgtttttgcaaataaataaataaataaaagacatgatcttggcataacttcataaccattaccaattgatacataaccagttcaaatgagtacattacaggttcataggagtacattacatcacaagctaagtggttaacagaatactgaaacatcagtttcacaaaagtacaacattctggaataaagacaacagtacaacacaaaggtcatcaagaattctggatagtggatactaaattactaatatgaggcaatattgcaatcttcatttcttctagtcatcaatcatcggtctcagagacatagggagagggagagggtgacttatcagaatcagaagtctgcattggaataccatcatcacaatcttctgagtcggatgatggagcttcaagatgcactggggcattgcgcatcaaagactgtaggcttctgactttcctcttcttagcgtgcacaggccttttccttttagctggtgctgactcttttgcacattgttgatccatttcacttgatgaaggcacaacaccagtaatgaattcattgtcaccatctgccacaacatcatccacttccttctctataggatctctacccttgttctctctcttatttcttaacttggagttaaatttaacaaacaccagatctcgcatcctttcatgaagtagcctgttgcgcttctttgtatgaacctataagccaagtagtgaacacaaagctgcaggtcagatctaaattccataaataagcattataattcaaaatagacagcatgcacataaagctacaggtcacaaatttctttttacctgttcaaaaactgaccagttcctctcacaagctgaggagctgcaggtcaaactcaaaatccttgcagccaacttcctaagatttggtgtgcttgtgccatggttcagccaccattttgttgcataaacattacacaaattacaacaaaaatgatattcagcaataaaattaagttcacatgttgagatctgaacctggattgaaatttttgttctttcgctgccttacggcaatttcgtgtccaaaactcccatgctgatcttgatacaagttgagttcttcaattattttgtcttggatatcttcatcatcaaccaacttatcaatacaggaaatcacacctgctctaaatgatccatcactctcgatctcttgcttatttgggtagtagtagtaggggttcaaatagtacccagccaggtgtagtggagtcttgagcttgttgtcccatcttttatcaatgatatcccaaacttctatgaagcggctcttatcattatcgaatctctgagaaatttctttcttcgcctcaagcattaaaccatggaagaatcccattgatggtacatcgctgtccattcttctcaacacgttagccaatggctcaaagtaattaactgcaatgtcaacatttttccaaaaggtttcagatctgatcactttgctggctttcttccccttggcctgcttcaagtaacccaattgctccatctcatctgatttaaatagtcttactaactctttttttgttgtctaacaagctttttagattcaaataagctgtggcaaatcgtgtaaccccagagcgaaccaagtctctgttaagaaactttctcatcaaatccaacaccctagtatgagcatacaagaaaacagtcacttgtcttgcattagcaatggtttcctcaactggtccaagcttcccaatatcctcgagcatgagatccaagcaatgagcagcacatccattccaaaatattgatggtctttttgctgtcaatagacttgctgcagttgtgttgacgctagcattatcagtcaccacttggacaacatgttgttcccctatctcttctatgtacctgtccacaagttcaaagatatatttgccatctttcctgtcacctgagcattccactgaatctaagaagagtaccccatgagcactatgcacaactaaattcatcactcccctacccttcctatctgtccatgcatctgtcatgatagaacaacctgtgagctcccatgattccttgtgctccttgaatccatccatcaccttttccttccttttctgtaagaacgatccactcatctcatagggactaggccctttcagacttctaccaaattgtccaatggcctctaacatatgagcaaagctaggaagggttactgtgttgtgtggaatactagcttcatagaaccactgacatatgtactcacaagttctattcctcctcttctcttttctgagttgtcaatgctgtttgaaccttattgcttagcttaattactctttgtgtcatactggcagattcttctatagaaggaggcttgtagtacttgtcaatagtatgaccacctgctacagatctagagctactagatcctgttgtctcctttggcttcaccacaagaacattattgccatgatctgaaccttcactgccactttcacaatctgaattttctatgtcaacttcagctctggccacttccttttctttgtttttctgttcctttttactagtcttcttggtaagcaaatcaaacatctcttgctgcactggacttggaactttctgacacttagtagtattgaaacctttaattccagcaagatggtacttaattcttgtaattccagcagtgcagaccttgtcacaatacttgcaccgtaggtgatgtttcttggttatgtctgggcagaaacagtgagcccatgcaggatcatctgagttgataccagcttgttttggtccagcttctactgagacagaggcagcactggacggattacctatacaaaaagcaaacttagcccacattaatgctagcgtcaaagctgcctaagcatcaaaataatgcaaactgatatagcacgtattatcattaccacctaaacaggcgaaacaagcaaacgagagatctcagggagtaagaaaataattcacatatagtaagatctacatcataaggcaagtatctgaaattagaggtaacaaatatggacaacttgttcacatattgtaagatctgcaacatacaagcaaaaaagagaggaggatgtgagaactgaccggattgttgtgccatgccgtcacctttggtgctgctgcttcagtgcttcggagacgttgcactgacggacctcctcgtcggacttgcgccgctgctcagctgccttcaaagccgccgccgctggttggacgcccgctcgaagcagcagccggcgccggtcgcctccacgagccacctgcgttggtcgatccgcttgaagccaccgccgccgccggacgcctttgcgccgccgccgccggccacctccacttttcttgcagctggagagtgagcgcttcgaagttggaatggatagtgtgctgctgggagcttacgagctagggtttgcagcactttacccacctctcgactctggtctagttgggccggtttcctcttgggccagaccggccgtgttttacaatttagctacgctaaattacggccagtttagcggctattgccggctaaatggcgctattagcgtcccgctattcttagcgctaaaaactgcatctcttagctccgtccgttcccagcagctatctccggctatagcggcagctatagccagagatttaaaactttggataatattgacatttttgtttctaaggcccttgctgaggaaaagccaaaaagaggagcgcgtgttacatgtcaaatattgagatggcgattgagtgctactttgctagatgcccaatacgacacagactttaattgcccagcgacaatctgcaggggcgattgatagtttgttacctgtccatccgagagagagatgctatacctcacctccgattttcagagagcactagttttaaggaaaaaaagaacttgcaatatctgtttctgcctacacgttctatacacagtgtagtgttgtgtactctgccttgtgcttaacaatattccagataagtctacaagttaaacaatcaggtaggagtaaaaaagtaacagtatgctaagaaaatatgctcttccaagatcagtttgtttgatatacagctaatttttgcaagatgcattacttatttcagctctcagacaggagttagtggtttagatgggatctatctggtgggccaaatcctgcagttttctatcctcgctttacacctggaatccgattcaaaaggcaacctggaccccacctgtcagcgactcccatccactattccaacagggcttaggttagtgtagggacttaaccctaaataatacagtactcctactacccttgcgttccacggaaggctgctgttgtgacatggatcgtgtgtttgtgaggtgtgatgcaggacacggagacagcggtggcctgacggatcaccggagcctttttgtcatcaccttccctccggtttggttggcctcacgtacgccaccaaaccaaatagtagtaaccaaatccgttaattaattaattattaactcctactttggggaccaaatcagccatcagatttctcctactgaatagtagcaataatatgttagctcaatgcgatgcagtattgaggtgtgtgttggtggtgattttttttctttttgaaacctaagccatctaccgctggttttatattaagagagggaaagactgtactgatgttggtggtgatttgattaagatattactttggttggttgggtggcattgtactgtacctgcaaactactcctacagctacatgagatattccctatctttgccaatcaaagttgggtgtacttaggaaatcaagttgtggccgtccactccaatattgttcttgtaagaaggaatttctttagttcttttgtagagatttcagaccctagatttataatgggtacctccaaaatatttttgttagaagaatcacatcatactacatgaaaatctaggccaggcataatctgtgagcatgtagcagatagtagtagacaacatcatagctgtctgcccttcatcaattgataagtctctctaaattatgaccatctcgtccccatgcaccactcgataaattcttgtcccagaagaaaaggggcttctttgtgtatcattggattcgattgtgagcggggcatcatgcctgcctggatcgaggtttcgactttaaagtatgctgtagcttggctgatcatggaaacacactctggatgagacaacacctttgcaaaactgttttcgacaatctctcattgagtcctgtacagtcatctgccaacttttcttggtacagtatttctttcaggaaaagtgagaattatttgtgttgcttacgatacgctactatttgtccttgggaaattttgatacaaccctgtatgggaggacgatcgagcaaaggaaaaatagtgtaatttttttcctacacaggatttctcttctgcttaacgaatgaatggatgaatgcaattacacatgcttcttgagctcctaaactttacaattctgtgaaaactttatatgaatttcttaagaaatggttttaaatccgttttgaactttataattaactcatttatttgtactgttgaataattatcacaagtcaataagctatttaactatttgcccgtacctcttttctcttcctttcagaagtctaagctacatggctccgaatccaattaaatagcaaaaacttgagcaaattagctatatcaaaaccctcctttcttccaacgtttataatacatgatatcttttgcatgcacaatcctataattccttcattttccccatcatgtggttttcaatcatacagaaaacgataataaaaaaaaaaatacatgcactatcctttttcacgaacatgcaaaaagattgcacgtcaatagaaggaaaatagttgttccacaatgtaattagccagacaggcttttgccaggggaagagagaaaaagcaaaacaaaaattgcagctagaaaaagagaaaaactactactgtggctaaacgtaactccgattagcacgaagggagcagagccatactacattcccaagaaacgccaaaaataacaatgctagctaaaaaccatagatgaccctccgagaggatggacaccataacaactgagaccgaagagagcgcagagtcaaaaaccctgaagttatgttccttccacaactgctaagagaccaggaggaccaaggagtcgaagccggcgcgaatatgctcaggtaagcaggccctagaagatgtacaccagacctgaagccagctgtcaggggggagagagggtaagcctaaccaggaggtgacagcacacagtgccagacctgtcgagcgaacacacagccgaggaggatgtggtttgccatctgaagatcctgattacaaaagaggtaggctgagtggctattgatgccacattgccactatctccaggtacaacaaaactttaagatgatggcactctttgtataatgatcacttctttcttgtgatcaatctgcaaagcaaagaatcgtcgtgctggcttacaacaagtgtcgacaggggctcgtgcatggtggtcacattcagggcgaagcctacacactcctgttaaatctgatgaaccccagcctatgaactcctattaattcatctgttcgttgaatccccctggtcctttctcccctgcctttatgtctcatccgtctttgttaaatgggggccgtgaaacgcaatggcttagacgcatagtcatcaggttcggtaagatcctaataaaacgattgttaaagcaaagcgtagtaccgagtaattataatactgacagtgcttttgtgtgcttagcttgcaatatactatgtgttcatgcagtatggtcgatcgctagctgtcagcactatactatactgaagtgatgcgataccgtaatcttggcgttgagtagagctagcgtctctgtctgtccctgtctttttatcataagtttctgaccggctgcatgtacgcattttgccgagcacaggtcacacaatgacaagagcgtagggtcgtcaacaatgcattaaggcataacgaatataaatcggatcagttgtgagctgtgatctggggtgtgggcccgtgggtggtgtgggttggtgagacagtgagtttctttgttaaatgcctgattcgctgtagtagaaggggagagatgggatggaaggaatatattgactatcagcagcatctactgctactatatgtatggccgatttaaaaaagataccagtcactctgattcttgttataagttgttttaattttttaatcaaattaataatacattttcaatataaaacaaatatattatgaaaatatattcaatgctagatttcatgaaattaatttggtgttttagatgttgataaatttttctataaatttggttagattaaaaaattaaccagaaaaaaggtaaagaaaaacttataatagaaccgcagggagtataatccatagattattacaactaatatctatctgataatatagataaattaagtatttaaaaataaactcaataaataggttagaataattggtctaaacaacacatttgaaacaactttttttagagaaaatatattttgaaaaaatgggctaaataatctacggtaataatccaacaaagtagaataggcctagttgtttgctgaccaattaaggcctcctatggcaatggcaagctcgggatgcgatcacgttgcaatttgatcgatctacttcaatttttcggaggggtccaaatccagggccaagaaggcaagaacatcatcgatatcaaaatcttttgaattaatttctttctttcttttcgtgtgaagacaatcaatgtataaatagcatacgggatcaatgtgtacgtgtacgacgaaacacatctaccatcgtcgtgtttataaattttggagagaaaattgttgcaaacaggcacacaaaactagtataaagcgtcatagtaaagcattgtaccgtggacctagctatgacctgatttgataataacagggaatcgtgacagaacaccttcgctagctagcctcagacagttggacccatatctatttctactttgattgcgtcatatttaagcctttttctacgatctacgctatattagtaaggaaactcatctatttttctattttgataccgtaatagctaggaacagcatgttgagatgaaagagtgtaaatggtgtaattaattcattttctagcaaaagaaagaaatgaccgtggccagccacgttgaggcaccgaaattaccgatccacgggaattagaccgtagactctgtaattcattaatttgagaacaaacaatgattgggaaaaaaatccatgaactatataaatactcctattgtttttcaatagatgacgtcgtggaattttgaacatacctttgaccactccatttgtcttattaattttttttgcgcaaatacataaaatataaatcatacttaaagtagtttttagtcataaaataactcataagaaaataaatgataattacataattctttgaataacatgatgattaaacatgtgtcaaaaatcaacgacatcatgtattagaaatgggtatattactacttaacgttcgtatggttagtttcttcattcatcattttgccggattttccttttttgtctgaataagagcacgcgcagaggctcccaaggaaaaagatgcagcagtgtaggtggagggccggtaagggcatactgggcctcggttgtctaggtattgggcctagctctccggacgattggtgaaactccaacaaaaccgacgaacgaatgtccccaatggcctaatcttttcttagtgtccggagaaggattatttcagcctttttaaaatgtactcccatcatcaaacaagtgttaagcatatttttttctaaaaaaaattgatcatatttgtagtttttatgtactaaattaattgttaatctaaaccctagaagccatcataattcattggttgcatgcatacatatagtttattggttttgttaaatggtggatgagttaattcctccttaattttgatgataaaataaaaggttttatactttttagatgtaagagtactccgtaggtacttcggtagagtgtatcctatcatcattcacgttggacgtggtttaggggtgcgttgtcaaaaacaactttttcatttgaaaacagtgtatatccacttattaatgtagaggctggttttttttatctactagaaaataggcgtgtcatgtgtgcatgataacgcggtcgtccgagtccaacttaataaagcatcgtgcgtgcacaagaacgcaactgagtgcgcttaggacacattttttttctcacccgcatcgcttccccacgcaaaaaccaccatattcagtcaatttatactattattatatttgagcttgctatgatctaacaagttaatagtaaaaatcattataatgaaaatagataaattatttttacctgttgcaacgcatgagcatttttgccagtacatcttaaaactgagtcactggatcactgaaccgatatctatactttctataaagttacagcccactaattctaaatctcaacatgcaaccatgccacatcatcatctattagcaatatatatatatatatatatatatatatatatatatatatatatatatatatatatatatatatatatatatatatatataatctcatgtaagcatataacattatctacaatttatttaattccataaatcaatatgcaagcatatccaataaccacactcacatcatttgcacaatattttaacaaatatatctattatttttataatatttaacatatacttcatgataagtactaataaaccctgatgttttactaacaaaatatattgagaattctcgtagcgaagcgtgaggaatcacctagtatcataaaaatgagcgtcaatataaacgtctcgctgtcgaccgtggtccgctctgcagcccttgccaccgccttggtgaggcaggcgccgtcggtcaatgtagcagccagctactcccttcgacctcatagaaaactaagctaatactggatgtgacatatcctaatatttcgaatctgaacataggctgattttttatggaacaaaggcagtacctaatcgatttttgaagttcattcactcatactcctagtggtattaatatctcatatctgtctgttttcaacacatagcacgaccactacgagtagaatcccttaaaaagaaaaacagatggaaaataaaaggcagcgatggtcttgggatgtgaatgtctcatgtgttttttttccctgaaaggctgaaactaccatcaaggaacttgtaataatagatccattacataaaatattcatattcatcatctagacctacgtatggaaagcagacatcactgtggccacccaaatattgagcacaagtgggatgcctaagttccaactcccaaacttggcacccaaaacaatgaactttaaaaaggaaaagaagaagagttattagtacatatttaaaccaacgaaagaaaattatcatgtcatgtgttcacaaaagagagaaacagttgagatccacctcagcaaagaacaatgtaagagtgccatctgaatctttcaccacaaagttgtagtgtgcatatactttcccatgttcatcaaaaagagtatattctttcagttccataatctctaactcggcaggctgaaataaacataatgatattagtccagatatgtaaatcatttccaactcccaacccataaaaaaaattttcaactttgcccaattagcctaggcaaaactaacacttctagaacaagacagatttagaaattttggattgatgatcgaaccaaaatatatcgccattaatttcgtggttccataccggcatatttttttgcttggcatacatgcgtagtggtattttcaacatcttgcattcatcctgtcgtttgcgtttttccaaatcttcaggcaatcgccacttctctgcgaagggcttagcatagcgttcgcaggcagcaataaaagcatcggccagttcctggtcatttttatatggcgatgatcgagtggaatcacgattgtccaggggctgtaatcccacatattctcccccactgcaagtggatataaataaatgtaaacagaagcattcctatagcttgctattctcctacttcaactaaagcatgcagtgaatagattatatttctaatactaggcctgttcatttaactattttgttgttttggtacacaataaaaacttggcttagcttaccaattgaaagatggaattcaagctaaggaggaattggctagttacacatcgagcaaaaaccttaacttttttccttttaggaattcaaggaagcttatggtcctagtttttatcgaggaaatagtagaactactcatatatatcattaaagaagaagcaaacaaaggcagggaaagaaaaatcagatttcagcgaatgccacaaagttctaaaataattatggtttcacatgtttggagcgtgcacagtctttccatctttcagtgttttactctagccactgtggttcaaatccaaatcctgtacaaatatttatgcacgcacagtgcgcgcttcaataagctattgaatattttaatattatggaattttccaagaatctgaatgctagaaagcctagaacgtttgctaagggtatgaaactcgtcagggtgtgtgagttcgcctattccgtgtaacaaacaaaattgggtgcctctttaatctcatcatggaccaggttacagcgagcacagctgcgtagagcctgcaatctttaagctaaaattgaaggaggccacatacctgtcatcatcaatttttgggatagaagtatccgaatcgctgcccggcaccgagttcaaatccatcaagattgcttgttccttcacaaaacgaaaaaaaaaaacccaatcagtaagtgttggcagtctgcaatgcagagatagatatagtccgcggctccgggcgagttggggatcaacaactcgtttggggcgggcaatcgcgttggcgcgaggggatcagcagcagcagcagcggatgtggcggcgagggcgtgcagtgctagggctcggtcgcttacactttggacggagaacggcagggcgaggaggggatcgaatcgggcggaggagtgacggatattttcctcggaagaagtatttatttcagcctcctgcctgattttcccccacatttgagtaggtttccttcaagtgtatccgatcaggattactacaccttttggtaagatacagattttacctttctcggtaagatacagattttatctttagttagcatgttttttcaactactgaacggtacgatttatgtataaattttatatatacagttgttttaaaatatcaaatatatctattgtcaagtttgtaataattaagacttaattaattaatcatatggtaatagacttcccgttttaaacttcggatttgtcttgataggagttgtccgctcattttttttaggtgtttggtagaagttgtccactcatttttttaggtgtttggttgaagcgcaagggtagcatatgatcaccagatagagaacattctatttagatactgaatgggtgcatccggtcgaattggtcggacgaggcacgccagggggtggctcgcccttgtcgctcatacatggtggagagctagtcacatcccgtaggttccagttccaccgctcggaacgaatgccatccccttacattcccgtaattagaattacattcgctctttgcacttgcaacacatggacattttactatgaacttaaaaatacaggtggataaggtcccctactgtgttcatcacatatggcacagtatagcctccataacagaactagtacataatactataacataaatttaacgagtataaaatgaatggaccaagggtgtgttcgcaacccctttttctaacccacctatctcgttttccgcgaacacgtttttcaaactgttaaacgggtgcgttttttgtaaaaagtttctatacgaaagttgcttaaaaaatcaaattaatccatttttgaaaaaaaatagctacagtaatacttaattaatcacgcgttaatggaccgctccgttttccgtggatactgttccggctggcaaccataaatggcgaacacagcccaagtcctgtggagttgcagcccctttatttagaccgtgtttagatccaaagtttttcttcaaacttctaactttttcatcacatcaaaattttcctacacacaaacttccaacttttccgtcacatcgttccaattttaaccaaacttttaattttggcgtaaactaaacacagccttaaatataagcggtctgcagcacagatatcctggatgccttaaatataacatgcaacttcatcatctatatctgagaatataatacagatatccctatggccaccgaaatagtcagcaaaagtgggatgcctaagttccacgccacacttttggcaaccaaagcatttacctgaaaaagggggaaaaggagaaggcattagtgcatgtcttatgaagaaaaaaagaagacgacgaaagagaatataattatcctgccatgttttcacaaaaaagcatagatgctaccattgtcattctcttccaaagggcagcacaggtaaatgccactgtcctctttgcagcagggacatgtctcagcaaagaacaaagtagttgtgccatctgaacatttcaccaaaaagttgtagtgtcggtattctttcctaccttcatgaaaaaaactgcttcctttcaattccacaaattctaactcagcagcctgcaacataaatgagatcagtccagatgtgtaaattgcatttccaacttccaatccacaaacgaacattcaaactttgccaactttcgcctaacacttacaaaataccgctgaattagtaatttatgaggttgactagccaaaatgtatcatcattatttttgtggctccataccggaatattgttttgcttagcataagcgtgcagtgctattttcgcgatcttgacatcacgcttccctttgagtacttccatctctttaggcaacgtgagtggcctcatatggcgtttggatgcagcaacaaaagcatcacgtagtttgttgaattcgtcctcactgcatgtgaaaatatgaaaacataatctaagggtggtgttcttgctgctattaaacaaaatcaggtagtgaatagattatgtttctaacactaggctattcattttgcagatttgttgttttggtccatatattctagcgaaaccttatttgttttctttgcaaataattcaaagggggtcatgaatctctctccctctcttatgaggaaccagtggaagaattcacatgtattattaaaggagaagcaaacaaatagctaaaagaatagaatagctttaagtgaaaaccacaaagctgtatataatagatatactttcgaatgtaaaaatagcttcaagtgaaaagcacaaagctgtataatggatatactcccttggacgcatcctacaaattatttgcatctttctctattgcatatgtttctcccaagcatcatattcataattgttttactccacccaccaatcccggaagcgtgcaatgcaatctttaacctaaaatcgatcgaagtaggccacatacatacctgatatacatcgagatcgatcgagattgctcgttccttcacaaaaggcaaacaaaatcagccctaaactgaaatcgcgcgcagatcgcgagttgggaatcaagagcggagatcgcgaggggatgagcagcagcagcggaggtggtggagggctggaacgaatcgagcggcgccgcgccgaggagttgcgtgtcccccaaactgtttgatatttacctcgtccggaacaagggttatttcagcctcctgactttcccctcatttaagtcggtttcgacttaagattcttgtaataatctgattatcgaatcaaattactataaactagaccttccttttttgaacgctcacgggggaaagactccccacctgaataagattaaccaaaaccaaatactgtacaagagctgaaaacaaagaaaggggcacaggcgccccagaaaaaaaaaaccacaacaggcagcaaaagaagaagaagacccaaaaacgggcacagactaagtttcagcaaatgcagcggaagcgagaaaatagccttccagatggagaccacaaagcaatcgttacttcggaagcggtcagaccaacgacctgcatcctagatacaggcctgagaaggcgatcgatgaactaaggggatcccttggataagctatagtagaataagtcatgagttatttgtttctctggattattaggtttaaaaagctaatgtctataagggcatcaccaatgtttactactttctccgttacccaatgtaagtcattctatcatttcccacattcatatcgatgttaatgaatctagatagatatatatgtttagattcattaacatcgatatgaatgtggaaaatgctaaaatgatttacattgtgaaacggaggaaatacctactttgtgaataatggtaggtcttgtttcagtgggtattagttattgttgtagctacaatattaaatgaacaaaagtgggtggtaagctgggtcccacaaccactagacatgagagagggaggagagaaattatttgtttatttcttatggctaggtagtaagcatattacctggtatttgttgcttactactcccacagtgtatacaaccgggcagtagtagtattttatttcttaccacccactttatatgcacattgtgaatgctctaatgctctcagctattgtggaataggtggaggatgagacggcgacgacctggggaaggagccagggcattggtgggggcttggagaaggattcacgcgcaaggttagggtttgagggaaggatccacgcgctgggtgcgggcttggggaaggattcacacgtgactagggagagagaaagcggatgcacgcgcggccgggggagacgccgaattcgtgcacgactaggaagagagaaagcaaatgcgttgtggccgatctgttgggttcgatgacaatgttgggtaatttgcataaaacttttaagggtagtggggctttagctatccaataatatgaaaaaaaacacattagaggagattaccagattatagtaatatggcttatagtttataattataatctacttgtttgtttcagattataataatcctaagctgaaataaatatgaccttagtataaaccaggatttatagtcagacgtgacgtagagaatgcgtctcgtgggaacgttctatactacctccgtcccataataattttatttctaaaaaattaaaaactgattaacaaccaacataatttaccgcaatagcttttttttttaactatgctgtttgcttttcttcgtatcgaaccagatgctatattgtacatcgttgaatatagcgtccaggtctggacatttggcgtccacacctggatgctctggtactcgcggcaactattagaaatcgacctatgatttatagtactataagttaattaatgagttattaattgttatacaaaagcatacagtgtacatcacaatattgtagcaccgttccagagtagaacctacacagaacataaattacatgccgctttgctaaagcccatccgagaaaacgttcagcaacacaacctttctacttgcgggtgattctgaaactaatctgttataagtaggtacattaatattagtcaatagtcatcaaaacaatactctacatctatatattcagaacagatatccttgtggccacccaaatagtcagcagaagtaggacgcctaagttttatatgctgcactcggcacccaaaacaataaccttatataaaaagaaaaagaaaataagttaatattagtacatatttaattaaacaagatgaatgaaaactacaatttttcacaaaaagagaaatcttatttaccattgtcattctcttccaaaggacagcacaggtagacgtccttctcctctttgcagttgagaaaatccacctcagcaaagaacaaagtacgagtgccatctgaatcattgatcaccagaaagttaaagtgtgcatatactttcccacattcttcaaaaagactcctttctttcactttcataatttctaacttggcaggctgaaacataatgatattagtccagataggtaaattcatttccaacttccaatccacaaacaaatattccaactcttacccagcctaggcaaaactaaaacttatacagatataaaagtacaaattcagaaattcgaggatgtctagccaaaatgtatcatcaatgttattttcgtggatccataccggcatatctttttgcttggcatatgcgtgcagtgctatttccaccatcttgcatgcctcctcttcttgttcaggaaataaaatctcgtatgacgaggggaacacaccgctcttgtaagtagccattaaagtaacatacagtcccgtgtcagatatatatcgactaagtagtctaggagtgggatcatcctctatctgtagtcccgcaaaatcaccttcactgcatgtgaaaagatatgaaagcataatcatccccaaaatgcatgtgaaaatctcatgactcgaatgatatagtgagcatcgattatatttccataaacctttaaggtggttcttgcttctaaaatcaactaagcaggctgtgaatataatatatttctaaggctaggcctattcatttatctaatttgttgttttggaacaccagttaaaaaaatgattggctcaatttcatcttactcacaataattagaccgagactgaattgcttggtgtcaccgaatgcccttccctacctgcgggtcaaattgcatacccgcgctgctccgatagatcaccgggtgcaaaactggggtctgcaccagcctcaacggggaaactaccaccctaagctcaataagactttgactaaccaatatttttatcaccttgcattattgcataggcctcatgtctacaattatctaagttatacttttgaataagcatcagtccctgcgtgaggaaagccttcaatccatgtctatctacagtggcggacgcaggatttattggtcaggtattcactcaaacaattgcaagcatcttgtgcctgatgtttggtggactagggttagaagatttgaagcagttgactaactaagtgttgtgagctaggagtgcaggagtatatttgttgagaaaaaatattagacaatcgagtatatatacatgtaaatacctacatatattaagttcttttgtgaaatttttgggtattcccgattataaagggaatacccactgcttccatcactgtctagctatccctatcttgaaggttaaactccttcggtgtagtagtagtttatcctttggtgtagtagtagagttgtgggtgtatgactccactcactatggttgaaatcctagtgtcaacattgatgcatgtgaggtgggcttcaaataggaattttttgtatagggattttttaggaatttcctggcatccattctgtggaaggtttgttcaggggaagcacttgtcagtctatgtccatctataactaaaaagaaaaaaaatattctagttgcctctctaatttcgtttaaaactgacaagggggtggaggtagatctaataaatctcatctcatcaggaacctatggttacagccttacaggtagcacagaccatagagcatcagattatttaacccaacgacgaattaagattctgggttctaatagggtcgcacaaactatgccgcgagatataaaccttttgtcaacaactttgtttcgccttgcctcgtgttgtaactagctggatgtaattatttctcaattttatactccttctgttttatattataagactttttagcattgttcatgtttatatagatattaatgaatctatatatatatatatatatatgtgggcaatgctagaaaatcttataatatgaaacgaatgaagtaatacaaagatacgcaagccttgtgcgtgttctcgaaacaaaaagaaaaataaaaatggtcgcatacctgaaatcacagtgcttgcgacggcatgatgaatcgagggtcacatacaccgtgactgatcgttccttcacaaaacgcaagcaggtcagtatgtatatatatttacagtccaccgagaagagatatcaatcactccaaggacacattcacacgagaggaagaagagggcgctcacctgaatccgctggcagatcgcgagggcgagggcgagggcgagtcggggatcgacaagagcggtggaggtgacgcggtcgatcaacttggcgacggcgaacacggcgagggaagtagcagcggaggaggcggttgatggccggcggtgagggcgtgtagctagggctccctcggcgtcgtcgtcggggttgccgtcgcttggaatttgggggaatacatagcttccgcctcaacgcgcaacgaacgccgaccgagggaacggcggccggcggccggcgaacggatcaaatcgagcagcggcgagggaaatcggggggagagagaaaggtgtcgatttatttcagcctccggcgagcgtgtccggaatatacgtagtgagctgcgagcgtatccgagattccgatcaggtttcacgccctgattgttactgctccggttaaagttaaactgcttttaaatttggatcaagtttatagaaaaaataataaaatatttataatattagattaattttatcaaataaataattaaatatattttcataataaatttgttgaaaatattattacttttttctgttaaacttcaatcagtttgactttaaccaaaatcaaaacgtcttgtaacataaaacgtagagagtaattacgaaaatactttacctcggacgactggcgcgggggagccggatcgggcgctccccctgcgcaccctccctccgtgttgggcccacccacttctacctcccttttttccacgaaagatattttacctaatgtacttataatgtttcactatttataaatctaatgttgcagtgaattaaaatattattttgcaaaaaaaaactcacatattttggaaactctctattaaaggaatttgatttattttttgttccaccaaaaatgtttcacctattgtactcgtaatatttcactatgtatagatctaatgttgcagtgaacgaaacattccattgcaacaaaaaaacccacatattttaaaaccctctattaaaagaatttggtttatttttttgttccacggaaaaatgtttcactatgtataaatctaatgttgcagtgaactgcaacattctttcgctatttactgaaacattgtttttatataaggtgaaacaacacccgatttaaacgagtgaaacattttcgatctacttagtgaaacaattctgatatacatggtggaacatcttgcaacatttaaaaataatttaataataagcttttttttttgttggaatatatccatgtgtggtcttgttttaaagatttaattgcaatgaatttaatggtgcaatcgaatcatgatttggataagtaatttagaagaaaaatcagtttaaaatagttttatacgtaaatcgggcgctgacgtcagcctgattttactccaaacggatcgatcgcccgagccgtatgctcgtccgagtaattaccaagtcattgataaaataaaaagtcattttttttgtgtgggatatctaaaataaaataatagaatattccttctccctcttcatttccttcccatacctgatatccatcgagattgagattgctcgttccttcacagaaggcaaataaaaaacaaaccgcgcgagggcgagttgaggcggtcgatcgcgtcggcgaggtagtggagcgctggcggtcttacacttgaacggacaacgggcttccgatccctgggaacgacgaccggcggcgaacggatcgaatcgagcggcgccggagaatcaatcgggagcggaggaggacccgttgtctgatattttcctcggaaagaatggattatttcaccctcattacattctcccgtttaagaatgtttccgtcggagtatatccgatcaggattatattcaagcccgatgctccgttcaaaaaaaagcccgacgtggtgtacaagtgcatgggaacgttgtaaacagcgtctatataaaccaaacgagaaaattatcttgccatgtgttcacaaaaaaaggaaaagaacaagagttatcagtacaaatttaaaccaaacgaaagaaaattatcttgccatgtgttcacaaaaaagagaaataaatcttcttatattcgtaccattgtcattcgcttccaaaggacagcacagaaaaacatccttctcctctttgcagttgatatccacctcagcaaagaacaatgtaagagtgccatctgaatctttcaccacaaagttgtagtgtccataaactttcccatgttcacgaaaacgagtatattctttcagctccataatctctaactcagcaggctgaaataaacataatgatatattagtccagatatgtagaacatttccaatttccaacccacaaacaaaatttctaacttcacccagttagcctaggcaaaactaacacttctcgaacaagatagaatttagaaatttgagattgacgatgagccaaaatatatatcgccatcgttttcgtggttccataccggtatatttttttgcttggcatacacgcgtagtgctatcttcaacatcttgcaatgatcctgtcgtctgagtctttccaaatcttcaggcaatcgccacttctctgcaaagggcttagcgtcgcgttggcaggcagcaacaaaagcatctctcatttcctgggcatttttaaatcgcgatggtcgagtgggatcgtaattgtccaagagctgtaatcctggatcttcttccccactgcaagtggaaattaataaatgtgaacatatatacatatgctattcccctacttgaacttaaagcatgcagtgaatagattatatttctaataccacgcctgttcatttaactaatttgtttttttagataatatttaactaatttgttgttttggtacacaataaaaactttagctcaccaattgtaagatggaattcaaggaggaatgggctagttacactacatcgagcaaaaaccttaacttctttttcccttttaggaattcaaggaagcttatggtcctactttttatagaggagatagcataagaactcatatatatctttaaaagaggagcttggcaaccaaaaaaaatcagctgttttcagatcctgcaatcttaggaggccacatacctataattaagtactatttgggtagaagcagcgggcttgcgagaagatgatccggcgaggggagcagcagctgaggtggatggctgggggtgagggcttgctgctgctggagctcggtcgcttgggagatacattatccttaaaccttccgatctccggcaacgacgaccggcggcgcgactgatctccggcaacgacgaccggcggcgccggcgggatcgggattcgggagcggagtgacgatattcagcgggcactgatttttttttccttcccccacctctttttaagaagggtttttttttttttttttttttttttttttttttttttttttttttttggggttgagtccgatcaggattcatgtccgacgtggagtgcaagtgcgtcgctgggaacgttgtccagaacagcgtttgtactccgcccggcggccggacacgctaacggcaatcctaaccggaatcgtagaaaatataaaaacattaaatttttataaacatttatctagattcgtagctacaaatatttatattttgttggggacggaaggatatctaatatatgttagttggtttctcatgtttaaaattaactagcaagatacacatgctttgcaacgggttgaattatatgagtatattcatatgtgttaagaattttgttcttttttgctgtatctggtggcggaaacagcatatgacgaatgttgggttgttcgatttcttttcttgctctcaattagtttctctcatgttccatttccactcttagtgatggaattcaaagaataacggatcctccatttttcccacggttttccgactccactcttagtgattgaattcaaaggataacggatcctccatttttccggcggttttcctccagttcgaatgagccctcattaaggtgaagggatatgtatagatggccacccaaatagtccgcagaagtaggatgcctaactttcacatgctgcactcggcacccaaaacaatatctaaccttaaaaagaaaagggaattaagtattagtacattttaaaaaaatgaaagaaaaacataattgttacaaaaggagtgaaaattctaattatactaccatcgtcattctcttccaaaggacaacacagatatccgaagatgagattgctggttgctgctgggccagtggtggtggggggacatcccctgaccaaagctccgtgcgcgactaggttggctggcgaagttgcagtgtatgctgggcgtagactaggcgaagtggtttgttgacgcccctggtagccacaccaccaacctttaacttgctcctctggcaattgtcgtcagcggaggtgaaactgcttgttgtggcagttggatgctttgaggaagacccgcattcacttgttgaggaagatttggaattgtgcctagaggatcgatgctaggttcaacctagactgtgatgtcgaaacctatgtcgtcaaagcaacacctgggactatagtttggggcggtatcatgtgagcctaccagagagattggacttgggattgaagcatgttcggcataggtgctcgtgcagctacgccgactcttgccgacaaagctactgttgttgctgcatctagtgaagcatctcttgcaacttgactacctcataacctcatactccggccttgggaccaaagcagcttagctcgtagcccgtaggcactcaactttatctcctcttgaggcttgcttgtccgagttcattgccagaggtccctcgagctaggctttggcttaggcttctaaggcatactcgacataatcttcgacagcacccgcatacctctgcagaaccaccctccttcttgtcaatcttctcttcagcggcattgactttggctaggctccccacggacggcgccaattgttgtcgaaagacaaacacttgtcctggtgtacggaacaaaaaaaaacaatagttgtattttttttattgaacgccctttacaatacactacctgagagctatctataggtttacaacaccaaatctaaccctatggtttaccatgtataggcttttacatttttacccctatatgataagggtatctacagggattttttttatgtccttggctcacttgagtctactaggccttagcaggccaggcttaggccgccagataggcgttgtcagcctactccaatgcgtttcaccacagctcagctcgccttcgccttgactcgatcttggtaagagctccacttggcttcaccatgttccatcgtgcttcgcttgcttcgatgggctagtgaaagagcctcctaacctgcctccaataatacgcatggacaaagtccccatacaatcttttttttttgccgggtcggcagaagaaaggcttttttgccgggtcggtggaagaaaggccgatcaaatttcattaagatggaggctatgtacaaatccccatgcagtcatgacaatatcacatactagcaccaatctaagtagaacccacaacaagcatacgtagaacatgaattgactatagctagtacaaaaggaaatggtccagtctggtgaagttccatgcccctttgcttaaattaccttccaaacatcgatatgaacgttcagcgtcacaaccttcctacttgtgagtgatcctgaagccgatgtctttagtaggttcattacataaattcgaaatattcatcatctgtatctatgtacggctcacagatatccttgtggccacccagatagtcagcagaagtgggatgctgaagtgccacgtcccactctcgacatccaaaacaatgaccttaaaaagaaaaaaaaagtattagtacacattttaacaaaatgaaagaataaatacaattattcacaagaaaggaaagataataccattatcattctcttccaaaggacagcacagataaacgtccttctcctctttgcagtttagatccacctcagcaaaaaacaaagtatgagtgccatctgaatctttcaccaagaagttgaagtgtccatatactttgcgacgttccgtaaaaagactcctttctttcagttccatgatttctaactcagcaggctgaaacataatgatattagtccagatacatttccatcttctaatccacaaacaaatattccaactttacccagccaaggcaaaactaacacttctaaaatagggtgtgtttgaggagaaggggattgaggagattgaaaagatacataaaacgaggtgagccattagctcatgattaattgagtcctaactattttaaatttcaaaaatggattaatatgattttttaaagcaacttttctatagaaattttttgcaaaaaacacaccgtttagtagtttgaaaagcgtgagcgcggaaaacgagactcaacctcccctatctccccagaacgaacgatgcaagatttagaaattcaaggttagacagatattcgtggattggtaccagaatatttttttgcttcacatacaagtgcagtggtatttctaacatcttgcactcattctgttctctgagtctttccaaatgttcgggcattggcatcttgtatgcccagggcaagttacaatttttgcaggcagcaataaattcatcctgcagttccttgaaagtatattcatcagatggtccagtgggatcatcccaggtttgtagtcccgcaaaataactcccactgcatgtgaaaagaaatgaaagaatattatcccccatgcataggaaggtttcatagtcaaagatattgtgagcatggaattctatttccgtaaacctgagtgtggttcttgcttctaattcaacaaaagtaggtcgtgaatagaatatatttctaaggctaggcctgagtattttggtatgtcagtcaataaaaaaaatgattggctcagtgtaacaccctgaaaattcgaccgacaaaatcaaaactctaaaaatgcagatattcaaaaaaaaaaacttttcaaactaattgcaacatgccgattttattcgcctattttacctggatttgatctcgaagaatattaatagtgagtaaagaacagttaatcaggaataaaccttaaaaacaaattggtaaaataaatataaattaaaaataaagattaggtgtggatagtaataaataaaatattatcgcgaccataattggatcaattaaatttaattgcgatggaataagaatttaccctaattaaaactcaaataaattatataaaaataaaatatgagtaatattaacctagggtgaattcattagttgagataatacacatattgagtaaacttcgtttatgcaagatttagaaataatagaatcaaattcatataggaaataacctaaaatcgggaataatagggaagtgcactattcattgcccgcaaggtgttcgatgtggtccctagcctttccccttctcccccacctctgccctagccgccccgagcccgcgcgtcgccgccttgcgccgctcgcccgccgcgccgccgtcgccatcgtcgccgtcggcctcgcgccccgtgccgccgcctcgagccccgtgccgctgcctcgcgcctcgcgccgccgttgccacgctgtcgccatcgccgtcgcgccgcgtcgtcccatcgccgcgcgcgtcccatcgtcgctccgagccgcgcgccgccgctgccgagccgttcccatcgccgtcccgctgccgcgccgcgccaatgtcgcccgtcgctgccgcccgcccatcccatcgccgcgcgcccgtcgtgtcgccgctgccgccccgttccgtcgcctcgcgccccgcgcaccgtctcgcgccccgcgacccgcgcgccgcttgcccatcgcgtcgccacctcgcgtcccacgccgctgccg

SEQ ID NO: 7409 - DNA, 94330 bp, Oryza sativa
  unsure (1)..(94330): unsure at all n locations
agtggacagtcatatacagtaaataggctgtactagaataagaagatcagatatgtgtaactaacaaggcgcatttgtgaaatacccaagcagtatatttccactacgaattatccaaacaattaaacataaacactcagaagctgcacaagacactacattactaactatataataaacaagaggaggaggaggaggagcaaattcagaactcaccagggcttacacgcgaagcattccgctccacacagagctgactggataccgcggtcgagcaattctccgccgaagcatagcagcggtcctgagaccggttgccaaacccggcataagaaacaaactccacatcatcgtcggacgtcgccggcttctccaaatcgatcacgtagcgatgcccgccacccccgccgcatttctcccgcgctctgacgctgacgtcgggctttatccggatcgaattcctaccatccatattccgctccgcgaagcaggagcccctcttccgcttactagaattgctggaagcatctgggcttcccagcccggacctaacgtgatgcatgggggttgttcagctgaacccccgcaaaaaaacaaaaaaaaaatcctccttttttttttcctagcctcctcctaaacagaagctgctgctgctattagtaccaggtgagggcatggggattcagttcaaccccaaacttttggatgaacaaacaacaaactgttactcgtattaaggttttaaggctctgaaattaagagaaggagcttcttccagatctagaagagaagaaactagggttaattcgagacaaaaggcactcccgatgggagtgagagatgaatcggaaagaggatgcggatggatgctcaccaggatcccctgctctgctctgctcgcccgatggagatcggcggcgagatggcgcaaggagcggaggagacgagagaccgggagattttcttttacgccgagggaaaggggggagatacgcgagggcggcggcggttagccttcgttatttattacaactatataattttgtcccagttactatacagttttatatcctaatggccgaaatacccttgggatgaaaacttctcaatagtggtaaaaaaattgaaatatcagaatgtaaaacttttattaagtttaagacgagcgacttatgtggtagtttacaatgatatttcggaatgttcagtctgattttgaaaattttcaactcaaaccgacctatagtgggaccaaactaccggaaatcatcgtagaggctcacctatcagtccctggtgaaaaggcggtgaagagaggtggtgtcgaggggtgaagagaggtggtgtcgagggttcagccgaaccgccttcggcacccctcatctccaccctccgcgtggcaactcttggttggctccgaatgacgatcatgggagttaccgacctccctagccattataagctacctacttaaagtagttgagcttcttacttcacaatacacacatcaaggagcaattctttctctctatctcataatgcattctctatagtttagtagaaataaaacttaggagctttagtcctattgttttctcggagttttggatatgtctttagtagtttactcttcttgtaaactgtagttgaattaatagaattatattctttatttatttatgctcataacctatgtctttctttattgaatgcatgttctatgggaagtatatgcttcttatctgcttcatcctaggctagttgatccatgctacggtaacggtccaatgacctttataggttgctctaactcaaatgtgaccattcgaagggtgggagtcccaagggagttactgatattatttactagcacaagcatggtgcttagattagataaatgtttgttggatgtgggtgtgccccacgaaaagtgaggtaggaggcatgtagtgatagttctatttgttctttgtattcctccatgttcaggtatgacgtaaaagtgcgtaaatgccataacctatgctggtataccaacaggaagtggtctctcgatagtatcagagtgcccggagctaggtcctttgttgtaagtatgtactgcataggttaagtgtatactagacatgaatagaattgaagtaaaattacatcgtggttatctaatgctcttttctactaaacattattatagaggtaaatcttctaggtatccactaccttaattatattatcctaacccctattaaactatggtgaattaattatagattattttatgatgaacaaactatatcatatacggccatcttcactatgaaatataaatgcgatacccaggagaagagagacaacactagtaacagatgaggaggaaggggagcgaggggtatattagtcattcattgtcattgaaggagtagctttttattgtctggtgttagtgacattggtctgtctccctggctgcaatatgtggctcgcaactgcgattgattaaaaaggctttgggtgcaaaccataccctggttgaaaaaaaatctttatctattggctactccttccgtctgaccggatgtgacatattctacgtatgtccaaattcatcatactagaatgtgtcacatccggtactagattagttttttatgggatggggtagtatttgtcaagttaatatttatcatctgaatatatgagaaataaacacccaaaattgttggaaacattattcggttcagaccaaagtcaccataaacaattctatgacggttctttacgagcgattagccgattaataattgagaactattttaggtgtgtaaaagtaatcttacaatagttctccatgggtgatagataattgagaatctttttctgattaggtgtgtaaaagtaaatagtataacgttcttcgcttgatattttcttttccttgatagggtatgcaaaaatgttcacatgggagtaataaattagggtttggttaattaaggtttggttatagtcacatgaatcatgcatcagaacacaccacaaagtcagtctcctaattatttgttgttccaatatactccagtactaatggagaattgacatcagcatgtacgaaataaaactgacaactgagaattctttggatactaggtcggtgtaaaaatatataaaatgttcatacattactagtagtactaataattagggtttgattaattaaggtttggttctagatcacatcatgcatgtatggaaaaaaaacccacaaaaaagtctcatgtttggctattaattccaggatggtactactactaatggggaataattgacatcggtatgtacgaaaatgagatggagagctgcattttttagatgagatttagctgcagatagtactgcactgccttaacacaggaccatttcacatgtgtggttgaacaggacagcatatatggcgtactaataatggaggctaacacatggcccgcttgtctatcacaaaacaggtgtgtgtgcacatcaacaaagttatgtgggcacgtgcaagcctggccgatttcactctcatgccgacctcaaaactggcccggattgaaaaatgtttatgcaattatacatattaaagttttcttttaatataaacctcagaaaaaaaggctaaagtttttccatatatagaatcattgaaacaaaacgtttttgtagttgcaaatagtcgtggccaggaagcacccctgatgaccacgaagaatttcgacgttgctatagagactttattttcccctttatttgtctggactatatcacacgatatgttaaaggtctggattaattataaccggttgttctactctctttgtcaaccaactttttctttaaaaggtaaaataacttttatacacgattttgaatataacatgtgtgttagatttgtgtgtataaatgttgatttattttgaaacgatgtaagtatcctcggagtgtttacatagtgtttatctgaaagacgctaaggtcatttccaacccaatgactaggatagtgtccatagcattaaataagctgacacctaggattaaaaatgatgtggcaagtgaataaatgaggaaagaaaagaaaaccatatcttacatgagatatggtttctacacaacatctaagacatatatgagataaatagcattaaacttaagtataaaatagtggtacttgtattgaaaaagtaatatctagcactagtttcttgatgatttggagtttatgaaaactacgtctaatttcttaagttggaaatggcctaaaagaagaatctttcaaaaggaagagatgaggaatgaaaaagagtcaaagctcatgaagggactcaagccaacgcaaggaggccaagtgacagcagccggtagctgtccccatctctacaatatccagcacccagcaaaatcacacacgattctcagcttcttccccttccttcccaactcatctccatctttttatttacacgcacacttctcaaactcgcaaaacgatacggctgaaaaaaaattccctttataaaaattatttaaaagaacatattaatctattttttaaaaaataagataatacttaatcatgtactaataagttactttgttatacgtacctgaggattactccctctatctcaaaataaccaatctcgtataggatatgacacaatctagtactacaaatctgaatatcatatactacgaatccaaacataggtatgtttatatctgtaatactagaacatgtcacatcatataatgagatactctattcgtccgtaaaaaaccaacatagtatcggatgtgacacatcctaatactataaatttggacatacatatgtctagatttatcgtactaaaatatatcacatccagttttagattcgtttttcatgggatgaagggagcaggtttattttgaaacgaagagagtacaccacatgcctacgcagcctcatgtccagtcgagtgtaaccacaagcccacgggaatttgctgtccaatgaagaccccacaaaacgacaaactccaataccacacacctccgcttccctccaaatcgcaacagaaatccgaagcgaaatcgcgcacgcaccgtctcgcgatgccgtccccgtcgctccgcctcgccgtcgtcggcgcgggcgccgccggcctggtggcggcgcgggagctcccccgggagggccactcccccgtggtgttcgagcgcgccgcctccgtgggcggcacgtggctgtacgacgccgcccccgccaccttcgacccgctcgccgccggcgccgcccactccagcctttacgcctcgctccgcaccaacctgccgcgggaggtgatgggcttcctcgactttcccttcgcctcctccgccgcggaggccggcggcggcggcgacacgcgcaggttccccggccacgacgaggtgctccggtatctggaggagttcgcgcggcggttcgacctgtacggcctcgtccgcttcgggacggaggtggttagggttcggagggatggcggcggcggcggcgggaggtgggcggtgacgtcgaggaagatcggggagaaggggaggcgtgaggaggaggaggaggtgtatgatgccatcgtggtttgcaatggccattacacggagcctcgcgtcgcccacatacctggtaatctcctcgtcactagcaaagttgcaatctaatcaattttgcttgaactactcctaatcatggacagattcaaggaattaaataatttggtacttcgtactgttgccaatgtatggttgcaatgttgtgatcgtcgaatccaggaaggttaatttaactccaaattgaactcaaccgtttgaagttttgaaaatagattgggattgatttcaaatctgtatttttttaacactgttatgatgatcatcaaatccaggaaggttaagtaaactcaaaattaaactcaactgttaggttgggattgacttcaaatatgtattctttaaacactgacaggggtggaggcttggcctggaaagcagatgcatagccacaattaccgcgttccagagcctttccacgatcaagtaactgtctttctttacctgtgcaatctttcctatcatgcatttgtgcttaaatgttatcttggttgatgcgttgcacttgtaggtagtgatcataatcggggcatcagcaagtgcagtagacatctcaagggaccttgcaggtgttgcagaagaggttcatgttgctgatagatcagcacctgcctgcacttgcaaaaggcagcctggatatgataatatgtggctccattccatggtaaacgcccttttctcgtggtgagtgatagcatatggtagctttatccgctgaaagggctgccacatttagcacaactagaaaactaattttcaagctgcagattgatcatgcacaagaagatggctgcgtggtgtttcaggatggcagctcaatcaaagccgatgtcatcatgcactgtactgggtatgtaaacctgcactaccctgcaacccatttctcggcttcttgtgcgaaattgcatttttgttactacctccgtttcaggttatgcttagattcattaatatcaatatgaatatgagcaatgctagaaagtcttataacctaaaacggaggaagtacttcagttgaaactaacaatgtgttcctttcatctgcctgtcgactagctacttgtatgattttccattccttgaggatgatagcgccatcaccgttgatgacaactgtgtcgatccactatacaagcacgttttcccaccagaagtagcacctcacctgtccttcatcggattgccatggaaggtcattatgtgtgcaaaaagtgatgccattcactttagatgcacttgtaattaagttgtcttgatcttgtgatgatcataggatgtaaagcattcccctgccttgcttcttgcaggtcattccttttccattgtttgaactccaaagcaaatgggttgccggcgtgctatcaggacgagtcaagcttccttcgagcgaagaaatgatggaagatgtgaaagccttccactcgaaaatggaagcgcgtggatggcctaagagatacgcccacaacttttcagactgtcaggtagcctggagatgctttgagtgtcagttaccaaagttctaatgttttgaaacgaaattaataaatatgattgtcatctacctgcaatttttcagtagtttcgtttatgctcccttgataagcttgttttcatttccagtttgaatatgatgattggcttgcggagcaatgtggccatccaccaattgaacaatggaggaagctgatgtatgctgctaattcagagaacaaggctgctcgtccggagagttaccgcgatgagtgggacgatgatcatcttgtggcagaagcagcagaagatttcaagaaatacttgtaaaatctcaagaagatttcattcaatgtacatgattgcaaatttgcaatgcagaaaacatcagagaataattctgtacacccaaaatctcaattcatgtctggaatgggcacaaatgctcgtcatcagatagttggtttacttgtgtattatttgatcatttgatgcctgtagattgtaataataacctgaagcaaaaacaagagaataattctgtgcatgagaaaggagaaaccttgagtctggaacggatatgctggtcttttttatagtctcttgggaaatgaaattatcatttgagctttgtaggctgtgtaagatggcaaaaaaatggtannnnnnnnnnnnnnnnnnnnnnnnnnnnnnnnnnnnnnnnnnnnnnnnnnnnnnnnnngtcgccggcttccctgtcatcagttcaccaacttccttgnnnnnnnnnnnnnnnnnnnnnnnnnnnnnnnnnnnnnnnnnnnnnnnnnnnnnnnnnnnnnnnnnnnnnnnnnnnnnnncacccgggcctggtcattgcgaccctcttttgcgagggggcaccccttctcccgaacccgggtctgtaccgtggcagggtactattctaccactagaccacaggtgcttgttgtgttagttagacaatttctcaattaaatagtctatattttccctgcaaagcgcaaacaaatggttactcccttcaatgtctcaagggaccaaggctgttctgctgcatgatttcatttaatcatctcatcaacgcatacaattattaggcaaatatcaatattacctttcattatagcagcaattcgccttgaaccatcaaaaaaacaacaagaggagcaatagaaaagaaaatgaaaatctaacaaaaccaatgtactccacatccatccgcccaagtgtgaaggatgattggatgaaacataaaactaactactcattcactacaggtgctcaaatccaaacttgagcatatgtcatcaaaaccatttcttgagttctagggtccaaaaaagatcgctgcgaagtgaaaactgatgcttgcctccctccatcatgctcaagattgtcaactgtttcatgatttcatttaatcacctcatcaatttatgcaagtataaggccaatatgaaggtcgctcaatttatctttttatcatagcagcaatttgctttgaaacatcacaaaaaacaagaagaggagcagcagagatgaaaatgaagatctaatgtacatccgcccaagtatgaatgatgattggaagaaagtaaaaaactactgcttcctccgtttcatcatgtaagatattctagcattgtgcacattcatatagatgttaataaatctaaatatgcatatatgtttttatttattaacatctatatgaatataagcgatactaaaaagtcttacattaggaaacggagaagtactaatcaaaatccaaactggagcaatatgtcatcaaaaaccatttcttgatcctaggactcgacggcgtcgtcctccagcgagtatatcctctccggctcgccgtcgtccagcgcgcggacccgcctccgtatcctgcggagcgcgccgtcgacggcgaggtcgacggcgtccttggccgtctcgctcagctccgccgtgctcccgtgccgccggtacagcaccctcggcgccatctccagcgcgcgctcccgcatcctcctcacctcgccctcgcccaccgccgccagcgtctcggcgatcttgacgccgccgaacaccaccgactcctttggtatgtacaccgagaactcgtcgtacctctccgggggcaggtgccacccgtactgccgcctcgccgccgcgtcctcgaagaacaccgggacgcagccggcgaggatggcgtcgaacgtggagcgccgcgtcggcgtgtcccccggcggctggaggcagaacctggagtgcagcatcggccgcatgtaccggatggggtcgtgcgagcacctgccgccggagcagtccacgacgacgcacgcgtcggtgcggttggcgcactcggcgaggatggagccgcggatgttgggcctggaggggcgcgacacgccgccggagaagagcatcagcgcggggcggcgggcgcggcgcgcgcgcgccagccacgcgcgcagccgcggcagcgacgccgggtggaacgacgtcgggtgcgggatcgcgtgctcctgccacggccacgcgcgggactccagcgtcaggaacgtgaggttgccgagcgccgggagccggagcagcgacgtggtgccccacagcctcgcctcggcggcggcggcggcggcggcgcgcaccggctgcgagtagtcccacgcggacccggcgagcaccaggaaatggtcgtggccatggcggcgcgccaggatctgcggcctgtcccgcgccaggaactcggccagctccgcgccgtgctgcgcggaggagtcgaggagcgccgggtcgagcacgtaggggagcgagtcgaggcccgcgtagtaggggaggtagacggcgtcggcgagggcggggtcggcgacgaggcagccgcgctcggcgacgcggcggtggaagaagacctcgaggaggcgcgtgtcggtgcggtaccaggagcggctgctggagtgggtgcgcgggccgaggccgtggttgacgagcgactcgcagggcggggacgaggtggccggcgtcgacgggtcggcgagcgggaacccggcgtcgcagtggcggaggaggtgcgcgttgaatcgaggcgggaggcgacggatgtggatccgtcggccggcgcacgggtccttccgcgtggcgccgccttcgccggcgccggcggtggcggcggcggcggcggcaaggaggaggaggaagaagagaggattgggcattttgggaggagagagaatgtgtgggtggtcgtgtaactgaaactgcacggttatttcagcggatgtgtggctcagatttcacactttaatatttttctcctgtgcagttattttcagcggttaaattgcaccggttaaaactaactgccatcatgtcgtggattaagctttagtgcatgttttgggggtagtttttggcgagttgcaacttttcttagaatttttaggtgttagaatctctctcaaacagttcagatttttatctaaattttaaaaatttgtatgaaatagaacttagaagttaggaaacttagttttttccagattctcaccggtaacattttaaaaccttaacctccccaaacaagatcttagtctggcctacatacagttttctcttctgtggtcaaattgagtttgatatttttttcaaggaaaagcttgttcgcctaatctctacgagaaaggaattgttgaggaggattagagatgattaatttcacatcatccctctaattcctcttcaattttctcttgagggagggattaactgaacaagacaataaattattctttttctttctgggtgtaaagcactgaaagaataccgaacgagaagcagttttgcacttgttcagaagttcagacgctggacgaacatccggtcaaaaatattccaaactcacacgctgctactctatatatataatatattggatgatctgggcctagcaacttcttattgggccatacacagcatgttgttagctgggcctattttttccttggaataagttcatatgaggtcccttaactttacaccgagttcgattttcgtccctgaatcgcaataccagatacaacggatccctcaactgtcaaaatcggtgtagatgaggtccctcggcgggtttagattgcggttttaactgatgtgtcgctgacgtggttagtttgacttactccttatcgtatgaagcggcgatgtggcacttggaagcaaaataaaaggcgggacccacgtgtcagtcattaaaaatagtgggacccaccctgctctcttgtcccttctccctcccggccattcttcatccttcctcgagctccctagctggcaggtgagcgtgcgcggagagggagaagggcgccaaccatcgggtggggagcccgacgagcgtgcgtggagaagaagcaggcgggtaggccgacaaccgggacgggtaggtcggtgagcgcgcggcggcaggcaagaaagcagcggccggaactgcacgaccccccccccacccccggcaccgccgcatcgatctgcacgagttgcggcgacggcgagctcacagccgcgggacacggacagcgtggtgttgacggggcccgggactcgagctcgtagccgccgctgcccacttccccaaccccctccacctgcgtcaaagtttttgatattcatggcattctgctcttgttctggtggattgattgattggtgtgcttgtgcggatgatttgtgcgaaggcgacgccaagaacgcccacctgatgtctctggacggcgtcgcggagaggctgcggctgttcaaggccgacctgctcgactacggtagcgtggcggtggccatcgccggctgcaacaacgtcttccatgtggcctaccccgtgctcctctccgcccctaacccaggggcacacctctctcttttttcagcaaaataattccttttcttctccattgacttgttcaaactgtagactgcagttactgaaaatcgacaaaatcaacagtttctactaaaaatgatttgtcgaaactgttgatttctcaacaagcagtagtagctgaagtctgcagagttgtaattaaatcgtcatgttcttgtagctaaatgaattgatgttgttgtaggttcatacacatgctgctgctgtaacgggcacgacgaatgtgcggaaggcttgttcagaagcaaggttgggacttgggagggttgtggtggtgtcatatgtatctgctgcgatggtgaatcctaactggcctgaaggcaaggccgtagatgaagattgcaactcgtgcagatcgatgcggcggcgcagcaggagtcttcgtcggcggcggggccgaggtcgtgcagctccggccgccgctccctcctctcccgtcgcgcgcatgccggcctaccctccccgcccaatggctggcgccctccgcacttctccccgccggcgcccttctccctctccgcgctttctccggccggcgagggagctcgaggaaggatgaagaatggccaggagggagaagggattaggacgacggcgcgatgaagatagagagcagggtgggtcctactattttttaagactgacacatgggtctcaccttttattttgcttccaagtgccacctcaccgccacataggaccaggactaagttaaactagccacgtcagcgccacatcagttaaaaccgccatctaaaccgctgagggacctcatctacaccggttgtgattcagggacgaaaatcgaacttagcgtaaagttaagggaacttatatgaacttattcctttttccttcgctgataagctgctgggccagattgccacaggccatagaagagaagcccatttaaatccagcacttgcgagccgccacggcggctggctctctactctagtcccatccaacgtgctgtactagcagtttcatccaaaaatatactacccctatgtttccgtccgtcccaaagaaatccaattctaaaattgaatctggacatagtgtatgccgtatgcccagattcaaaatctaggattgagtgttttttaagaatggaggaaatagtatagaaaattaacaccagatgagacacatcatatattgtcctaaattaaactctacggaaaagacattcaggtagcactccgaaatcagaaaggagaaaaacaaaaggaggcggcgatcttgttgaacacgtgcgtgcaacgcaattggttaagagtacattcactagtagtgacaagtgagtgagttgattcgtgaacaaacgatatgatgatgtacaggtcggatacacgtgtgtatcgtacgcacgtcgatgcgacgttgcacacgttaattaggagtattctgtcttgtgcgtacgtagctgctggctgctgctgctgctgctgctgcgtcagcacatcgttggatcgatcgagacgcgctgggtttaatttcgtcgcgttggtctcacacgaacgccggcataatctatcgctagatattactcctccgtattaacgtttggcaaccttagcattttatttttggcaaaagaaagtgttgcgccacaggttaccatcaaatcgtgtgacaaattaatgttgcggtgaagttagctactctctccatttaacagtgtaagactttctaacattacccatattcatacatatatgaatgaatctagacgcatatatgtgtctagattcattaacatcaatataaatattgacgatgctagaaaatcttacatcgtgaaagtagctagcagcaatcggttttaaattttacgacctctcgtttcgaagctagtttaccagtgtgctggtcgctttcaatactatcgttaacttttggaaaaaatatataaaagtaccaaaagtcttacctcaaattggttttgttcacatacccttggttaataaaccgtagctaaaaacaacacgcaatgcattatgagtttatttttcatccatactacacataccaatacaaaagaaaaaaaaactagaattctcatatactttattaaatctcaataaaactattatccaccttatctaattctaatacaattatttcttgttttaaaaaaacttagatgcaataattactctaaaaataaatttatttttgaacaaatggaaggagcttaaaacgaacgtattactaggacggagggagtatgagtatgtcttacaagtcaaatcatgaacagtgaaaacaagagttccagtaaaagaaaacacaagtggacgccaagactgttagatcacactctattgtgtcatgtggcacggcgaaaacgtcaagactgttgttatgtacacatgatcacactctattatgtcaccagcattgtcatgtacacatcaacacatgtatgatctcgcttgtcactagcacatatatagacatagacatgtacactactagatgcaaatagatttgggaataattttgtattgccatataagaactttgaagtcgctggcatgacacagtgggagaaaatatatattaatattggtaatcgttagggttagaattgtttgaccgcccaatcagcagtagctaataagcaatatcttgatccaacaccatcggggtaccatgtgcaaccattgccccaattggttaaacggttgcctaattaaacctgtgggatcgtgaccagactagtattgttattgtaccgctgggaggaacatctcgatcaagtgaggtgtaccattttctgttaaaaaaatgcaaggagctaatatatatagttgctatagtagtatagtttaggagacaagttgttggaacgatgcagagacatcatccaagaaatacctttgtgacccttgtctcgaagcttgattaatctggcctcgatcgtgaagatgtactattgtattcatcatatttcccttgttgtgtagttagcatcgtttcgtggttatattatcttaattggaatgcattgatcttttttaggtaagccctactttttttagaaaacgggattacatgccaaattacataaaacttcctttttttggcttcagcactgttttcaataagaaaaataacgaacttcctgtctctgcactcacttatagatacaagcaaccatccaaactttttaccttaatttacgcatgcattattcatagttgtataggcaaaatcaatatcattaatgagaagtactctactccatgatatctccaataaggccagtcacaatggctagtgtcattgcacggctacccaaaatattataccatcttctctcaaatgaaatcttttatgaaacaatccccacagtggaggggtttcactttgacgtttccaagactaagcaaagcatttaattgatacaagttgctgggatcatttgtacccaaaatccggcgcggcgcgggagaatgcggaggtcgcacggcggaggcggacgcaagagatccggtgaatgaaacgaatcggcctcaacgggggtttcactctgttaccgaggacttggaaacgacgctgacgagtttcaccaggatgaaactctttccttctctctcatccccatttcatgcaaataatcattttttattcagtcttacccctattaaatgtgcatgacacaccagtgaaacccccattgtgactggcctaatatcatccacatggcaagtacaattgtactactagtgattggcaaatttcataagcctgtccgaaggaagtactaaagaattaatctgcaccatctctagggacagacaaaaaaacattattgagtactcacaaacaagaaaaatatgaaaaatatgtagtgaaaatcatatatgtactagaaacttgaaaaccacactgaaaaatggagggcatatgcaataggtactggtactagctagctatcagcgtgtaggtgtgtttgaactgtattaacagtttgagtacgcagattaatgcaaaaccatacatactaatacggtgggcatatatgcttagtttcattgatgctagctactgctcctaattaatcctagttcaactcacaaatcaaggaagaaacatcatttgattaattgaaacagagcaggtacttgtactccctgctagtacaattcattcttggaggacaagacatgcaagctttgctagcttccttcgttttgtcaaaggacacagcgtctctagaaattaaacgtgtcacctgtagaagttaaatctccacgcaataatcaacctgtccagttagtccctgtccggcaaaagattcagaaaatttttaattagcccctgtcaatgtctgaatcgatcagcgtacacacacagtatgagtcatggcgatgtggacgtacatacttcacgacatccctccgaagtttccgtacaatttcatgagcttgacactccccgttaatctcttgtttaatgactatacttgtagttgtaccacgcgattccatgaccttgactctttcgttaattaacctcttgtttaatgactacactgtacaacgtattactggtaggtagcttgtgtcgagaaggaatttttcgttggtccatctgttcatgatctgcctgcttctgcttgacctagttaaggccccgtttagtttcccaaaaatttttttaaaaaaacatcacatcgaatatttggaagtatgcgtggagtattaaatatagattaaaagaaaaattaattgcacagttaagaggaaatcgtgagacaaatcttttgagtctaattagtttatgattagccataagtactacagtaacctacaggtgctaatgacggattaattaggctcaaaagattcgtctcgcgattttcatgcgagttatgaaattagttttttcattcatgtccgaaaatcccttcctacatccggtcaaatatacgatatgacacgcaagttgctgctgaaattgccaagcaatgcatgactcggacatatgtgcgcaccgaccatgaatttttctctgaattttccttgcgattctctgaagattcgacaggtatctcgcacacaaatacattcgtatgcgtcgtcgtcgtcagcgcctcgtctgcagagagagagagagagagagagagagagattacgtttcgccgccgccgctgcatagctgcagctaaattgcaccgacaaaatcaaaacgtctcgatcatgatctgacgcgtgatcgatgtggctgccgtctcgatcgctctacacacgcaatcgatctggactctaaattaaccaactcgatcgatcgttcgcgattaatttagccgccaaattgggcataattaaacaagagcgttattaattagcacacagggttttgggggtcgtcgtaatcgaagaatctgcagggtatcttcttcttcgtcgtcgtcttccatgccctcacgcaaattaagcgaggtagctaaaattttcgattactaattagtaaaagagtcttagaatctgtttgggagaacttaaaattataagatgtagctagatggtagtcaacttttgagaagaaaaagcttaaatttcaagaaacagttgggtggtaactagcttctaacaatttggagaggggctggcctagttccccagcttcagaattcttgttcattttcctggattctataatacatttttttcaaaatctgagagcctgttcacttttgatgccattttttcaaccataccattttttagtaaagttgtcaaaaaatgtctatgtttagtttattgtcaaatttagtcaatacacaagaaatcctgttaaaattttgataatattaccatcttgctaaaatttgggcattgccaaaatttagtaaggtttattttggctacgatctgaacaggcactgaacgaaaactgaactatttagggagtttttgattacgagagaaagtagtatttagaagctctccaaataaaccattagttcttgaccaaaagattaattagttacacgcgggtgatagctagctaggtgatcgagatggtggtggtatagctagtagtagcaggcatgttcctgtcccgacaattttgccgctgtttcctccccatcggtttgattttgccttgggaaaccaagctagtttgcaacgcgtggagccatttgtataatcgcgtgcttaatagtttaattatcgtgaggaacgaactaactaactatagtactagctgatccctgtctctacatataataatcttagcaccagctattccagattttaccagctccatcgtgcagatcgatctcacgttaatttttgctgaccttcgaaattgctgaaacttgttcggtacattatattaattgacttggctagatgtataacttaaaaaaaacaagagatttgttttgttccagtaaaaaatatcttggggtacgagtacagagtatctcacgatactgaattgtactatcatgaggtaccagtaccctcaggtatttttttctggaccggagcgaatcgtaaagtatttttagaacggaggtaacaatacaatgtttatctacagctagcggtaagtatatatataatgcgttaggtaattaattggttgtatacattgctatggccttgcacgcaaaacacattgccgattgcatgacgtgcaatttcaggctttcagctgggctgatgaaacgacgggctactaactggaaagctctgatataagttaggacatgcagctgtctcgcatggccgacgctagcttagctgttagcgtcacatgaatactgtgatcgactgacccctgcattactagtagaaattaaactagcttagctagccaatgcgagcgaagtaacgcacatgtctgaaaatccggacgtctcaactgtgagattgatcatatatgcagctagctgaattagcagccggtatagctttgagagaaaagtcctataaatacaataattgacctcaccttgcatctactagcatttgttattgaagtcagtcaattggcttttgctgctaagatagaacatgttaaaggggtgtttaatttggtttatggtcacattttgttacaccatattttttgctgacacaatttattagatatgagtttggttcgtggctcgtcacactttttcaatagcatgtcctatatattatagactcaatttttttgtcaactttatcataattgtgactattaattcgttcattatacttttgtgactgtcacaacttagctaatcttagttatggtaaaatgtgatcggtaaccaaacacattccaattttaccattgttggtttgggcacacctaccatgcgtaaagtataggttgaattaaacaaagtgagaaaagcatcatggggatgagtgccccgtgcgggcatccaatcaacggatgcagcagttggtccgacaagatccgagcaacactgcaaattgaccacaaatggcaagaattaatctccccttgttttctttccccttctccaatctatacctggtcttctcgtgccactgtacggccgcgaaaaattttaagaaaaagaaaatccatgacgacttaagccggccccttgttgtctgctttagtagcttctcagccacagctaaaaatttaaacttaaatatttaagaccttttcattatattgtatcgctagctaattatataggtatagaaatttacttaaaaatattttttatttgtttttcatggcttattatcttaacatttctaagcagagatgctgactatcgtcatgtttaagagaccttgagattccgagaaatgagaatatgcaaaaacattggtcgggtgccctagcttctactttcttaatatatttttcgaattttacagctacaaacccctcacaattcagataatcttttttttaatatttaagcaactacagattctttcattttcaaacaatacctgtagcgctcggctttgatgaagctgtttccccatgtttggcggatccacgtcattgccagctcatcatctatacactgctcgtgctagctagcttgccccggcggttgcggctcctcctcccaaagggcaacgccggccgtaccacctacccccaccagaaaaggcgaagaaaattagtacagtaaaagttttttagtagtgtttgagtttgtcaccgtcaagcataatataaaataaaacaccacattttaaaaaggacgcttcacattgctcccacaaacacgcagaagaatttaaccaccgcctcctcatcattcacacgattgattttagtttggtgtagttgttgacatttttttcaaatatacccaaaaaaatgtatttcaaatttgactctaccgctaagcgttcaaaatctgatggccacaaatattagacgcatgtagctatatagatagactttcaacaggattttagcgagatcacggatatgtcgctcgcatggtgcacatttaaagtgtggtgttgtatatacagtgatgtgtgcacatgcttatagtaataaaaaaatatgtttggaagcaaaattaaccaaagagatgaagggcaaaagcgtcacgcgcgacgcacgagggcggtcgacttgtcccgggccgaatcatgggtggggttgggcggaagctggtcacgtggcgccactcgtggccacggtccgcccacgtggagatcccgtggagcccacgcaggcccacgcgtcgacgcgtcggcccatggtcgagccgagaaagtggcctcggccacggtcaaggaatcgaggcccgcacggatcccgggcccaccacgcccctccccccacaccccccccccacgaaccaccatcgccgtcgcttccgtcgacgtggcgcccccagatcatcccacgtcagcggaccacaccccgtgggccccatcgcctcgctttattaaaaaaaaatcaactaatcccgtgatgcagaaaacgaaacggaaacgcaccgaaacaaccgctaactacttttccctctcctcctcttctctctctagagagagaaaaaaagaaaaaaaaaagaaaagaaaaagaaagagaagctctagagagagaaacaagagagagagtcgccgcctattaatacacgcgctccgccatcttctctcctctcccctctcactcctcccaaatcccctccattgccttcctcgcttcgcatcgccgctcccgccgccgccgtcgggctgctcgccggcattggggtaaggccggcctctctctccgggatcagcttctgctcttcccgttgtttgattgattgattgattgattttttttttggttttttgggtggggtttctgacgcgcgtggtgatgcggtggtgtgggaggtctagattagatctcgggtggggaggattgctcgtcgtgatcgggttgtgtgtgtgtgccattttttggcgtgttcgatggttggatgctcggtccacgtctgcgacggcggccacgagtttgagctgtccaaacccgggacgaaaccgaaaaaaaatatatgcaaatttgtttttggttcaattggtgggaaggcggaggacgaggacgaagacgaacagtagcagtagcttctcttgccgttttcctcaatttttgtttggatgcattagcaaggagaggacaaaaggatcctcttgtttttttcctttcaagaatttcttttttttatttgattgatgattttcgcagtacatatgggcttgtcgtcgcatataatgcgcgctgaaagttctggttggttggggggtttcctttcactgccgccgtttcggggaggcatgttgcatctgcctggccacatgacgcgagagcagattgattgattgatgcactgctgatccaatcgatgtgttagcgtcgtcggaatagataatcacccatcaatgcaacgaatgaatgatggaagtttcgacttttttttctttttaggtgctcctgttgagtgctcaacataagccatgtgcccttgtcctaaatttagctcatttgcatgtgtttattagctgttaattgatgagatttacaaagggatttccttgtctaagtttctttggattgataatgatggatgatggatgaaaagtcgttttccgactagttttttttggtgctacctaaagtgaatcaggcatcaccggttgagggcgtgccccatttttcattgtcgctcgggaatcttcagaccaaaagttgtactaattaatttccttttttaacttgcaaagacaaaaacagtaaccgtactgtagggcaatcagatcggtgttgtcagctcttcctgcattaggttatctggtgttctgttacataataaaggtttgtcgtctttgttctattgcagtgttggttgtgaccgtatacaattattgtttttggagctgagcgatcagatgcatgagccttccttttaaatgatctgtgtccaccatggcgatgaaccagtaggaacctgagcagtatgttatcatttttcagttattgtctttttttttggtagttgaaattattttcattattgcagaatgcaggaacttcccgcttaatgggctggatgcgttgtatgcacgtttgcagtgacaagaagacattgaaacgttggttttttattgacaagagggttggttgagtgtctaactcttaaggaatcctatagtctacttgcttgctcttgtgttgttagtaactgttcttacaacaactctgcggagagttctgttgatggatttgaagacaagcaactctcctgttattgctgatcctctccctaaattagccttgccatctgctgtgatgacgtacactacacctacgagtttcccctctaccgggctgtacttgaacactccgaaaaagaagcctctgcctggaaagatcgaagaagtccgcgccgctggatggcttgatctcatgctggcctcctcgccacctcgcaagaggcagactaaggactttgccaatgatgttcaagctgacgagcttgatttgctataccgtaattgggtggtatgtttttgaatctatagttattgctgaagtacatcaaacatggcaaacaataaaattttccactgtttttcttttgtaggtgaaccatccatctgctttaacatcatttgaggatattgttaatcttgccagaggtaaaagattggcactgttccttgattatgatggaactctttcaccgattgtggacaatcctgaaaatgcagtaatgtctgacgaggtattctttttctcctcttatgttctttagtcctcattattatcagtgaaaatttatctggcagttttgtaaatattctattcgacagatgcgctctgctgtgaagcatgtggcatcactttttcccactgcgatcattagtggaagatctcgtgataaggtaaggaatttatgttcacatgtaaaatactccccctgctaaccttttgcatttttcactctttgttgactctctcttatgtgtgttttgttctttaggtttttgactttgtgaaactaactgaactgtattacgctggaagtcatggaatggatatcatggggcctgttaggaagtctgattcgagtggtcagcatgtggaatgtatcaggtccactgattcagaggtgcaacagctttgttgattttttccacagacaaatttctctcttgtgacaaaattctaattagttattgctttttggctcatagggtaaagaggtcaacctcttccaacctgcaagtgagtttttacctatgattagcgaggtatgtatttccatctcgaacttggtaattattaggataccattttgtgttgcacggttgaaaattattcatttttatacctgtaggtgtacaaaaagctcagtgaaagtattaaggacattgatggtgcaaggatggaagataacaaattctgtgtgtccgttcattaccgcaatgtagcaccacatgtaagcctgcattgaagattttaatttcacacaggaaatatgtggtgtaaaatgtttgctgaatattattctcattgttacatcttaggactacggagaagttcatcaacgtgtgactgccgtcctgaagaattacccttgtctaaggcttacccatgggagaaaggtaaggaatatacacaaccgcacagctgtttcgaagcactggttaagtaccattgttgtatttgtttttaattcaactgcgctcttgaattcaggttcttgaggttcgacctgtgatagactggaacaaggggaaagctgtggaatttttgctggagtcacttggactatgtgggaaagaagatgttcttcctatctatgttggagatgacaagactgatgaggatgcattcaaggtaagccataaactggtctgcttgctcttacctgcaaaatatcaattactacttccatgtcttgatgtataatattgctcacttggctcaaataggttctgaaggcaaacagcattggctttggaattttggtgtcatctgtgcccaaggatactgatgctttctattccgtacgggacccagctgaggtaattcgtcttctatctgcattaagtaatctgtcgacaatagattctgaacaatctgatttggttacaatcattgaatcaactgagtatgaaaacattctttgtgtatttaggtgatggaattcctgaagaaactggcatcttggaaggaggaatccacttaagcagaagggaggaacataacagaatcgttttttgaggatatggagaagtaccaactataaatacgagcaaaatatacactgctaacaaataagtctggccaaaatgtttttgatttggcatcctattatataagaggctccctaaaccacccttttttggtctcactttcatcttatgtttctgggattctgagacatttcattcttttattagttctgttcctttagtatatataaaatatatacacatgtatgctgaaaaattttggttcctgtccctgtcgtcttaggcaattatttattctaccggcaagttgtaaacaactggttgttcatttgttctttagtgtgctgcaacgttttgtagctgttattccagtgtgcccttctaaaagtcaacttgtgtgcattggccctgcaaactactgtaattagaacgataattgatgcaaccaattgtatatttgcctgaggctgtggaatcttctgcttgtttaacttgaaattaactggctaattgcttgtaaacgcactcatcaacgagagtgacttgcttgttcaaagcaaaggaaacccacttgcgctgaagcattcaagtcaaaatcttattcgaaaaaaataaatctgctccggacttgacgacagctaaactgcatacgacttcaacacggtaaaactgtcaatttcttatgagtctgtcgaaatttgatggaaagaaactaattttagaccaaatcctggcgtatgcgtaaattggcccaataataattcatcgtttgaattccggcccatatgggccataaatatgaacggaataagttcactttagctcccttaaaagtgacccgaatctaatccataaccctaaaccgcaaaacgggatatctcgacccccgaactatcgaaaccggtgcaatttgactcccttggcggttttggagggtggtttcggtgacgtggcgctgatgtggcggtgttgacctagtctgtggggttgacgtggcgcttaggtgtcatttgaattaaaaatggatatgtgggacccgtttgtcattcatacattaaaaaatgtggggcccactgacatgtgggacccattcttcttcctcccttctctctttgtttctctctctcccctttggccggctgggccgccgggggagcacgggctagagcggtggcgggtgggggccagagcggcggaagctgaagcggcggcggcggtgggagcggcggcagatggcgcttgccctgcaggccgactgcttcaccagcgacctgagctagctcatcgccgacatgatgtccgggtcggtgccgcttgacgcaacacgcaagcacaagtatccccgagagggtggccatcttgggcgtgttcaagcgagacaaaattaattgctcccctctgcctactcatcctattctttagtggatggtgaacgacctgctaacaatcaattttatctctggttagttgctaaatgaatcaattttatttttggatttttgtgatgcttgtggccttagcagcactagttcaaggagacgcaacgggggatgagatggtggcgatgatggggctggcgcgggagttgacggccacgcagcgagctcgagcaatgacttgacgacgtcgtcgttgcaatgctgaatggcgtagctcgatggcagccctcgcccctaaccagcttgacaggctcgatgtcggccgtgtcgtcagcttgtcgcatatgccagatgcccggatcttgttgttgcaatcggcggagaggccagagtgccggatcttgttatcacggacggcgggaggtggcagagggagcagggagcttgttccccggtgagggtgccgtgctggtggaggtgaggactggggttagggcgcttaggtgccgtgccgtcgaccaccgtccccccgctcgatgtcatcggcgtcggcgtcggcgctgctgtcctctcccgcctccttgccggtcatcgagctgcccgttgccgctctggaacccgccgtcgctgcttcagcttccgccgaccgccaccactctagccctgccgctccagccgtgctctagtccccgcggctggccaaaggagagagaaagagaaagaaagagagaagggaagaagaggggaggaagaataaagagagagagatgatgacatgtggtcccacatatgtgtttttaattcaaatgccacctaagcgccacgtcaaccctatagaccaggtcaacatcaccacgtcaccaaaaccgtcctccaaaaccatcaagggagtcaaattgcaccggtttcaatagttcgggggtcgacatacccagttttacggtttagggtcatggattagattcgggtcacttttaatgaagtcaaagtggacttattccaatatgaaccgactatggctcaacgggccggaaaatgtgcttccttcccaaacgaggcctaagatgactatatatgggccttgttgggccgtttcgacgaatcgaaatgaggccaagcccacattggcccattttgattcatctcggagtttttcacatgggccactcagctggtcacttccttctctcccacttttgcttactctctccgccctcctaaaccctacgaccatgccgaccctcgccgccgccgccgccgccgcccgccgcgccggcggggcactgcgatacgccgtgctgggcggggttcggtcgctctcatccctccagccgtcatcctcctcctccgccgcagccgccgccagcgaggaggtaacgcagcggttctggtttcgccgccgcttggccgcctccgactccgatcggaggtgtgaggttctctggctgacgtcgcgtgtctcggcaggtgctggtggaaggcaaggccagcgcgcgcgccgccgtgctcaaccgccccggccatctcaacgcgctcacgaccaccatggttcgtacgccttttcctgttcgataaaatgcgtgcgtggtatcaggtgatatgttcctgtgacgtttgttcacattcgtgctctccacactcctataaagggcctgcacgttctagtgagaatgtgctcttgctaccgatgcatgaaacacacctgattgtaagggcacaatatttttgtggctttcctatgtgatcatttattctttaatggtatactgcggttttcagtaaattgacttttattttgagtataatgcttgatgaaacatagacatttgtacatgtcttggtggctcattgatctgatttcctgtgactgactgtcttgacagggagctaggctcaataagttttatatgtcatgggaggacaaccctgatattggctttgtcatgatgaaggtatgctgcttcagcatttgcatggtatcgatgccactatataggtctaaattgatttttatattatatgaagggcagcggccgagcattctgtgctggtggggatgttgttaggttgcaccagcttataagtgaaggtgagtggctaggccctgcatggtttataattatcgtttccttgtttagaacaccagcctctggatcagagcctcagaggttgccatgcttgtattattgttgaaatataaattttttttgtgacacagcttagaatgatagtggtatccagttcttttgtgacatccttcacttgtataaaggttgtttacaacactgcaaaagaagagatttggttccaaatggacagttccactggaaccatatacatggccaactgatttattctttcttttgcatgtccaaaggtttcctttagtgataaccctgtctcttttttttttaatttttttttaaaaaataaaaccaggaaagttggacgagtgtaaggatttcttcaagactttgtacagttttatttatgttctgggcacatacttgaagccacatgtaagtgcatggacttcaacttataatcactaattttgtttttatttttcgctcgaaaatttatattaccttttgtgatgtaggttgccattcttgatggtgttaccatgggtggaggtggaggtgtttccattcccggaacatttcgcattgtcactgatagaacggtatgcaatttttttttgttgatttgtatttttgtgcttggggactaatagttattgtgcagtagcatttctgcctgggtgtgcccttatgttatgcatttatgagcatgcggagttcaacttaaacaaatatttatttacttaccatgactgtttccaggtatttgcaactccagaagtacatattggcttccatcctgatgctgctgcctccttttatttgtcccatctgactggtcatgttggttagtgttcagttttccctttcaattgaattctttaatatctgatatccccgttcatctcttctttgtaacccccagcccttttaagtaacctgtgcatttcaccgttggtcctctttaggtgaatatttggccttgactggtgaaaaactcaatggagtggatatgatcgcacttggccttgctacacactattccatgagtgatgtaagatccttttaattgaactatacattttggatttcttgtgttctatctcggtattagttttgctagttgattaactttataattcccatttccttttacagcggttgaatctggttgatgaacgccttgcaacattgttaactgatgatccatcagttattgatacttcccttacacattatggagatcttgtgtatccagataagagtagcattgttcataggtaagccgtacaaaaagtaaatataattctgaactgacaatgtcttattaaatgctttagcatgtcatactacagaagctgctggaattccagattatgttgtcttctagttgttttttttaaacatacaccctccatcccaaaatatagctagtagaatgggaattgaaagatgctttgctttccttgatgttttggactgcatttcagaattcagatcatcgtttgtttctttgtaatgccattactctgcagaaagacatgcagaagtatcctaaaagtggtacttttatatttagaatgtgtgtttattcttaatccttgaatcaagcagagtgtgatactgctgtgatttgtgaatctttgcattagctgtagaactgtgcttttatatttgttcgggaccaggattctcttggtaatataattggctgttaataataaatgatacaatgacatgcgttttgaatgtgcatgatttttcatgtggatgtctataatacaatgtttatgctttatggaatcaatgtatatctcatttgtgccctttgtgttactctaggctggaggttatagataaatgtttcagccttgaaacagtcgaggagattgtggatgccatggtgagtgatgtgtcagttgcttttactaccaaatctctgggaatggcttcttttcttattcatttgaacatgaataagatgctgttgattgataccacagcttgctgggctaccttctattcccatatcattatttactaaaaagaatctcttctagatgttaactgtttgtacagtagttattgttgttgttttggcattaatttcattcccttggttagcttactagatagttcatttcaaggtttttgtttcaacagcagaaattttgcttatgcttcagaacttaagggctatgctcttgtaaccaggaaattgaagcagctaggttaaatgaagattggtctaccttggccctgaaacggttgaaagaggcttctcctcttgcgttgaaagtttcactgcgatcggtaaataaaaaaaaaatctgaaaaacctcactctttgtgcctttgactgtcgatggttgacagattgtgtatggttatcctgtagatacgtgaaggtagataccagacacttgatgaatgccttgtgcgtgaataccgcatgtctatcaatggaatctcagagaaattttctcatgaatttcgtgaggtatgctgtactgcatttctttttggttctcacaggtttatcgaatattatttattgatgaccaagtaaccacggtgctaagtctttgaggtaattaggaatctgtctgtgacttgaaaatttatttaattatgttataaatgttgcttcaatcatgccagggtgtcagagcacgtcttgtggagaaggacctagctccaaaggtaaattacatagctggttgcacaatctatgctgttaaatcgcaaaaaatagaaaataaaagttgtgttctgcatttttttcataaaaaaaatgtggttcttgcagtgggatccacctgcccttgagtatgtatcagcggacatggtcgattcttactttgctcccctgggtgaatttgagcctgagttgacactgcctactgaatcgcgagaggcatttgtatgatgactctgcatgacaattccaagtagcgcttttgtttgaagccttatagatttttgagcccacactgtcgaccgttggcagcacataataacagataggattctcaatctattcttgtaccatatatgccttggtgtattgaaaggaactgatctccaaggtgaactcctaccattctcactttcataaattaatgccttcgcttcatttcatttatactattgcaaagcgtgtccaagtcgccttgtgattatgagtttgggactcatttgtattgttgttgtctttgagctcgtgtgctgtgctaccttgtattcctcatgtgaggtactgatattcaggccgagccagctatagtcgggggcggctgatacacgatcagccgcgcggggaggcgagcgcgcgatcagtcgcccccttcctctagtctctctgtatctaatctactacttctatacgtgtgtgtgtatatagtatatacatacatatatatatatataaatatatatttttaatgcataaaaacacacacacacacgtatacgaagtttatataggacatatacaaactttgtatacgataaatacaaactttatatacatacgtattaaaaataaaaaaactaaaaaatacacaacgtatacaaaatttatatacgcgtatacaaactttgcatccacgtatataaactttttatacgtgtatacaaactttgtatacgtacaaatacaaacttagtatacatacgaatacaaactttgcattcataaaaatttaaaaaaaccgagaaaaaaacagaagagaaaccggaataaaaagtaaaccaaccgaaccggaaaaaaaataaaggtaaaccaaccgtacagaaacggaaaaaaacaaaaaaaaaaaaaacggaaaactcgctcttcctcacccgcgcggcgcgtcgccacccaatctccgcgcgcgacacgtgcccagtcacgcggggaggggggcgcgcgactgaccgccaactagctttctcggctatagtcgtcctgagtcttcacaagtattcgggctgggcactgaataactggtctcatctggacctgggctggagcgtgataggccacgtacattgcagtgagtttcagccagaagatcggcccaatttcttggcaggtacactggttttaggcattgtaagttgtaagaaatctgtcataagtttaaacgaatggatggtgtattagggcttcttcggaatgcaaaatagaaaaaacgtaggaatagggaaaacataggaatacagtaagattgtatgtgtaaaatagagaaatggaaaacatgggaattttttgttcttcgtgtgcaggattcttacaaagagatgagtggattctttttttttttactatgaaaacatgggcagggaaaggtgttcctctgaaattcaaggtagcgaaccctttgaaacgaatgcatctacagtacccaattcaaagaatcatcaatcctccatttttccttcacatttcctctattccgaatgagcccttagtgtcatatctagattcttagactagagaaatatgactgatccaacctctgaatcttttgatcctagagtcagatggtggagatggtttttcatcccaagtaatgtcccctcgtatatattttttcatcactcaaatacaatacaaataacagtaaaaaaattctgagagcagtgaattgtaatttggatagctttttactaccaaagttttagtttgaactaattttattacttttttttagaaaacagccgacataagatttacctaatatattagagagaataaatggcctggccgaaggccttacaaaagatttgcctattatttttcatttggattggacaattgtcatttctaatttgtatcagccaactctcttttctatacatagataagatatggcctacatatagataagagagttgttatttgctcgaggttgttgatgtgtattgaaaaagtttaggtggtccaaactgcaatattgatttctaagagtaaatatcataaaactgcagatatttgatgaaactatcgcaaaactatagatttaaaaatgtgtatcacaaaaccacatatatatcgtcaaatttatcataatactacatatttaaggcatagtatcataaaaccgcatatttaatgataaagttatcaaataactacatattttagagtttatatccatagaacttttatataagtcatagtatcataaaaccacccatatttaaagatgaaatttactcattttctaatatactccatatacatgataccaatatacatcaaatatttttacaaattcccacagctattcatatgtagtagtttgggagaacgaaacatatatatctcctcaaggaatatgaaacccccccttagatggcatatagattatcgtaccacaaacacatggttaggccagtaatcagtactccgttatatcatcgaccgtattcgagctatctcctatttgcattatattgcatccctcacatgcatgttgaaccatacagtaagctagcaaacaaacacacaagaatatttgtgatctggacacaacgtgcagaggggtcacattctcagagtacaaagctcactgctcaccacagctaagggactgtttagttggcaaattttttttttacctatacatatcacatatatatcacataggatatacggatacacatttaaagtattaaacatagtctaataacaaaacaaactacatattctgccagtaaacgcgagatgaatttattaagcttaattaatccgttattataaaatatttattgtagcaccacattcttgaatcatggcgtaattaagtttaaaagatccgtctcgcaattttctggcgaactgtgtttttttttgtctacatttaatactgcatgcatgtgtctaaactctaaacattcgatgtgatagcgtgaaaaattttgtttggaaactaaacaggccctaactccacacactgatcaacactaatcagcatgtacatttggccccaggcacgtccaaatccaaaccgcatttatcaattagcgctatgattaattaatcacctcgatccgccagctcgatccacatgcattgcctcccctcccatctccggcgagctatatatacccccctcgccatgcacactccccaaccacagcaaccaagcagcagcaagctcgagctactagctagctacactagctcgattagttgcagcaatggcggcgaaggcggcgcttgtgctggcggtgagcctcctggtggtggccatggccgtggcctgcccggactgcccttcgccgaagccaccggcgccgaggccgaagccgccgacgcctcactacggcggcgggtcgtcgtgcccgcgcgacgcgctgaagctgcacgtgtgcgccaacgtgctgggcctcgtcaaggccaaggtcggcgccgtgtcgccgtacgagccctgctgctcgctgctcgacggcctcgtcgacctcgacgccgccgtctgcctctgcaccgccatcaaggccaacgtgctgggcatcaagctcaacctccccatcgacctcagcctcatcctcaacaactgcggcaagatctgcccatccgactaccagtgcgtgcactagatcgagatctagagagctagtgttgcacttgatcactccatggctgggagtaccgtatcttcatgttgtttttacccccaatatcttgatgtgttgttaatttcttgctttttttttcttttgattctatggttcgtgatccgttggtagcgctatgatcattgtatttttttttgtttctcatgatttgttatagtttcgtcaataaaatggaaatgtatttttttgtcgcatatatgcaatggtcagagattggaactctaagatttggaatatctgtcggatgaattaatttatgcatgcccaaacaagctcaagcaggacgcatgcaccatgcatgtcgaggaaaagttaactgtatacagtactccctccgtacaccgttaactttttagcacatgtttgaccattcgtcttatttaaaaaaattgtgaaatatgtaaaactatatgtgtacatgaaagtatatttaacaatgaatcaaatgatatgaaaataataaataattacttaaattttttaaataagacgaacggtcaaacacgtacttaaaaagtcaacggtgtcaaacattttgaaacggagggagtaagtactaagcattaagaagaataaaataagaacaaccatattagggtctaggaaattaccacgttaattagatatatatatatatatatatatatatatatatatatatatatatatatatatataatgtgtattttcagattataagagtgtagattgattaatatggttgtgtaaaaaaatacatttatattcatagaaccttttggtggcttggtaggtgaagtgatgtatagcatcttcaccactgcacccacccgagagaagggggatctcaataggacatatggggcacagttatatccctaaatttattttttttgacaaaaaatatgcaatttaataggtataatatgtgtatatactattagtttagtcaaaacaagcaccaaaagtcatccttagcaagagagattaaatttttccttagctattttagtaatttttctgtacgagttatctttagttgcattagtatcaaaattatcgacacttcattttcgctattaggaagctttatttttttccccattagaccatgcttaagtactaactctgttttcgtattgccaaactcctgtgctcacgctaagttgtcccccccccccggcgcccaaaattgtgtatagttaatttgttcaacatgcaaatggaaggttttgggcccttaattatgtttgccatgattctagcaaaagagccaatgcaagctggtttattgccaatacatcttttgtgccgacgtgctgttaaatttgaggtgaacaagttgtccacatgaactatatttaaaaccttaggccttttttttcaacttaggcttttgaatggtctttatttttgctctttggcttctaaacatatatatctaaactaagtggcttacaacttccacaaaagcgttaatgataaagttacttaattgtttgtttgaagctcaggctttcagacagggacgaagctagaacgaaatgaaatagggtaccacttgtttaatttagggtgtgttctttatttccccatcttttccaactcacctctctcgttttccgtgtgtacgctttccaaactactaaatggtgtgtgttttgcaaaaaatttctatatgaaagttgtttaaaaaatcatattaattctttttttaaaaaataattaatatttaattaatcgtgtgctaatgagtcgtttcgttttccatgcgaaggaaatgagttcccaacacagggaaacaaacgcagtcttactctactttagatcaagtttaaattgacgtggatgtctaagtttgtattcagagggtgcacacaggtgaaaataactgaagtatagctaaacaattttcttgaccgggttcctggacacccccttgcccttgctttcagacttataaactggtataagcccaaacacaatgagaatgagagactaagcagagtgcctagatgatctggaagcataattatacacatatatgtatgtttcttttagaaaatggataatcaggccactacatccaactgaaacgatgtacacagcctattttacacatatatgtatacctgaggaaaaccctctgaacatctggaattaagaatatatgtcaactgggacagaaaacgctggagaatataaatcacaagcacacaacacagccaatcaatttcatgcacatccaaatctgaagaaaatataaaaaaccgggaataattgatccttattcgccagattggaccacatgcacgatcgtcgatctggcccccacacgacatatgcatccatacattctccttcatctcatctcttcttctccatggccactaatccctcgagggaatatcccctcgtatacctttttctttcaaattcgatgtaaatagttatgaaaaaatctgaaaaaaattgacaatgtagagtataatgatacctaccagtgcaccaaaattcaagttcaaattcgatctacacatcgagaaacaaaaaaacaaatttagatataaacagtacgctactattcatatgctgaatttgtcttttttatatctcgacgtgtgagttgagtttggacttaagattttgtggagttgtatatatgtgttgtatgaatgttgtcaaattttttcagaatttttcataaccgtttaaatggtttttaaataaacgagggaacatcctctcaagaaattagaatagtttccctataaattcacctcgccatgcacactcccagccacacagcaagcagcagcagcaagctcgagctaaccagctacaagctacaagaagcagcctagcaaattaagctcgatcgatagcaatggcggcgaaggcggcgcttgttctggcggtgagcctcctcgccgtggccgtggcggcgagcgcctgcggcaccgactgcccgccggcaccgaggccgaggccgagcaccgggtcgtgcccgcgcgacgcgttgaagctgcgggtgtgcgccaacgtgctggggctcgtcaaggccaaggtcggcgcggtggcgccgtacgagccctgctgctcgctgctcgacggcctcgtcgacctcgacgccgccgtctgcctctgcaccgccgtcaaggccaacgtgctcggcatcaagctcgacctccccgtcgacctcagcctcatcctcaacaactgcggcaagatctgcccatccgacttcaagtgcgtgcactagagctggttgttgcacttgtttctccatgaccatggctgcgagcttgagagtactactgtatcttgatgttgtttggagtactttagttcttgatctatctcttggttccatgtgttgtttgattcccatgaatgattcgccaataaaatgaagctctacttttcatcgatcgtatgctttgagatcagctgaaagctagctcgcacattgctgtgataactgatagtgaacaatcaggatgaaatgttaatttttttaaaaaaaaaatcggcaagaataattagcaaatagctatatttagtggtactaaataattaagctagattatatatttatagcaattaatagggaacaataattgcacacaataaattgacacgcttgaggggagatatctaacgtctcttgttgtgtcatcatgaatgttaagcttttggtttgcaattatataaaaagataatttacgagagagggcgaaatggagtcaccatattcattctaaaagctattatactctcattccggccaatagctattattatgcaaatgtttggtcacggtagattggtagacttagattatgagtgattctaccgtacttgagcaggtaccttcggtactaggtgaaattttgcactaaagttattgtacctaaatatctcttaagttataagagtatactttgactggtacagttgtatataaaatatacctgtactcatgaaaagagatgcaagaattgtatatacattcaattttgctttcaaaatctagtttttttaatacttaattaattatgcactaattcatcgctatgtttcaagggttagtatattcagtacctcaaagaaaaatacatgcatgggattccaaggttagcatgttcaacacataaggcatgcatgggattcccttgctggcaagtagctatggtggatggcacagcttgcaacaagggaaggtccacccccaagggagagtatgactaggatgactcacatgccgcacgggtagtataagttttaagggaacgtatcctgtacacataacctttccatgtacacaccatgcatactaattaacaaaatttaaaaaatctagagaaagaaattgtacatatacttccaatagcattatattacacatatgtgtaaagtcttaatctcaaattcattatgctctagccgtaacaaaaaaaactataatttctggtagtttcaagggaataaatcggtcataattttgtcttatttggtgcttcatatatatagtgaatttgaagatgagactttacatataaatatgatactactgaaagcacatgtacaattttttttaaaaaaaattgatgaagttttgttagttgatatgcatgatgtatataaaagaaagctggcttgtgtgcatatgatacgtttccaagtttcaaagtctgtaatttgaaacgactctaagtgatgagcacaatgcatgacacctttcgagaatgcagaaatgagggaaatacacacccatgcacagtcccacaccatgtctcacactcatattaatagataggcccaaactaacatcatgcatgaataatcttataaaatattgaattgcattcaatatatgcaccctttggtggcttggcatgcaggtgaagtcatgtacaacaccacaaaccacacacacccaagaggtagttccccacctaacgtacctagcttgttcagcatgcaagtggaatggtttgggccctcatatatatctgccttattccagcaaaagagccaaacttcttgcctaccttttgtgctgatatataattaagctgttagattgagatgtgaattgaaccagttgtccatgctccatatatatatagaaacatagctaaaactttaggtctctttttttttggccttggcttttatggtagctctttggctagagcatgcggttttcaagtagcaagtttaaaagtcgagacgtaaatccaaatcaataaaaagttttttttttaaaaaaagctactcaaatctagttttcaacttcttagagagctacggttacttacaacaagtttaatagaaggttaatttaaaatctgcttttttgtttaagtttaggcattctaacttatatactttagctatgagacctaccttttgtgtgggtggtcttcaataaccacagtctttcgactgccaatgaaccaagccagcatacatgtggcagtgagaccctctggcaccttcaattcctggtgtttaagtctgcatgtgaagtggatgatgtcgatttagggttctagcattagtttgatttgaaatttgattgggtgtttttgcaggtggcaaacgtcaaagcttctcagtttatctctttgccgctgtgtgtgcgcatggtaggaaggttatgacgtgtttgtattctcttctctgtgtccccggccgtgtattttttcctattatcctctagggctcctgcgcttgcataggcgaaacccaccttgtgtaagatcgttggaagtaatatattcaggtgggtatttcgccctccggtgaccagtctaaaaaaaacttatatactgatcaatatataaacccaaacagaagttacggaccttagctagatgatctgaaaccataattgtacgagctctaattgtacagtacccatgtattacactagtattaattgatccgggaaaatctagcaatatattgtgatgaaaagaatatattgcaactaggacacacggagaatataaatcacaatcccaatacagttcatccaatcaatcatccatactcacggtcgatcgattcttgattcgccgattgggtaccacacgcatgatcatctaggcccccattcacgtactcatccatctacacatcttcttctcatcatctcctcctcctccatggccactataaataccactcgccatgcacactccaagcacacacaaagcaagaacctcgagctgatctactagctacctagtactctcatcttcttcactagcttttgcttgatcaattgcagcaatggcggcgaaggcagcgctcgttctagcggtgagcctcctggtggtggccgtggcgagcgcctgcacctactgcccggagccgccgacgccgaagccgaagccgccggcgccgaggccgccgacgcccggcggcggcgccgggtcgtgcccgcgcgacgcgctgaagctgcacgtgtgcgccaacgtgctcggcctcgtgaaggccaagatcggcgcggtggcgccgtacgagccctgctgctcgctgctcgacggcctcgtcgacctcgacgccgccgtctgcctctgcaccgccatcaaggccaacgtgctcggcctcaacctcaacatccccatcgacctcagcctcatcctcaacaactgcggcaagatctgcccatccgactaccagtgtgcttaatcacattgggacactgcagccgatcgatcgatcgatcgattgacagtgtgctacacgtcgtctacatgtttttgttggttggtttactgtgagcagtctgaactctctgaactttggaaactgtctgttttgtctttgtttatgcttgcaaagtttaattagttctgggaaaaaaccattggccagtatgtattattacatgtgtaagtgttggttgtgaccccgggtgatcagtttactggtcaatatatatgtattttttgtgcttatgatctgttatggttcagatgtcaatcgaagttgcaattagtattttcttttgtaaatttggagctctggaatttggatatgaactctacataggtaccaggtgattgctactcaaagtccaaactcaagctctgaggaccagaattatacattaactaggtgaaaccccgtgcgttactgtgggaattcagtatgataataataagtaaaaaataatatataaaatagctagacaacataaagttaacgtggtttatgataatttaaatttaaatagtatatggaataatgattcaaatgcaaaagtaaggttatatgactttatgagagaagaaaaaaaaaggagaaagttcaaaccatagattaatcatctaaagactaaaaataactgaggtgatatgacttaatgaagaagaaaaggtggagataatttggaccatagattaatcatttacacactaaaaacaattgatgtgttgtgtcttaatgagagagagaagagagaaataacattaactaattgaggttaaactatataagtacataggatattataaaaaaataatgaagatatatattgaaatattatgtgaattatgtaggatgatgatttaacatgcttgcattttcaaagctctaaaatttaataaattataaaattatagataatataacatatttgcatgatgtttaaatgtagtgattgttagtggatgatgatgtggcatctttgcatgttaagctttaggagtcattgggttataactttaagtaagaaaggatgtggtgtcacaccccaatctggcaccgccgtacaacggcacctgacaggagcgtgtcgtagggaaaacggcgtgaaccgcttcctacgaaaccacgatctcggtaccagtcccaggacatagtgctggtacccacagtgacaaatatgaatcatagcaatccttaaaataaatagaggacttatttaccttaacttaggttgcaactcagaacaacccgagaatgcaaccgacgacacggacgaggaaacaccaacaacagcagcagcagcggaaccaacgaactaacacccaacaccacaggcggcggctaggaaccaggacgaaaccctaatcttcacttcactttatcttctcttcagggcggaggaactatatatatatatatatttatatagagcaagggtgagtactttcgtactcagcaagtcacgggaatttaggtgtttaatgcaagcttggaagagaggcaaggttgttttgcaaatcttttatttgaagacctttttttgaaatcactaagtgatttatttctttttaagtttgggcgaaaagagacttgcgtctcgattcgactttaagagatgcttttcaacagctcatttagtaatgtaccgacctcccaggtcagatcattacttctcggctcccagagccattccacttgattaatcggctcccagagcctttttcattttctcggactcccagagtccagctgcccagcagcacaacaatccgcttccactcggaaagcctagtctatgatgcccgcagacatcccgaatcacacagattcgtttctgaccactcaggtcatccatctgccacataggctgattctggttacaattcccacaccacaacaacttttcacaaagcacaggcaaacaaatctatgcaacgggaaccacctcacatccgcccatgaccgtgggcacggctgttcgaacagttagttaacctctgcagaggggtacactttacccacaagacacaaacttactccagacactggccggtgtcagaggttcgcgacaaagcctttcccaagccgacccagggatacctcatgccacatagaaggatcaaatcctcacataaacataggccattttaggcgttcacaaatcaaactccaaccacctcgatcggtaattcagcaagcttctcgttcttgcattaccaggaacccggtttggctccaaccgaccccgccccggcgttcccaactattggcatgcgaggtttccctgaaccgactagctacttagccagggtgtcccattccaccttgtggttgtactttgattatgttcgatgagtttcccacaggaatcggtccttatatgcgaatacgggacagtgccacataggcacaaccccccgcatcgcgagttttcacaattcattttattttcaaacacaccgacaccacatgtcgggttttgaaggcttcacaaacccatttcccaagttttcgacaaacaacggtgtatgtgggatatttggtatacgtgctcagagagcacgaataccgaggtaccacaagggtggagcgacaaggattcagggtagtacgacctacgaaaattagtacgactactgggtaggtccgtcggtttggcacgcaaaccgaggccaagcaagttaagtgtgtgattctaataatgcaagttgcaaacaaaataataatgacttttcaattataggggcaattgatcaaagggtgacttgccttgctcaaggtcttcacgaagcttcacgaatcttcgagaaaacccgcgatcgacgaaaatccgataaccgcaactatacgcaaacaactgaaaacctaagcaaaagaccaaaagaaagatcctatttagactaattagtagtgccactaaatagatctcaattttacggaattactggaagtggaacggagttaatcggagttacggagtgggtgatatgaattttggaagtttaattggaatttctggaataagaggaatggtttatggaatttatagaaataatattctcaagaatattattgacagtcactgtcatgtgggaccaaagaaaatggtttatggaattttgtaacaaggaattgatttatgggacaaaggaaaaaggatttattaaatccctgaaaaagaaaaggatggagggatgtatattagactttttcgggcggcaagggcgcggcccaagggtcgaaggaggctcggccaagccatttgggccggcgcgggcgcgggaaaggcggcccattagggcgcgcggaagggggagggagcggtccggtggaccgggtgcacctcgcggggtcctgggtggggcccacatgtcggcggcaaggctcacggtggggagagcgcacgcgggtgcggtgctagggtttggtgggtgcggtgtgcgggcggtgcgccgggtggatcggatggcagcgggcccacatgcagccggttggcgcaccgtggaccgcgcgcacgggaggggggggaggaaggaggcggcaccggctcggctcggtcaaagccgaggtggcgccgacgtggcgcctacgtggcagccacgcgggccggcgggaggaggaagaaggggcggccgagatggacggcggacgacggccgagttcaccggagctcgtcgcgacgattcgagagagagggagtacaccggaacgatgggacggacgataggaagtgagccaccggatcggattcgccggagggaggccggcgttgacgaatcgcggcggcgcacgccggcggcgagaaaaggggggggacttcaccggagcaacgggggttcgattaaaaggggtgggagcatatccgggattcaaggaatccgtttccggcgccggatgggacggaggagcaccgagggcagccggcgacgagaggcggcctccgggggtgggcggcaatggcggcggggccatgccgggtggcggcggtccttggggcggcatctacgcgtgttcggcagggctaccgagctaccacacaagctagaggggacaagggtgagcggggaaggggaacgggagggaggcactaccgagccgggacggcgtggtgacgagcagccaacggcgcggaagcgagttccccgtcgtcgggccggggaaggggaagaagaagggtggccggagccctcttcggctccgcgcgcacgccggcttcccggcacacgcgagggcggaggaaggcgaggacggcggcagcaaggcggcgatggcactgcagcggtggggactgaagtgggagggatttgagaggagggactcggctttatagtggaggcgaggtcagttcgcgcgggaggtcggttcaaaccgaccttagggcgatcaaggcggcagctggcggtcgtgctcggagctagcggccaagtggcggcagaggcggtcacgggcgtgacgccgatcggggaaaaagcaaaaaggggagggagaaaggagctcggctccttgccgattttggacgagctgagggaggagagagcgcatgggagagagaggcgctgcctccgcgtcttggacacgcgcgcgctgcggcgcagaggtgggggcagcggcagagtgggcgcgggcggctgcgcggcgcaggcgggaatggtgccggtcggggaaaaagcaaaaggggagggaggaaaagggggctctgcccacgtcattcagggagaaaggaggagggagagagggctctgcctccgggagttggacgcacgcggcttggagtggccgggcacgcgcgcggggccgtgcagctgtagcgcggcagggcagcggggccgggaggcgtaggcgcggcagggccgacgcggcggcgaccgggcggtcggccacgcacgagcgcgcgcgcggatgcgagggcgcggccggatttcgaacggcggcggcgggaaatcggcgccggtgggggagcctttacgggagagagaaacggagagagagagaaacggagagagagagagagcgaggatgggaagagagtgggcgctctctctctcgagcgcggcgcacgcgcaacgcacgtgcgagggggaggaggaggagcggctgagaggagatgggccgaggagaaaacggcccacaaaaatccgaggaaggcaaaatagactttttcggaggagattgattcgaagagaatttgaacttggaatttgacttagattttggaattgggatctcgatgagaggaaggagtagacggaggattcaagacggggttttggatattttggatctggggaagtatttggcgatgattcaaagagagggatagaatttcagagtttgatttggagacttgagtcggaagaggaatttcgatggggcaatttctgatggtgacgagagggatcaaggacggatttgaattgagatcttggcacaacttagactcacacacaaggaacgaaaattttcgcaattaggattttgccgaattagtttttaacgcctcacgaaaagcggagcgttacatgtggacacaaatacatatttaccgaactgagtgatattatacgtctgatccttgagaggtattaagagatatccctttattcattataaaattcggtaattcatacaacttttttatataatggaattaaaccaatctttacttcaaaggagctacaaccacttattacataatcctctcaaagagagcaaacatttaagtaacccataaagaacaactaacaaacaccaacacttaagaataaaacaattagtaataagtcaatttgtaaatctctagcccaaattgagatacaagaggtatcaaatcgatcttatgctaaaataccttacgtcttagtacctttggctgtttatatcttacaaaattcattccattgagtggtgtaaacaaaagaatgtgcaagttttatttaacatttaacatgttttgagaactaggtaaggaaacatgtcattgtctcatggatagatatgcaactaaggcgatgtcggctcggcaaatagccaatacactgaagctggcatagcgtggccacagtggcccatgtatgacaagtataaggaagagaaggagtagtgaagtaagagagattatacggttcctaagaaaatacctggagatactacaatttacactaaaaattttggtacctcgaggtacctagtacctagagataccacattttacactagaaaatatagtaccttgcttccggtagcttttcaaggatggtaaaaatttacccgtgaagtaatgattgtagaactctataatacaggtatgaatataagactgataacatgcaacctctgtaccaaaatgtaagaattcgtcacggccgaaagatcgatgcgccgatttggctcctagagacatagttgcaccactagttgtcgtcaacaatctcgtctaaccactgtgaagtgtgatgtctttttgtgctatggtctagccaactgttagtttcttccatgttaaattgctggtatgcatcccattggggaggcggcattccaagtgtgcgcaatcgcaaccacagccgatctaatagatattttaaaaaataataaaaaaggcaatatatttacatataacatatattgttttctcttgagaaatactcctatatagattcttgtgggggcaatgatgataaggaaatgcgagaacaatgtaagttgaaaccaaaatatattgtacatatataatgaaatatccactgcatatttggtatgtagctacatgtgtatacctagtatctgattagtgaagtacactatatagcaatgattttaatcagaaactatagagaaatgatttctgagaaagaaagacattgggtgtaattaagaaatcatattattgattgggaccttgtggggagccaaggcacagctgctagttcccctccatctgccactgtctgcaagctgatctagtatatatgtgcaacaaaccattggtcaaaaaaaaaagaaaaaaaagcgaaagcgattaattaaagttgaaacctaaatcgtcgtataacgaatggttgatatgatgtgtagtacatttgataaatctagtacaactatatgtatatcaatttatgtgatagtaactagctagctagtactgtaactgtaattaacaagagtgacacgaaaagatctatatatctcagatcgtacagttagctagatcaatgacgtcaattaactatatatataactagctgggttgtaactatagatagtagaagaactttcagctatatatccagacagtacggccactgcataatgagtagtgataaaatgccataatcttctccagcaggtgacaaaaaacgcatggctggcaccgatcgagagatcatgtcaaggctaaaaagctttagctcaacttggttcatggaatattcaggttcagacaaggcgagtcattgtcgcgtatcaaaaaccggagccctacacgatcaaaaccagcatcacggtggtcaccaccacgaagaatatgcatcagaacacaacagtacagtacagaagaagggagatagctagctaggttggaatggtcgaattagctagcaaagcaaattaacaagcaaatggcctgattaatcaagctcgtatccgatctcttttgccacccgtgaacccagataatccgcggctgatttgtcgcatgttatagctcgcttcctcgaactcgcttgatccgtgtggattactcggctcgatctgatcagctgtagtagtagcttaatttgttgactccatgctccatccatgcatgttcagacttgagaaattcttttctttttttcagtaaagttgttcagaagcaacaaaatgtgtgagaccgtccgtgtggctgtcaggctgtgctagctgctagctgatggtaggcagatcacggtatttctgaaatcaaatggtaattaaacatttaaacatatacgtgcacattgattgattgattgaacgtagattaattactaagcaggttcacatgcgtgcatgcttggccggcatgggtacccacgacgaacttaaaattatattatacaaacaatatgcaccgatcgatcgatgtcacctcctgtaatgcacatcatatcatcccgttgatctcacatgcatgctccttgattttttttttttgaggacagatcaaattgcattgcattgatccggcttttgggagaaagccaaaatgctccttgagatcatttcagcgatgcaattgagtgagtacttgaaagtctttaagtctgaaatcaagtggctaatgcaagttgacgatgaacacggcatggcaagccatggcagtactcgaattcgtcgtcgtcgctttgctctgtgatatgatatgtcgatatgatcgaccaaacgatgctcgtggtagtgttgccagccgagccctgctgctgaccagcaatgcatgcagttcttgacagcgaaaaaggagacttcttcttttgagttttgacgccttgcgccgacgggtgagccgccgccgccgccgccgccggagaagacaaggcgtccagcctcggggcccacgagggatagtacacgggaatcggattaaacgggccgaatccgccagtttgggccagagtaaagtgcgccaccgcgactccgcgagcgcgaggcctcgtttggacaatggcccaaatgctggcgcgtttgcttgtgtgggctgggaaatttcgagcaaaatctggcccatatactatgatgggctggggcttagacttttacctatcccgacgagaccagagttaggccgggcggaatatatgggccgtgttgcgtgggccgttgccagatttcacgggccgtgcagccatccggtatgctttgaacctggctgaactttttccaatttatagacccatagtttcgcttatgcttagacttgtaagctaaaatttaaattttagagttgaaatttttagttttcccatcttagtttgttttacagcattttaaaaaaaatcgctaagaatgtttatataaaacttttgcacgcaaattattttttatcggtaataagcggtatacataagcataaacataagcaaaacaagtactccagtaaaattgaaggtgaaggagcgcagcacaaaggattagacaaaatcaaagcattttctttctgcattctgtgagttgtgcagtttccgaactggctatactgtcatagtgatagctaagaaatttacaggaaataatggcacatatatatatatatatatgccaccaatacagttcgtaattaaaggttacatcaggaaaatgaatactgattcctccttgcatgatcttggatgacagaacggagagaaaggtttggaattagctgctggtgcacaatcggctgtcctgtaatgggagataccctccgtcctccatcaagccaggatctgatcgcatcggtttcgtaggtgaatccgtctgatgcaatgcaaggctccctcataacctcctgccattacaatgcaaatgatcaaatttctatttcaattcatcacaagtgacaagtatttgtgttaatctacacaaggagcagtgctaagttatgtgcagaacttttcattgaatacctgaaggattgggcagatgaagtatgaagggatgcagcagtcttcatcgaaaggcgactgcatcactgatgatggagaaaatgatgcagctagcttcctttgtatgagcaacgtctccggttctctgacacagttctcatcatgatcaagatactcttgcagcggcttaattatttgcccggaggcctctaagatcaaattgtctgaaatcacttctttctgttcctccatggttgtgttctgatcattcttgggtagatctctttcttgttttaactgtgcaatttcttcgcttgctctcagaagtgcttcttccagttctttcctctttttaacctcctccaagtacagctcctcgtattctttggcctgtaaggttcagagttctgatcaaaattctgaagaatatattcatatgaaatctggatgtttttttttctaagtggtctcgtttctgaataaaatagtcaaaggacaacgaattactttctgaagagatgaaactacttcttcgtctgctttctgccgtctgtaagattctcttaaagctctcatcattaagttgtcagctgctttgcatgcttctttgatctcatcgtaaaaacccagttccgattcattgttgtcatcctaaataattggaaaaggaaatcaccatattatgtcatcactcttacaagacaaaatattcgaaaccataagatggcattgcaagatcagaagaacctgttcctggtgaagtgtcaactgcagagcatcgtgaccagtatcaggaatgaaaggcgtatgtccaggtgcaatttctacttccacgccactatcatggaaaatgaatcagagatttttgagcttcactattcagtaatcatcataaatcgcaaaattactactaaaaggtttttaccttgtacagattaaccgttctttgcagacaaaccaaatcttgcatgatgggtcagctctctgcataatttctgttgctgtcctggatgcaggtttgtccatttttctgaaacagaaaacaacaattattggtcagctctctgcataatttattttgtcttcaattacaaaataaagctttgcatttcaagtgttatattttcttagaagaaatatttaccttgagtaattcctgtctggggcagctgaaattactagcttggtcactccatgcaagttgattagttcaacaagaccgtctacaacattttcgttctcaatgactagcttctcacatttcatctgaaatatacagacaatgaaaaaaaaactgtcaataagctgtagttctaaataaaaaacggctgtcaataacaagccaaagccatcttgagataatgaattcacaggaattaacagaacccgtcacaccttcatcctcaggcattgattgacgtagtgatctaattgcttgtccaccttgtcacgctcagccattctgaacaagctcacttgctccggattcagtttactggcatggaacttgactcccactgcgaccaaaacagaatcaatacaacactagacagattatagccaaatttctcagtcttctgaattgaaagggctaagaggagtcacaaacccatgaactaatccatggtttccatgaatttttggccggacaaccatacatataaccatgaaatctttcagaaaaaaaagaagaagagaagaaaaacaatcggatgatgcagttacgtactgacggggatcatctgcggcggcacatgaacatgcgtgacgacgatggccgtggcccggaaatggccgagagcccacgacagcgtcgacctgccggacttcgcctccgccggcagcgccacgaacaccttctccggcgccgccatcgaccgaccttctcgtcaagcttagctccagttaatttaatgttcagttagcataagtacaaagctagcaagaacacgcggctttgggcgtacagaccggagactttggatggtgacaggcaccatatgcgaccgggaggaagaagaagaaggcaaaattaacagtgacacattaatttggacgacacggaaccgcatggagatttccaattttccaccaaaattaagtgatgattaattaactagcgccaatatcagcgtcatcgatagccttgtcattgaaaagaaaacttgcacatctcacagtcgcatcgttatataatttgtcttgtgccttgaccgtctccactgatcggttacatatactactaactccatattttaatgtatgacgccgttgactttttatctaacgtttaactattcgtcttattcaaaaaatttatgtaattattatttattttattgtgatttgattcatcatcaaatgttctttaagtatgacataaatatttttatatttgcacgaaatttttgaataaaacaaatggtcaaacgttgatcgaaaagtcaatgacgtcatacattaaaatgcggagggtgtacaaaattaatctgctgcttcggtttcaactaactgtttgaactcggaagggccgaagcacacggcaaggaaaggaaagggatttggcgggtggcaccgtgcacatcctgaacccccacagttcgttcaggtgtcttttcccggcaaattaattattaggattattactcatctgaataagtcccattgaataaactcctaatactttggtaatgacgttttgaaactttaatgaaatgatatcctccggcatcgtgaacatcgtgataacttcgctgattttttttttctttctttcttttcgctttttttttttaaaaaaaaagattatttgcacatgtgatgtgagaaaagatcagcggcccagatggcaagatgtgctaggcccataggaaacaaagtggcccatatagaacgtgtcacgtagcccaacattttcacggcccaaatttatatgggcctaattaggccgtcaggtttgtgcactatccggccgaaattgagtgggccaataccacagttccgtcatggttcgccggatgctccagcgtccaatcgccgccgccttcttccaggtcactattgcatatggagatacgaattttaatacgagtagttcagaaataaacatctaaacatcactgacttaaatttgtacattttatactgtaatcgagctgaaatacggatagaacgtacgtaatgcatggtgcgaataaactgtggaatgatgacgattcgacaggctagcattaataattaacttaatccatatatggttaaagaaatcagcatgcttatcacattaaatcatggagcctaaatcatgaatgtaagcatgttacgtcgctaccttaacttatctggtgcggactttgcagtttgcagtactctcttccagccattttgttcacacaacgatcgatctgtgtgtgttcatcatctctaatcgtattcacataaatggtagtctgatctgattaatattctgatggtgtgattaattaatataatcctgtaacgtgatcctggggatcagatctcagctcccgatgcaagcagctagctcaattaagcccataatttcttgtcttcttgtttctagctagaggcagtacgtggtatcgatcatcaagaacgtactcacagctggtgtactttcttcggaatcagaactcagtttttgttcgttagcgacctacttatatagagccaaaaggaaaatcggttgccacatgcatgtaagtgtgcaatccagctaggctacaattcatagatgtcagaccatctaagaactagttttaacagcagagtcaactattaagtataagctaatattacagataacgtttataatagatgaataataaggttatctctattttttctcctctctttctctcacctatgtatttaatttagttatcttaaattatgaatagttaactattacattagagctaacacaacttatttttccactatcctcccctccctgtaagttttatagttgacttatagcctactattaaactatttaaactagatcttgagcttatacttgctagttttacaattcttgttatttaaacaataacacaatcttcaaaatatatatttaactatatttttaatattatatataataaataaatatatttgtacttattttagcgccccacatccaacgttggcccactgcccctccatccccatggtatcggcaccgttttaattaggtgcctatttgcttgtctaggttcaccgtccaccgtcaaaccgtcatctctcacggccatccctctaaacccacccgatgatctgcctcctcctcccacccccaaccaatcctaacttgggaccctaaaccattactccactgccattcgtcgaggttatcggagatgtaggagaagggttgccagatctagtgaaggagttgtagtcattggagcacaaatcgtgtaggaaatataatcctgtggtaaaaaaaattgaaagattttgattgaagcaattccaattaaaattacaacatcaggcaagcaatataagaattttttttacaaatatacttattttttcaataatttacatttatatatatgcatacaaattttttgtaaaaatatacccatcccgcagaacgaaaatgcgggatcgcgacggtcccgcagcttcaaaacacgggaccgtcggtcccgcggacggccgcgcggcactgcaacggtcccgcagctccataacacgggactgtcgcggtcccgcagctccaatacgcggcaccgtgttgccagcgatttttatactgtgcgcactgttgaaacactgtttgggtactgttttgaaccgtgcgtggagcgcttccgcacattcaaactgcgggatcgcccatgaatattgccaaacagtacgaaaacagtactaaacagtgccgcgcagtataaattttctggtatatagcaggcgcgtggtagaggatgggaacgcgcggtcccgctcaacgactacgcgcgaccggtgcggttccgtgcatcggcgacgcgccgcgcaacggcgatgcgggaccgtctcgggaccacgcgttcccgcgctgcttctctccgagccacgagagcgagccggtgccgcgcttccgcgccgcgggagggagacggtgccgcacggccgtactgcgcaaccaccggtcccatggaatggcaaggcggcactgtctcggtcccgcatccttgtcatgcggtggaggtatatttatgcaaatattttttatgtagatatataaacgtaaaatatttttaaaagaggtatattttcagttttgtttcagcaatataatgtatcactttagagactcagaagaaatttttatcggcagatcaaacatttccacatatttcaacaaatgcaactggtcaactcgcttcaattccccgtgatgagtcggcgatcgatttccacgaatatctgttctctcctggcaaaatcttgtcctatctctcgcgaacacctggcccatgcacctacaacaaccaagcaatcattcatcatgcatgcaactagcaaccgcaaatacatccattctagccataatccggctataaataccagacgcccaaatcaaacgatgcaaagcaacacaagccgaccgaagcaaacatagctatagctagcacacaccactagctaattaagctcgctcgatcacttcatcagttagcaatggctatcaccaaggtcgctcccctcctcgccctcagcctcctcctcttcgccgtcgccgccgtgcacggctgcgagccctactgcggccacggtggcccggtcatcccgacgccgccggtggtggtgccgacgccgccgtcgtaccaccgccatggccgctgcccgatcgacgccctgaagctgagggtgtgcaccaacgtgctcaacgggctcgtcggcgtcaagatcggagccggccccgacgactgctgcccgctgctctccgggctcgccgacctcgacgccgccgtctgcctctgcaccgccgtcaaggccaacgtgctcggcatgaaactcaacctcgccgtcgatctaagcctcatcctcaacaagtgcggcaagatctgcccctccgacttcacctgctaattgagctcaaaccgtgcgtgcagcatgttggatatcatgattcatgagtttgatctttcatcccgattcccgacgcagcgttaaacattaatcttgaaataattctcttgtttactcgattcgccatttgcagctcgttctatattataatgtaaaattcttgaatcacttggttgttgtatattgtaacgcccattatatatagtagtattttttgttctcacaaagataactgccatatagcttacacgttcaccttaagttctttcttttctatccgtgcataaaaacactcgcacgatatgtgataatcatgggcgatgcggcaattcttgacctaactgttcctatttcctcaagccggtccacacatgttcctagccatgtgggtcctgcatcatggtagtctcttttggcccaacatgtcgcgtgcatctcgttttgtttgggatgttggcgggctgcttcctgttttggctgattagaagggttactaagttttgaatcctaataagggtaaagaagagatttgtacgtgacattgatgtgacatgtcatgctggcatagtcatgactgataaataggacccacttaaaatttttcatttttatttttttctttctcttttctctttttcctttttcttctcttgtttctctttttttccctttctcctccttcctctcaagaccatcgccgcatggggtgcttaggtcacaaagaaaggagaagaaaagaagaaaaaagagaagcagaagaaaaagagaagaaaagaaaaaaagaaaagaaaatgttttaagtggatcccgtttgtcagtcagatgactgccaatcacgtccatgtggcatgtcacatgagtgacatataggattttagatgggttgtgacgatctgggacttagatgacacacttcaataagttttgagatttatatttatattttaagagtttaggaatctgaatgacacaaaccatacaagtttaagaaccaggtgtggcaagatgtgcctacctaggtccacttcaaatagagcagctagcccatataacaatgtgtcataacccaaccaatatttccaaaacatatgaaaagagaaaaaaaacataaaagtagaatataatactcattcaattcctatgagattgaaacactggaaagtttcaaattgtttttgatgggcacacaggaaaaacacagaaaacatataggaaattgtaacatcccggcctaggacttaataggattaatagaatactcatatcaacaagttgcaacttcttttccggaagccaatctccaaaaaactccagggttaagcgtgcttggcctaaaattcttcccgggtgcacacgagtgaggacaaagtgtgcagaaaagacatgtgttggtctgtgagggcagtctatgacctatgaaagctatcagatataagcgggcctacctaggaaagctatcagatgtaagcgggcctggcctgggagaggcgggtcgttacagaaatagaaagaatgaattgagacttcaggctatttaatttcctccaaaatgtttctagaatagcacatttcatatgaattctgaaggaattattagtagaaatcaatccgttgttttaaaaggctttataggatttttatcatagaatacaaatcctgtaaaattcataagtttttctctcttttttttgaaagggccttcatgtctataccgtgggagagcaaaaaaaaatttgagttaattgcactttggactaggaaaatttaacaaagttttactttggacaaggggtgaagttatattcactttggactagataaatttacaaaagttttaaattggaccacccttcttctccatctcctttctttcccttcttttctctattaagcagctgcgccatggatctgagggatgatcaagcaaagcaccaggattccttctctatgtgctctgttccccagcttgaagaaccatcaaaatcaagactggttttagctggttgctgtacctgtctcccgcaagctcgatgcaatgatttgttctaagctcagatgaacttttacggggaaaaaaggttgaagtcaagcagctaaatcaatgagtaaataaatcaagatcagatggaatattaattggtttgttgtgttgcgggtaagcccgccaatgaaatcaagaagtggcaaacaaaatagtggcccaatgtgcagtagaaggtaagaaaacctgaaccaaagtgaaaatgttagatataacctagtccaaaataaaacacaggcaataataatcggcccaaagtgcaattcactcaaaaaaaaaaatttatagctagcttagctcgatttgcagagcacttgacatactgactgagtgactgatgacgtaatggctcgaacaaactgtacacacgcatgtggaatgacgacgatgattcgacctgatgctagtattaattatttaattaaacccatactgttaaacaaattagcatgcttagcacattaatcatggagctagcctaataatgcatgttgccacctttctctgatgctggctagccattttgttcacatcgagtcagcctgttcatgtgatcgagtattcataatctgatccataatagtactattttgacggtgtgattaactaatataatcttgttcgtgatcctcgggatcagctccacaaagaaatatcagagtctaaactaaccagacaaagttataacgaccctcactttgcatgcatgtatgaaaaaaaaattagtgggaattcctcgcatggaattaagctcctatgatcatattgtcagtagcgaaggctaagacttagctgttctcaagctagatccatctttaggtacatccagctagccaatacaattcacggaggccatcccggctatgcgtgtacaaatggagcatattgactctgccagctcaagtacctaaaataatgcaggagagaggaatggatggatggttacgtatgacacgatgtatgcaaaattacaagtccatagcaagcatttcagaaagcattatattcagaacaagtattattcggcagatatataaagcacacatccatatattaatgtcaacaaatgcaactggtcaacttgcttcttccccatgaataatcgaattaattaaacgagaatatatgttctctctcctggcaaaatcttgtcctatctctcgtaaatacctggcccatgcagtacacaaccaagcaaataaatcatcacgtacatgcactacacaaccaaacaattaatcataacggatgcaaatattctactccctccttcaaaaaaaaaaacaaactctgggtttccatgtccaacgttgactatctattttatataaaaaattttataattaatatttttattgttgttagatgataaaacatgattaatattttatgcgtgacttgtctttttaatttttttaacaatttttttaaataagacggacggttaaacgttgaacacggaatcctaagatttgttttttttttgaacggagggagtaagcttcagctagttcagtacgtgtatagttccaaacagcaagctcgactcgatcggctataaatacctgacgccccaagcaaacgatgcaaagcaaacacaagctgaattgaagcagcctagctagctaattaacaccactagctaattaagctcgctcgatcacttcatcacttagcaatggcttccaccaaggtcgtcgctcccctcctcgccctcaccctcctgctcttcgccgtcgcggcgcacggctgtgagcccaactgctccggcggtggtccggtgatcccgacgccgacaacgccgtcgtacgaccgccatggccactgccccatcgacgccctgaagctgagggtgtgcgccaacgtgctcaatgggctcgtcggcgtcaagatcggagccggccccaacgagtgctgctcgctgctgcaggggatcgccgacctcgacgccgccgtctgcctctgcaccgccgtcaaggccaacgtgctgggcatcaacctgaatctccccgtcgatctgagcctcatcctcaacaagtgcagcaagatctacccatccggcttcacctgctaattgagctcgatcgtgcataattaatcttcatgcgatgacgaggattgatctgagttgcatgataaattaaagattaatcttgaaataattatattgttattcacttctacatttttgcagcccattctacattgtaccttactttatcattcttgaattacttaattgttgtaagttgtaacgcattatagcaatgttgttctccacatgataattgttatatagcttgtcctccttaatttctttctttttcatgtatgcaaaaaacgtgttcgtctcacagcgtttatctataccatctgtataattgacccacaaagtattaatactcaacaaagtaattattactactcttaaaacctaacatgcaagtatatcatatcaatccactaaataactaaagctcaagatgcaagcaagcatagcaattacatctataattttttacattctaaatcttaacattcaagcatgctaaatcatcatcccacatcactttcacaatatatcaacatataaatttatctatcatttatacaatgtttaacatatattcctctacatattccgtagcaaaacatgggacgtcatcgtatatttagtgataatggcgagtgaaaatgattgatctgtatctaacgatttcctcaaacaggcacacacatgtaagccatggggctaggcatgaatgcaggccttgcacgtaccatgctcgttttcggcctagtacctgtgtgcctcgtttcaacacaaagcacattcgacgtattggtgaacttctggttccgtcctattaaaatagtaactaagcttggtctgtctaaaaagggttagaaaagatgaatgacccaaatgacaagatgtgtctaactaggtccacttcaaatagagcaacccacagaacaatgtgtcataacccagtctttgcacaaaaaaaaaaacaattttatgtctgaagttaattgcttctaagccaactacaagaactagattataagctattaccgtccccagattctagggttaggggatcgtggctgggagagtggccttactctgtgttcccaacacagctgctgcgcacgaaaacgttaacggagcggtacattagaacgtgattaattaagtattagctaatttttgttcaaaaatagatcaatatgatctttttaagcaactttcgtataaaaactttttacaaaaaacacaccgttgagtagtttgaaaaatgtgcgcgcggaaaacaagaggagggagttgggaactcatggaaatgaacgcagccctgatcggctttacaagcatctgaccctaggaacaaattgtctttaattttctaaatgtttttcttcaattatatcgaaaataaaaaaaataatggttacattgtcgcacagctaattttcaatttttcagggtacgcaacatatgtcctacgggaaaaattataaactttagatgtcatgccgcaaatcttgcctacatgtttatagtggtaattgagcaaaattcctttgtatatgttcgtagactgcagaacacttgcatatgggatatgctgaaatactgacagagaacgtaatggttcgaataaacagtgtggaatgataacacgatcggagacctgctagcattaattaactaaaccgatatggctaaagaaacaagcatgcttagcacattaaatcatggagcccaaatcatgcatgtaagcatgttacgttgctagctacttaatttgtctggctcggacttactctcttccagcgattttgttcgatcaccgatctgtacgtgtgttcatctgtaaacatggataagcatggtagactgatctgataaattaatataatcctttaacgtggtcatggagatcacagctccgattccagtagccaaattaattaagcccataatttcttgtccaccatgtttctggaggcatagaggtcaagaattcacagctggtgtacttaatttgttcagaatcagaactccgttttaatttgttcattaaagacctaagagctaataaacggaagttaaaatcggtcgctacgtgcaggtaagtgcgcgtgcatggtcagctgggctacaaattttcatggaggtcactatgcgtgtatatatagagtatacattatagtgactctgcttaagctagctccgatccggccagtagtagattaatggtggaagaaattaaggaggctatgacactacgatatcgatgcacatttaggcaaaaataaaaactctccaaggcatgcaactatgtcagaaatgctcgatcagaacaagtattagtcagcagatacaaacacttccggccatatatttcaacaaatgcaattcgtcaacttgcttgcttggccatgaatcgatcgacgatcgaactgaaagaatatcatttttccctccaggcaaaatcttttgtccaacctctcgcgaagtacaccagctggtccatgcagtacacaaccaagcaatcatatatatgtccatcatgcatgcctaacaacttagacagaacaaatatgtctttttacttgagagttaacggtcaacacacggttaaactgacggtagtggcatgaaagagtgcgcaaatttggaccaatggcatataagaaaagagccaatttccaatgatatataagagatccgaccaattttcagtggcatataaggatccgaccttattctagtcctctagctactactagttcagtacgcatagtttcccaacagagctagctcgatcggctcggctataaataccagatgccccaagcaaacgatacaaagcaaacacaatctgaaacagcctagctagctagctaacacaccactagctaattaagctcgctcgatcacttcatcagttagcattagcaatggcttccaccaccaaagtcgtagctcccctcctcgccttcaccctcctcatcctcgccgtcgcggcgcgcggctgtgagcccaactgctccggtggtccggtgatcccgacgccgacaacgccgtcgtacgaccgccatggccactgccccatcgacgccctgaagctgagggtgtgcgccaacgtgctcaatgggctcgttggcgtcaagatcggagccggccccaacgagtgctgctcgctgctgcaggggatcgccgacctcgacgccgccgtctgcctctgcaccgccgtcaaggccaatgtgctgggcatcaacctcaacctccccgtcgatctgagcctcatcctcaacaagtgcaacaagatctacccatccggcttcacctgctaattgagctcaaccatgcatgcataattagtcctcatgcaatgactggctctgaaggcttgagttgcatgattaaagattaattaatcttgaaataattatcttgtttactcgcttctgcatttgtggctagctcgttctatattgtattgtaccttactgtaccattaattctttaataatgattacttcattgttgtgagctaccttaatactccctctgtttcttataaggtgttttaactttgatcaaagtcaaactgtttgaccaaatttattaaaaaaagtaatatttttaacccatgataaatttattataaaaatatattttattattttttttataaaactaatttgttaatgtaaatattactatacttgtctataaacttagttaaatttgaagtagtttaactttgaccaaagtcaaaatatcttgtaacctaaaatggagggagtattgtttttcacgagatagctttcatatggcttgaaaaacgctctcacgacctatatatatttgatgttgatttattcacacatgtttaacacatataaagcggatcggaattttttgtattttttggaaaattcactggggggagagctttcccacctgaattcattaaaagggagcaaagggcagttttacaaagtccagagcattacatattgagagagcggagggaggaagaaaagagatctttccaggtcgaaattacatgtctgtcttctactttgatttccccccccccccaagagggaggcgtcctcgatacattgctgcagcaaacggcgcaaagagggagcctcgtgtctcaagacaaccccgtggtggtgattccacatgttccaaaagcatactccctccgtttcacaatgtaagtcattctaacatttcccatattcatattgatgttaatgaatctagatagatatatatgtatgtgggaaatactagaatgacttacattgtgaaacggaggaagtagcaagtagaacaccctaaagtgcttcaagggaacttgaggcggggtggggagagaagcaatctcagcaagcgtcgcaacattgaccggtatattcatcgcgccccagaaggccacagcgaaggggcactggaagcatatataggtggagggctgtttcatcagcaaagttgcaaagatcacaggttggagccggcactatggttttcttatgcaagctgcgttttgttgggagacgatctttagtcaagagccaggcaaaaaaactgaactttccagttggggcacttctccatctcgtcgtattctgcaacaagataaagatgccttgtttttaagatcccaggggcgcctttcttggtgcgaacatcttgctgatcagtcactgagcactgcatcaagaagctgctaagatggttgaagtgccctggagcactgcggatcggaaatttggaatcgacctggagcatagctagtcgtaataacaaaaaagattttttttctcggtccgtattatgctcggactagctagctgtatgcgtttatccgcgtaacaaaaaaaataataatctgagatttccactagaacacaacgaatagagatcacgaaaataaacattatatatatatatatatatatatatatatatatatatatatatatatatatattctttttgtcaaatttataatagcatgaatcaaattaatctctctgttttgaacaaccaactgatagagacaatcagatacaccatttcatacaaagtctgaaattaattaatcacaattcacaggtactgtacggattcggggtcgtcgtagtcccagtccccgaagatgacacggctcatgtcgatcttggtccactcctcctccatcgccgcctggatcgccgccgtctcagcgaagtagctctcgccgaccatgtagcagccgtcgttctcgacggcgcggcgaacctcctcctggaacgcctcgaactcgtcgcccagctcggcgtcctccacttccccctcgcgctcctccggcgagaggctctccatgtactcggggctccgccgtgggttcctcttcagtgtcaggatggaagcgacgtagttgtcaggcatccgcaccttcttcttcttcgcagcagcagcgcatggcttcttctgctagtcggcgacgacatacttggctgctccggcgatgacctgagcagcagcaggaggaggcgccgccgccgtcgctgccgagccggtgatcgccttcttctcctcctcttctgccatggtgtggatgtcgcgctcttgatccagcttactcgcgcgctccaccgccggcggtgctcgtcgtcgttaccctcgccggccgccgcgatgcgctcggtgattggcggcggcggtgggcggcgtcccgagctttatggggacaaatcccaattgatgagagatccgactcggattctgatctgatcttgctccggcctcaaaactaattgggccgggcctgcaggcctaacatattcccaaacgcagcatttttggtgggcttccctttcctgccggcccatgcttgaaatgattaatcagattaggcccgtttagaagaagacagcccaccttgctgcgttgccaccgtacgtagttcgacgccgtctccgtcgccggacgtccgccgcctgccagtgtacgatcctttgtcaatgcatgcacgtggttttcatacttaattcgattagatggccttaatttcatctaaaactgattcgagctactgaattattttaccgatcgattagctagctaaactggtaatataacaaacctagaaaatgagcatatatagcacagctcattatatcatggggataaaggtcgtagctctagctagttatacgttcgtcgtctggtgcagagacagcagacgacttccagctataagctagtttgttttcagttctcacttcagacttcagagttgtacagagttcagactttcagaccagtcggcaattagtcccacgcatccctgcattattcatcaaattgtccagccagtcgtacgtatttatttatatatatatatatatatatcttgcgtggatatacaatataatcctgtaaagctgttatgtaatctcctcgggataccagcttcaattcccatctttcaattaataatgccttagatatgcccatgcataatgcttctctgtacatttcttcagaattaactctgtttttcttttttctgtagagacctatacgtacaggctacagctaaagagaaaatcaaatcaacaggaaattatgcaaagttgcttaattggaaatgagtaatactttgccagaatacatccactgccacatgcatgcatgcatgaaaatgagcgacaaactggggtattaatcagagagctgaatatactatgtgcgtgtggagtatagcgtataccgtgcgcgcgcatatcctccagtgggctaagctccaaactcatcatcaagctgcagataataatctactccctccgtttcaggttacaagacattttaactttggttaatgtcaaactgttttaaatttaactaagtttataaataaatataataatatttataacactaaaatagtttcatcaaattaataattaaatatattttttctagaaacttggttaaatttaaagcagtttgattttgaccaaagtcaaaacgtcttataccctaaaactgaggaagtatcagttaactatacgcctatacctgctaatgaaccattatatgtgatattctgaatatatgtatatgtactgatatatgtgtgatttcagatattgtagttagttatcagcaagttcggcgcttgatctgagatatttactcgtatatatataaggtatataaacaacgtgacaggccacttagctgaaatatataaaactgtaagaaaaacaatagtcgatagatcgatcgtgaagttgtgtgatatatatatattgcgcaaatatattaggcttagatactggacatgattgataaattgctgctctgcacgtacgcctatgcatggctgaaataattaatcaacaaccaatctagctagccatttccttcacggaaaaatccttgtcgcatctgatctctagcaaaacaagcggcccatgcccatgcatgcaaatccatccatggacacaaacccagtgcacatgcatcgtgcatgcaactagctgcagtgttcatctataaataccagacgcctcagccccaatccaaaacacaagctaattaaagcagccttagctagctaattaactctactagctaagctcgatcacttcatcacacttgagcaatggcttattccaagatcgctcccctcctcgccctgaccatcctcctcttcgccgccgctgcgcacggctgcgcgccatactgccccggaggggcgccgccggtcatcccgacgccgccggtggtggtgccgacgccgccgtcgcaccaccaccacggcggccacggccatgggcgctgcccgatcgacgccttgaagctgagggtgtgtgccaacgtgctcaacgggctcgtcggcgtcaagatcggagctggccccgacgactgctgcccgctgctgtccggcctagccgacctcgacgccgccgtctgcctctgcaccgccatcaaggccaacgttcttgggatcatcaacctcaacatccccgtcgatctcagcctcatcctcaacaactgcggcaagatctgtccctccgatttcacctgctaattaagctcagctgctcaagcttgcatacatggacaaatgcgcagaaacaatattcgtaattaagcttatctatttcattcgatgatggctagctagctagctgcatgcatgccgtggctatgtcatccagaataagatgtgttgttgttttactctgttcccttatatcaattttgtattgtgttgtattgtattcgaattgaatgagttaacgagttttgtaaaaccgatttgtgcttcatcaatgaaatatctgtggtgtaagattgttgtgacaacgattattaccagcaagatagtatagtagtactaatcatcattaacacattcgctttgtgcttcatgacaccatgaagcacaaaggcccatcctatacaaaataaatgcgattaggcggcccatggggccaaatccggctaacccaagcgatcgaaatttggatgggcctaacttctctccgcgcacatccgcgttaatgggccggggcgcgacgggatggcccatggctggctcgatccatcagcagccacgcgcgcatggtgatttctcgccggaacgccgccgccgtcgagcttgcgttcgtcgtccgtccaccgctgcagcctccgtccgattcttgcatgaatccgtacgacgtcttcttgtccagcaaaagatggagaatcactgcgccattgcgaccaacatgctagcagcgcgcacgcatatgcatgcaaaggagctttgaattaactaggagtagcattttctttcctccccaccgccatgaacatgaatgcttcttaggcactgttattttctctaacaaaaactggataaaagtggcgcgctttttaaactgctaaacggtgtgttttgtgtgaaaactttctatattaaagttgttctaaaatataagattgattcatttttcaagtttgtaataattaaaaactcaattaatcacatgttattaccacctcattttgcgtgaagcacttaatttttatcttcatctacatcttcaggagattcaaacactgtcttggtgtgactagataacggtataccattcaatcaatggaatattttacatgctgatgtcaccatgatattagcatgataccgtaggtaccaatactcacatgtattaggttatggcacctaagtagcattttaatgttagcagataccttaggtacgggtccgtccggtatcaagagtacccgacgtgatacccatataccagatctggtatctaggtaacatgatgacattaggatggtgtttacaaatgtaaactatatcggatagcattttatagtatttccgtagcatagtactctctctttcggaatgttagatattttggtgaaatttgactaaatttatagaaaaatataataacatccacaatagcaaattaattttattaaacctactattaaatatatttttataatatatttggttggtctaaaccatgttaattactacttttcttatataaatttgacttcagattaaaagctaaacatcttacgttctaaaacagagggattagataacactaaattatcatgattattacaacactgtggctgattttatccggtctatatatcctttaattttcagcctgtcggtgcgtgagaaccattttcgcatgcttgtattcgtgtttgtcttttggccgggcctcataatgttgactatatatgtatcgtgcatatgatacgtgtatataaattaaagaaaaaaaaaccctgaaaggctgcaatgcgtgtaaccgtatcgaaaagcttcaggcccggttgtcatgcccatgatttctgctttgtcgtccttctcacgtcgttgcagtttgcagattgtagagttagtatctacaagtcatctactcacacaagatgactctttaaagaactgttcattgttcaacactgtcacaataataatatatcatggacagtgtactccttttcagaactctcttttgttgtttagcaatcactggggcgaaaaaatagctggaataataatcaaactgtgcatatgtatatatattaattagtttgcttgcaatggagaacaaatgccttgtgtcaatgcgttgtacacaacacatcacgacatgcagaaaaagtgtgctgcaaaccagctgggtactggggctacacacacctatctattattcatcctgcaagctcacatatgctgcatgtactcgtcgatcgacatagatggtccggcacaaccaatggcagtgggtgttttcaacacctctcgatctgcagctgatctcaacagtttattttatatgatggtgtaaccatctaatataccatgttgctgataatttttaaccagagcaattaatcggagcatggccctagtgttgaacaatttgcactttcacagtcaggtgtaacattttgtacattcagcataatggtatgctctttgcgctttttcagcccttgtgtaacacagcaggatttcaaaaacacaaggataaaaaaacgtataaatagaatagcatgccacaacaaatcatacaggatttttttaaagaaatgttacaggaaatgaatccactgaatttttttttttaaaaaaaagtttggtaacaccataggagaagtaaaggaattaggagtcacgactcatgatgaagagaaaacatgagatttaggctcatgttaattttcctccaaaatttgttgaaatgagccattccatatgaatttcaaaggattttatatgagtcattcatttgttcgtaaggacaatataggaacatttttcaatgaattgtaatcctctataatttctacagttctcctttatcccaaaggaatctttacgtacgcacaggtaaaattgggactcccatgatcccatctttaccagaaggggcgagctagaggattgccgtgcgtaaatttgcacggtgctagctagctagattttgaaagtagatgaaccgatatataacactttgggtttcatactttcattagtccacatgaacatcgaaccctagcttagacacggcataaatcgatcgaggcatggacgcatgtatcagtatttgcatgattgctcgatcgagattatattaccctcttacacatgcatgcatgggggaataattcaacaacgtctgaatgtctgattcctcatggaaaattccttgtcacatctctttctctgagtactctaacgaacaactggccatgtatgcacatgcaccccagagacaacctagctacgtaccctgcatctgacacccccacatgcacgtaccattgcatctgcttacttcggattgataatacttacagtgaacaacacggtctcttaaaaaatagctttgattactatttctattataatatatatagaaatattaacaaatatataattttattagatcttaacaagcatttctccatattcatccctgaaagttggtttttataggacgagaggagtacatattttttaagaaaattattttataaattatttataatcaaatattttaaaattcgatcttaattttgtccgaaacaacgagtattataagagcttatttggtagagctccaactcctaaatttagcttcaagagttagatctgaagtagagttatatgaagctgcttaaacccaactttgcatgtctagttcattttggagatagctctacacagctcagctgaaattgtttggtgaagctagagctgtgccaaacagggcctccgtctggagagaaagtagcaacgcatccatgcaaaccactcttgctataggctcgatcggctataaatacaagacgccatgacaccccaagcaaaccaacccaaagcaacacaagccatagcagcagagccgagtagctgagctcactgttcgatcgatcactagctcgctagctgcatccatggctgcttccaaggtcgctcccgtcctggccctgagcctcctcctcctcgccgtcgcggcgcacggctgcgagccccactgctccggcggcggcgcgccggcggtcgtcataccgacgccgacggtggtggtgccactgccgtcgttcggcggcgcccatggcggctacggcggctacggccatggccgctgcccgatcgacgcgctgaagctgcgggtgtgcgccaacgtgctcaacggcgcgctcggcgtgaacgtcggccatggcccctacgactgctgcccgctgctcgccggcctcgccgacgccgacgccgccgtctgcctctgcaccgccgtgaaggccaacgtgctcggcgtcaacctcaacgtccccgtcgagctcaagctcatcctcaacaagtgcggcaagacctgcccctccgacttcacctgctaattaattgagcatggaaagtgctcaaaccatttgcgcaaaattaatgcatatttatattatatttaattgagtttgttttcatgcaatggccattggtaagttgcatgatgcatgagtaagccggcctgaataagctattatccccccttgtgttagtttaattaatttgttgcatccgcattaatttgttgtaccattggaatcactcacttgtaatttgttgttgtataaccaatgcattgtgatcatcatcaattaatatattttcatttttaatatgatcgttctttctgatctatgaacacgtaagatcgatcgatcgatcaagctaatgaatctgacgaccatatcatggcgaagcatcaattctgaatttctgtttgtgaccacaaccgaatcgatccggagcgcaacaacagaagccgcgcgcagtgctcaaactggggctgtgggctgtggcccacatatgcagacatcgcgactaaagggcccggcccattcgttgcacggcccaaacacacatgaatctgctgcggggtcatcctcctttatctgaaccacacgatttcaatctaacggtgcaggacatgacggcacagaacggccccatctcacgtccttcctggaatccgccgccgtccgccggagctccgccgccatccgttcaccggcattgttacacagaccccttatcctactccaacttcttctcgatggcattccacccagcttgtgactcgcgactttgtgagtacatgataaaaaaaacttaaaattcagatagatattctgacatgaaaattgaatgatctcatcttttcgcttatgcttatacttgttagctaaaatttgaatttttaaccttaaatttgaagttgattttgaggtttttttcatcgaagtttatttttcaatcgactccactgctccagaagtgtgaagcacatgaaggtaaggttcagtcagtcatgggtgcatcacaactcacaagttcacacctcttacatcttgagatgcatcgatcacacggggcacagcaaaaatcagctagctagctcattggttcgggattaattgcatctcaagagttcagacttcagtcttcagaggcaatgaccgtccttccctctttggatcaatttcagatgaatattgagtgtggtccacaaattttggaccaaattaattaaaacgatcatttgggacttgggagcgcctttacaaaccaccgctagatcagaagcgaagaccacagattgaagatgaattaattcatttatttgtgtacaattaggttctacattgatcgagctgcataggtgcccgcaccaatcggacaaagccacacacatatatagtgatcccattaatttgcccatcgaatgatgacgcgacggcgccgaatctaataatgccctgaccctatggtctccggcacatacatgcctcgtcatatgagcttacttaattaagcaccgcaaacttgaaggtgaaggtgtacttcacatgaacattacagatcgatcgatgccacttcattcgtgcacggatatactgtatgcaccaatattgtcgaccacaagatcgtttaagagtacaggtagaatacccagatatatagcttagttaattattaagtccgtccaaaaatatactctctctgtttttctctctgttttaggttataagatttttgattttagtcaaaatcaaactgttttaaatttaatagataaatatagcaatatttatattatcaaattagttttattatattaataattaaatatattttataataattttatcttggattgaaaatattattatttttttctataaatttggttaaacttaaagcagtttgactttaaccaaagtcaaaaacatcttgtaacctgaaacggagagagtaacaacctaatttctatccagattcgtgatactaaaatgtatcagtatctagtattatgttgttatgtaattgccggaacaacaaatgccgggccgactcaagcaaatgcatgcctagctcactcactcagctcagctcaatcccctgctataaattcactagctagcttgtgcactgcacacaacacacacactgaactctcacataaacacttcaactcatcccttagctagagctatagctagtgtgtcaattagcaatggcggtggcgcacaagaacagtagtagaaacaagcttgcagtcgccgccattgtggcgctgatgagcctcctcgtgttcgccgcggcgccgtcggaggcatgcggcggccgctgcaacggcggcgcctgcagatcgcggtgcgccaaaccgacgccggcgccggcgcgccgcgccgccggcgccaagtgcccgttcgacgcgctgaagctggcggcgtgcgccgacgtgctgggcggcggcggcggaggaggagggctgctgaacctgggccatctgctggggaactcgtcgccgtcgtcctccggcgagcagtgctgcgggctcctcgccggcctcgccgacgtggacgccgccgtgtgcctctgcacggcgctgcgcgccaacgtgctcggcctcgtcggcgtcgagccgcacgtccagctcagcgtcctcgtcaaccgctgcagcaggaagctccccaatggcttccagtgctccagcaactagctaattaagctagctaatttgattatatctgaattaattagtgcttgatgagcagctcatgcagctattgttattgttcgcttatttgatttgttgttaattgctttcggtgtcgtgtgtgatcgtgtagcgcatgcttactactttgatgaccgatgttgagttaattaattcctgtgcttgagtgagtgacattacatctacatgtacctcggagttgatttgtgcttttgcgtgctaaagttcgttataaaaatcttgtgttgaatatatgttgctcgagtaatataccgtatatgtgattctgaatctgagctgaatatggaatagtcagtgtttaatctgcatgcatggagcaagattccgagaaacaaccggtgagtaaactagcgagaatctgaaaaggaatgagtttgccaacttttgaaattctgcaactacaaattatcagaatgcaagtcaaaatatggaatgtttagagcaaccggggattattctcaaagttaaagctgctataggcacccccaaaacagggccaagagctggtttggaaacaatgccagaatccataactcgtctcatttctacagcttaaagccaggttgcacctatagaacattgcccaacagatgaatggcgcaaaccgtggttcagactccagggcattctgtaagaagttacagggcaaatataggcacttgaaaattctaactttaaatcgtcaagagtcaattccttagcatgtgcaatagttgctcaaagacactcatcgcattattatagaacaaagccatgcttggcaggattcagcaaatcacaagattgtaacttataaaaatacagcgacaacaaagacaaccatcaggaacattggaattgtcctgtttttttctctgattaaagaaggcaagagaattcagtccatcacatcacttgaggaagtggggtcttcttctatggtctatcaccaagttcctctctcaaattgtcaaatgggtagacttttggagtctgcatgaagaaatataaaaaatcctcagtcaagttgttcataaaagcaaatcaaaagcagacaggcatcatttgtcgtgattaggatgaaccattatcttaacttgatccggtctatgctcagaaatagtatgcatatttctttgcccattggcgacaaaatatgcaacaggcttgctactgtaacaagtgttactttaatgactgatcgcacaatctaatagcattctggcaaatataaggagataaattgaaaatacagtattgccccctctcttttgtgaaccttcattcttcaattaagttacagacctggaacactgaagaggcaagttgcttaacatgtatagtaactctgctatctgctgacacttttaaggagcaaatcaactcttggggggatttcatctatggcagagaagcaacttagagaaagtaagagactgtgtagcctgtacggagtatcgaacacggataatatgtacaaataaaatcctacatgcttcaaagttcgcaacagtttagcctaccacaccatgtcaccatgatatctctatgaactatgaagctagaccaaacacctccctttttcccctaaaaaaaactcccttttcagaatcgaaattggataggtgctgagaaaggagactaataggtcagaaaattgaagggttaaagagttctacaaagaccacacaaagttattatcacagccccactccatgattcaactcaaactagtgcctagtatgatcacattgaggtaatatttagtgttacatatagaccaacagaacatgataatcaatactactacctccatttcacaatgtaagactttctaacattgtccatattcatatagatgttaatgaatttagacgcatatttgtgtttatattcattaacatctatatgaatatgggtaatgctagaaagtcttacattgtgaaacggagggagtacaattcaagtaatataaatcaaggcttttacatatgaggaaacacaatgaagttatatttacagaagatgctaaaatatagagtgcatggcctgatcaagaagtaaatttaggcatagtgagtaaaatgttccctaagaatatcacagattctataaaataacacctcatacaatatcctctcatccaaaaacatttgaaggcagctaataagggtgactaaattcagcttgctaacagagagtggcaatacgccatatatatttgtaactgtttgatacaagaggataagagcacatgactgattgcatttaggatttaaaatatacatccttcaaaaatgccatctattcatcatattttcttacagtacaactaggtctatgattgtttagtctagtgatgatttctttttatgaaaatggacaacaatgatctcaattccattaaatcattttcaaactcttttttttccctcttttgctgattctataaattggagggtaggaacaatataaaattactctttgctatatgactatatagctaggagcaatatagaattacttgtcagtatatactatatagtagcaaggaacagatcgaacccaaggagctattgttcaacagaaaacttcaatgtgcattgttaattcaataatataattaatgcagatgatcagcatactcccttagtggcctaatcctcatagaagttatctggaggcaaaatcttctaacttgagaatgactagatataacatttagacatattaactgtgccacctagagaatcatgtgagcaaaatggaaggaaaggaatttgcagaaacaacggcaggtcctaatgggcgaaataaaggtttaactatgacacagggattgaatcacagtggccatttcccatcttaatgttttccccatccctgcaatgttttcttggctatttggtctaaccttacagtattactttgttcactcctactgttgttgaaatgctagcaattctactgtttgtccatccaacagaaagtaaaatatcacaatgaagtatttggcactcacataggggatcttggaggccttgtcgttcaaggtggcagccaagccaagagtagcgaagaatccgagcccaccgcaaagccaggccagcgcctcgtactgaccaaatagcatcacatcaaatcaaaccagatgagacccccacgaatccatgtgattcagtgcatgagggttgggaatcagaccttgccgatgtgcggcgcgaggcggtcgatgcagggctccgggaagggcgtgccgttgtcccacaccagctcgtcgttcgtcggcagctgcaaattccccaaatccccccgcaaatcgaatcgattagatggagaaatcgcatcggcggagagagaaatcggaggagcacaaggtcgatgagagggggggggagaggtgtggcgagagacggcttacgggcttgtcggggacgatgtgcctgccgacggggaggcccatgccggcgcggtggcggagcgcggacaccgcggcgcgggcagcggcgccctggccgcccaggacgcgggatcccgccgcggtcagcctccctgccattcccacctcgctctcgctctcgcctctcggatctgcgcgtgcggttgtgggtgacgtcgtctcgtgtgcggttgtgctcgtcggcggcggcggcggagaggaggaagacgcaggagtgtaggtgggcttcagttcagccttcgcattgtgggcccgtgggccgagtggagaaggcaagtattgggtcaaccaaacggcctagtcgctgcatggcccaaacgcctcttttgggggttcggagaataaaaccacagcaatcatcacacgcgcatcagcgatatatattttttattttttttgttttttgttgccgttttggtttgatcggttgatccgaaaactggatatgagaaattgtcggacgaaatttgcactttctggctaggtgactgctgatggagtcacacgtacatattcagttcagttgttaaggctgtgtttagttcctaaaattgagaagaagtttaagaaaagttaatagttttaaaaaaaagttgagagtttatgtgagtagaaaaattttgtatttaatgcgatgtgatggaaagttggaagtttaggaaaagtttaatgtgaattaaacagggtctaaggtgatgagctgctagctactactcctaccttgcaaatgttgccaaaatgaactagctagggcatgaattatgggatcagcgatcagtataggtttcagaaagcgcacaaacatttccactcaacagtacagtacgcgcggttggacgagccataattaattcagatatacagtatgctgctccgtttggttaattccaggtcgccattattaaagtaggtcatgagataacagtccctccatctctgtcactaagagcacccacaatctatctaataaaacatgtacatctcagcaatagactagattaatagtaaaccacctcaatagtatgtctacatgggtatctatagctctctaatccattgtctcgtttttctctatagactatctctaggttagtagataattttgctctctctctttatttaatctctttcaagtaggaaaatatgctgacatggatctcttatagatagcctataaataaccattgtgggtgccctaacagctactccctccgtcccaaaaaaaaggcaaactctgggtttccgtgccaacgtttgactgtccgtcttatatgaaatttttttataattattatttttattgttgttagatgataaaacatgattaatactttatacgtgacttatctttttaattttttttataatttttttaaataaggcgaatgatcaaatgttagacacggaaactagggtttatcttttttttggacggatggagtaggagtattcaggtcatgactcatgagtgctatctgtctctacggtatttctgaagaaaaccacacggcaaatggcacaagtcaatcctacgtgctccactgtagaatctagtcctatagtcccatatactcttgacaagtactgttgcttattgtgatatcataatgcaattagtactttattacttattagtgagtactcctacgttcagaagcaacttattagttaactgactaactgcatatttaattaagcggctaagttgcgcgcggttctttacccatcaaattgcataatctgtaatgcggttccaagaacagcttgagtaaaatgagacagagatccagtctcactcgctcaccgaaaacatgaaaattcagaacgtacagtctgcaagaaatctcctcgcactcgccgacgtccgtgctatccgtacgtctccggcggcgacccctcctaggattgacacacagtgagaggggccgcgtggacccagtctctttttagcccaaatgtctccttggggattccacctccgacgaaccactgggcacttgcatttgttcggggtttagccttcatccgaaatctgaaaacgagtaattcggagatctcctctgacatccgagaattgatgcagatcatgcatcaccgtgtgtgtttagttcacgtcaaaattaaaaatttggttaaaatttgaacgatgtgatgaaaaagttagaagtttatgtgtgtagaaaagtttggatgtgatgaaaaagttaaaagtttgaagaaaaatgtcaggataagcaaggaagctgacgttaccaataggaggcgcgataaggactctgacgaaggcggaggagcagaagacggaggagcagaaggcgtctttgaaagagagaagcgccagagtattactaatcctagatatgttgggccggaatgggccgtgtaatagggtagagtgggctgagaccttgtggcacagctggagagagagagagagagattaaaaactactgtgtactgtctgaaacggcatcgatctggaactcggcggtcaaggcagcggcggcggctccgatcctgttggatcgtgagagaaatacaaagttccagctacctatcgtgttcttgagttcgtggtgaaatcgagtgctagggttctaacaatctggtatcagagccatctccaaccatatcctcttgactcggccgtagaatcacgaagcgcggattggaatctgctctcgagcagaatccgcaaaaagggaactcgcttcccttgctgcgtttgggttggctgagttcggagcggttgcgagtctttgatcctggagaaaccacggtacgttacgaagtaggctgcgcaaatcatggcgtaggaagggatgttggatttgctgcttaaaaccctggaggatattgagaagatgcggactgaggcggaagaaagaaacagagcagatctgaatgagttcatggcggcggtggaagcgaggttgcctcaagtagagaaacgagttggggatttgcattcgtcgctgggggatttgagtgctaaggtggaacaactggagagcgccatgcttcgtcaggccaaggcggagaaggcggtgggagacatcaaggaggaaccaacagctgcatcgccatcaccaactccatcgtttatccatggtatgagagatcctatgttgaattctatttcgccttttgtggtagaatcagcaggagtaccagaagggggtagtggaagtactggaattattgttggaagtgttccacccatgacatgtcctcagttcaatggggataatccacagatgtggaaggctaattgtgaagtgtatttcaatgtttacggcattcctcctgggcagtgggttaaggtggctacgctgaattttgttggcaacgcagcattttggttgcaatctgtgcgaaaccagttgattggcattacttggtttgatttatgtgaaagagtctgtgctcgatttactcgagataggcatgaagctatggtgagacaatatatacacatcaggcaaaccaattcagtttcagaatatgtagagcgattcgactgtctaatgcatcggctgttggcatatgaccagactgtgcctgcattgtactttgtcacaaaatttgttgatggccttaaggatgaggtgaggagatctgttatgatgatgaggccccaagatatggatgtggcctgttctctggctttgttacaggaagaagctatggaaggaagtagacccacaccttataagaggactgaaggcagcaattatgtcaagacatccagcaagctcacagccccaactctgtctatgacaagagaaccaaaccaaatcaacactgaagaaaggagaactgctgattctaacagaccaaaggaagataggctggcagcattaaaggcgtataggaggtcgaaaggcttatgtttcacttgtggggagagatgggggagagaccataagtgtgcaactgcagtacaattgcatgttgttcaagagttgttggaagttttacagggggattcaggggaggactcacctactgaaagttcaccagaaagggaagatatcattgttatggccatatctcagcaagcgttaaatggaactgagtcacgcaactccatcagacttagggggtggatacaagggactgaactattgatgttaattgattcgggaagctcccactcttttattgatgagaaaattgggaaatctatgtctggggtaaaattgttgactaaacccttgaaagtccaaattgctgatggaggagagttagtgtgctctcaggtaattcctaactgtagttggtggacacaggggcacaactttagtaatgatttcaagcttatcccactgggaggttatgacataattcttggaatggattggttagagcagtatagccccatgaaaatttattgggttaacaaatgggtggagtttcagtaccaaaatcagtggctcagagtattgggaatcagcagtagcactactagctatgcagaaatatctgtggaacaattgatgagtttggccaagatgggctctattatgtacatggtgaaaatcactgaccaccaaaacacagaagagcagtcctatccagatagcattaagcagattctcttggaatatcatgatgtctttgatgaaccatctgaactaccaccagaaaggtactgtgatcatcagattcccttgatagaaggtgccaaaccagtaagtcttaggccctacaagtataaccccgaactcaaagatgaaattgaacgtcaggtgaaggagatgttagactcaggggtaattcaaccaagtcagagtgcttggtcttcccctgctcttttggtgaggaagaaggatggtacctggcgcctttgtgtagattacagacacctgaatgccttaactgtcaagagcaagtacccagtgcctataatagaagaacttcttgatgaattgtcagggtccaaatggttcactaaactggaccttcgagcaggatatcatcaaattaggatgaaacctggagaggaacataagactgcattccagacacacttaggtcattatgaatacaaggtcatgtcctttggattaattggggcacctgctagttttcaaggggccatgaatgacacattgtcttcagtgctcaggaagtgtgctttggtattttttgacgacatcctgatatacagtcctgaccttcagtcacactgccagcacttaacacaagttttacaactccttagaagagatcactggcaagtcaaaatcagtaagtgtagttttgctcagcaacaagtatcatatttgggacatgtaattggggttcatggtgtgtctacagaacctagaaaaattttggatgttcagaattgggcagtacccactactgtcaagaagctcaggggatttctggggctggctggttattaccggaagtttgttaaggattttggtttgatctgtaaacctcttactcagttgttaaggaagggagtccctttcaaatggactgctgcaacagaagttgcatttcagcagatcaagcaagctctcattactgctcctgtcttagcattaccaactttaattttcctttcattgtggagacggatgctagtgatggaggcataggggcagtgttatctcaagaaggtcatccaattgcttacttgagtaaagctctaggaccaagatctaaagggttgtcaacttatgagaaggagtgcatggcaatactcttggcagtagaacactggagatcttatctacagcaccaagaattcatgattctcactgatcaccacagtttgactcatctgtctgatcaacggcttcatacaccttggcagcaaaaggcatttactaagctcctggggctccagtacagaattgtctatagaaagggcagtgctaattcagctgctgatgccctgtctagaaaagaccttggtgacagtgctcagattctggctgtatcttcttgttctccctcttggctccaagaggtaatacagggctatgagcaggacaagttctcttcccagctcttagctgaattgtctttgaatccgaaggctagggagcattatactctgcagcaaggcctcattaggtacaagggtcgaatatgggtgggtaataacacagatctgcagctgaaattgatcaaggaattacatgataatcctgctgggggccactctggttttcctgtcacttataggaggattaaacatctgtttgcttggttgggaatgaagcagcaaattcagcaacaactgaagcaatgtcagatctgtcaacaggccaaacctgagagggttaaatacccaggtctattgcaacctcttcctgttccaaagggtgcttggcaagtgatcagcatggatttcatagaaggattacccacttctgacaagtataactgcattctagtggtggtagacaaattctctaaatatgcccatttcttaccattgacccatccatttactgcattctctgtggccactgtctttatgaagaatgtttacaagctccatggtatgcctcaagtcattatctctgacagagatagggtattcacaagtcaactctgggaacatttattcaccaagtctggtactaagcttcacatgagctcttcttaccaccctcaaacagacggtcaaactgagcgggtgaatcggtgcttggaaatttttctgaggtgctttatacatgtaactccaactaagtgggccaattggttatatctcgctgagttttggtacaacacttcctatcactcttctgtgcataaaacaccttttgaggtcatttataggtaccagccgactcactttggcatctctatgcatgactgtgaaataccagatttggatttgtggttgaaggatagggatctcatcaatcagctaattcaacaacatttacatcaagctgagcaacaaatgaaagcttatgccgacaagaatcgtactttcagggagttccaggagggagactgggtttacttgaaactccaaccatatgtgcagtcttcagtagcacgcagagcaaaccataaactatctttcaagtactttggaccttttcaagtgttgcagcgggtgggattagttgcttataaactggctttacctccctcttgccacattcacctagttatccatgtctctcagctcaaggttgctcgtggctataatcctcatgttctgtctaccgaaccatttcagtggaaccattggcagagtccgcagcagttcctagacaggcgcattactaagaaaggcactggcttgggggcaagccggtttccaaggaagggagaatgtcaggataagcaaggaagctgacgttaccaagaggaggcgcgacaaggactctgacgaagtacaggatgaaggcggaggagcagaaggcgtctttgaaagagagaagcaccagcgtattactaatcctagatatgttgggccggaaggggccatgtaataggctagagtgggctgagaccttgtggtatggctgaagagagagagagagagagagagagagagagagagagagagagagagagagagagagagagattaaaaactactgtgtactgtctgaaacggcatcgatctggaactcggcggtgaaggcagcggcggctccgatcctgttggatcgtgagagaaatacaaagttccagctacctatcgtgttcttgagttcgtggtgaaatcgagtgctagggttctaacaaaaaagtttggaactaaagccactatttggttgattcgaggccgccattatccaagtcggtcacataataacaagagcaccctgagtcattgatgtctatatatatcagcatcagagtcatttaccgttgaatatctcccaaaatgtgatatcattcatcagatactgcgatatcgtcactcaattgcttagtggtacattcgaagcgagctaactcaactactctcttcctcctaaatatatgacgctgttgactcttggtataaagtttggacatttatcttatccataaaaaaatgtataaatatgttgtgatttgttttatcatccaagaaactacagtctaaaccttttttttacatatttatactagatttttaataagacgaatagtcaagtgttatgcaaaaagtcaacggtgtcatacatattgaaatgaaaattctacttaaccgaactatcactgcataattaagaaagccaggttgcagtgtaatgcagtccaacaacaagcctgaaatcattctgctctctagtctgtaatgcagtcgaagaacaagccgtgaacattcagctaggagaagtggaaaacctgacagataatcagtcttactgaacagggaagctgctgattctgataatatctgaacaacctttgcgcgaaatcggcgctgcctcgtcgcagctaccggcgactccccgcgctccataatccgtcgctcgtcgtcgccatcgccggcggcaacttttcttaggattgatggagagagacgggccagcgattggcccaaactcctcttgggattggcccctccgccactggtattatctgcaaaaaaaaaattcatgaatgacttatgtgcaaatcaataaatcatgccgaatattaggagaaaaaaagtttaatctgcatcagatccgtacaatccaatcacaagtactgctctttgttgaaattgaaattaaatccctagtaaacattgaaacccaagtttaaagcttcagaagaacacgacgtttaatttcaactaaggccttgtttagtttcaaactttttctttaaactttcaattctttcatcacatcaaaacttttctacacgtataaactttcaacttttccgccacgtcgttccaatttcaaccaaactttcaattttagcgtaaactaaacacaccttaaccacacctgctaatcgactggttccatgtcggaagagacagaattaatgcagaccatgcagcactgttttgtttaattccaggtcgctattttcgaagtcggtgagattacaacactgacgtctctttcagcatcagccctactgccataagtcaaccctatcagtacatactctccactgtagattcgagccagctaccattgaatttctccatacactgtcgttgcttactgtggtatcatcacgcaatttttcagtgcattcgaagcgagcagttaactgaactatcgctgcgtaattatgcagccaagtttgagcgttactgcagtaaaaaaaaaaacaaaaacaaggtttggagggagagttgtcccttgaaacattttttaagaagagattgtaaacctattgagaatcaaacatggaattataaattgaaatcacacacttcttatcaccgtattatcaaggacatcttataaccgcagtcgaagaacaagcctatctcgttctcccctgtaatgcatgctgtgcagatcaagaacaactgaacaagtcgtcaacttttagctaggaaaacgaaacacagattaagtcttattaaatctgattctgatttctcgttctcccctgtaaattaaatctgattctgatttctgaacagtctttgcatcaaatcggtgctggcttcgtcgcagctaccgcgtgtggtgggccagtgactgggccatttactgacgaaacggcccattctccttttggcccaaacgcctcttgacaggttcggaccccccgctcgcgcggcaaccggaaatcatgaacgacttgtgtgcaaatcataccgaaagattagggaaataatttaatttgcatcatggggtagtgtaattctcgttctcctcaaaaaattcgtaatcagaagtactgctcttaatttgtagaaattgagattagtcgctaatcacttgtcagcattgagattaaagcctttttctgaagaacacgatttctccctccacttaataaccacacctgctaatcgattggtttcatgtcgctattgtctaagtcggcgagataacaattctcccatctccatcaccgtcatctctagtctctaccacctatatcaacagtatctactctctctctctctctctctctctctctctctctctctggacaccgtaatcggcaccatgttcatgccaaatctagccaaaaatctcttgacagatacgtctgctgcttaattactccgataccatatcatcacgcaatttgtttgtttagtaccttgcaagcgagctttacttaactgaacatgaacatatataaactaaccccagctgaatgataatcaaataatttaatcgctcccaagttgcagttgttaacccatccatcgcacgagattaaacatagtaccgacatcagatgcagatgtttccacaagcatccacatcaaatatcatggtgccggagggtcctacatacgattggcacaaatcgagactgcaaaaatcataaaatttgtctcctgttgagggtcgccttctctgctgctgtcccaatttgcagcccagatccaatcagtttttagttttggtttccgagcaattagctcatgccatggaggtgtgaactctcgatggtgattagactaattgcagttctcaaagaagaaaaaaagattagactaaattaatttaattgctgctgcaatcagactactggcagctgcaccgacagggccatgtacgattaatcgagcggttagctaactgccccatggggggaagaacagggattaatcaatcgataatccgttttcttttttcggtctctgttaatcaatcatcagtctgtgtttgggattgcgaaataaagtattcaggggctcacatggcattcattgttcgatgtgtcatgtctcctctagctcctccaatctctgcaaaaaaaaatatagtatacttcaaacaaagcatccgtttttaaatcagctgaacaatcagtttcagtgctgcaaattaaaattcagaatgagcaacaatctcctactacagaattcagattgctcaagcgagaacgacatgtctgaatcctcgtttggtttatctgtcgcagctaaaatctaaattcttaaagttaattttaaagctgattttcctttcattattgtagtttaaacaacgctttttaaatcactaataacatacatatataaaagttttactcgtaagttatttttaagttggttcgtggctgttactgagattaacacggcctgtcaggctgtcagcatggtaatctaggtatgatagaagtaagttgagttcatcgatctgcagttggatatctgcgtcagttttgttgattggtgtggcgttgttagggccgcacaatgagagatttgaccgggacaaagggcagctaagatagatagggaggcaggcagagagtagacgtcgcacgctttgatcaaatcctggcttagaagcacctcaaaattgagacgtctcgtccgaataaaatggacgagaaccagatgccattttcctgtttcttgtggtcacctccatgcatgcatcaaatctttttgtttctttcatcccaaaaaaagagatctctcttcttcttctttttttataggaaactatattggtttgtagacaatggaagtttttattgatctcgattgtcaaaaatctacaattgtaactataacactgttgttttttttaagaaagcagtaattgatatggctgattaatttgagaattgtgtatgtgttttcattgttcttttagctataccaatgatatgggtatgttagttgcaattggcgtctaaaacaattctagctagctaagtagttcgaagaattaacacacaagcgataaattattgtgtgacgaaagactaagacgaagcatgtttaggtcaacgagtagtagcagcatgcagcatcctaatcgtagggtgacgaatcaagctgctatccgtgcacattcctgtggcgttgatcagtgagaggagcactgtcttgaggcattgaaccacgttttaatttgcaaatccaaattaggcgtgataatctgatggccctgttgatttagattgttgagctgattaatgttgcgggattacaacttaattttaagtatgaattaaatagttttaaaataaacataataaatagcttaaaacaaaccgtctaagttgaccagtaatacagtaaaagaaatgctttttgagaaatatatttttcgaagttagcaatgagcaaataatccctttaatatcccgtgaataagctgaaaagaacaaggccgatcgtctcatctaaaggctggattgattgctaacttgctactaatgattttccaaagcactgtaactgtgctttcatgtgtacttctcccatgggccatggttaggctgactaaacatagtggtaacattcgatttcaatatttatcttgggtcctagttaaatcctcaccaactctttcacatgtacacagtagtccaatgccccactaatgactgtgcacatgacagtttttacagtatcttgtagtagatcaacacaacaccaaacaattttactgacatcatcaaaaggaacagttttactgaaactgagaaagtactactactactaaccgcttactagtaattaacaaagtcttgaagattacactctctctgatagtctgatgagagaattaaatacagctatgaaagattgcaccttttgtcgataaaagcaaatggtgccttggcacgctgtcaagcaaagaaaattcagggagaggaaggcttcagattgaaatgttgctagccggcaagaagcagcatggggcctaataactgaagaaatggtgcattgattgattggagatcgaagaactctgaagcaagcagtgagctgctgcactgcagcagccgcttgagatcttcagagaagttcagagagttcattcaactggtggatcgtcagggtcaaaacccaaaagccgatcgaggcaggcaacaaatgatgacgcattttggatgagctgcagcagcagcagcacagctccagctttacactttactccatccttttggttgccaattgattatactcgtcgcctttgtgagagttgcagtcgtgaacatgctcatcgagatgcaagctcgcacgaacaggatgtagcatgtatagcagcaatggatgtaaaaaaaaaaaggctcatgatgcagaatgaactgcaatggagtgtactacacatgatgacacttttattaagtgtctattatgctttctgatgagctgatgaaatttggtagtatggccatggaactgcattgatggcactggaagaacagtggatggaacttcacatggaagcgaattgaagtagtggtgtttcatttttagttctttctcttttcacatcttattactgctgtcgatgtgtagtgcttccattctaggagcagtagagtttcggcaaaatggcagtaaaattctcatgagtggcagcgtgggattctgaaagagaccggtcattttgttgccggtacaaagtgaaaaatgtactggagtactagtgaaacaacaaaatggcgagtcgagcttgaaatgaacagaagtttctggcaagcaaaacaacaatgaacaaagcagcaacagcagtagtagcagcagtgcacatgaattgcaaacagtattatgtctgaagaaattcagatatctcctttttactactaccactactcccctgcatcatcaggaatttttgcacagctagcctttcgtccctgttgtgttgccaccaaaatgctttgatagatacagtagccccaaagccgtgctccctttaagacaagtttttatgcagcattgttcagggagagagaaagtgatgttgctaaggcctgtttagatccatcttaacaaattttacactatgtcacatcgaacgtttgaacacctgcatgaagattaaatatagactaaaaataactaattacacaaattacgactactttgcgagacgaattttttaagcctaattgctccatgattcgataatgttgtgctgcagtaaacatgtactaatgatggattaattaggcttaatatattcatctcgcggtttactgacggatactataattagttcttttatttagtgcccgaacattccccatgaaacactctatataataaccgacgtgacacactgaaactttacaccactggatttaaacactcagctcattaaaaaaaattacattaaaaaaaagagagagaaaaagagagaggaggaagaagaagaggaaggcaagtactgagcgagaaggccactttattgcctttttcatgttgcacgctatcatttcgagatcaagacgctgccctcaacgaataaaatactctcccctcccccacacacc

SEQ ID NO: 7410 - DNA, 65586 bp, Oryza sativa
  unsure (1)..(65586): unsure at all n locations
caattagctttggattgcatttctgattggcactgacagcaagataatacaaaatggaattgtatgctaatagaccgtgagcatagaggcaaaccatctgttccaagttctgacagctgaaataagagaacttacgcaaaagcagcgtatccagcaccaacatttgctgaagttagaagcgcggctgctgacaaattatcaagtccacttggagccacagggttcttaatatccccatcaacctagtaataaataacagaaaagcaacagtcagtcctgatgtacactgcagtatgtaaatatattggttcaggtttaaaaaccttatcccattttgacttcttgtttggcctagcctctttctgtacgccttctcccgatatcgaaaccaatggtgcaccagcagcagctgctgctgatacagcagctgtaaaagatgcaatgagcactgaaacatccaaaatacaaaattgacagattggtatcataatttcgtttgtatgtactatacctgcaattttcggtattgccgcactaattggagcttgtactcctccagtgataaagtcaacctttccactctttttcttctccagttcctttctctcaacttcacgcttcatatcagcttctgtagaaaataggaggctcgtcatgcctaggatatattcttgcgcaagtcttagaagaaatttctcaagaaagaactaaaacattcactattgactccacaggcataatatatgtataaataactaatctccaagttcagtttatgagtgaagaaccacttcgcgaggttgtcctagatcaacaattcccatctcaacataagagcgaccattcaccaaatcatttcagaattgtccaatcatctactagtttattttgtatgcacatgttgctaacacaacaaatcaagcacattgcaagaattccaccctccccccagaatagacgcaagctgcaggtttacaagcatatcataaagaagattggaagttactttgaggtttaaaaacacatcctacattctttttttttcccaagtgaagctgtattctaatgttcaattgtttgtcaaaattgcactatataatccacaagtacagcataatggataaacctcgactataacataccgatctcatcatagtaatcgcttctatcgtacccataaggatcaaaaacatctttactgaagcaggtccctatctggtcaatttcttggtaccgcacagcatgctgcaaaaagtctggattcctgtagtcctttctattgcgcacttcagaattgaagctctttccagcccttttgtacgcaaggaacttgttgatcttttgctgtatccaaagcattggaacataaataaatgtttaatgcaatagccaaataaatagattgtatggatgtgcattctaatttctaagcagtatgcatgtcatgtgaaaggccatgctgttgcagtgtgtttacaggacttgaaaagagaagcatatgtcaaactaaaaacaacagaagggcttcaaaatatcgaccttttgttcagaaataataattacaaatgagcaagagtcattagctagataaacaaatttacaagcatgtaataaatcaaaaggagaacaacgcatacagctatggcacagccagatctcaataataccatgaaaaatgcatgaaatggtttctggggtatggcttatgtgagcaggagaacaaatttattctagacaatggagtttattaaatccaaaggatagtaatatggtcccaagggagaacaatgttctgcataaaaatgtgataatttttttacatggaagtagaacatgtaggaaatattattttattaagaaggaaacctgtagtgctgcagaacattttgcagtcacaggaggaggaaggaaacgactcagaggatcatcattctgcatgttatcagcagcttcttccacctgaacatcttccatttctgctccagttacactcattgctgcagctgcccctacttgattctgttcaggtgcatcgttctgctgagacatttctgatcgtatatttggggtcagtatgtgaacaatacctgagagagtcttttcttcataattccctataggagagggataaaatataaattagattatatctagattgcaaatttagaggttataataattcagtttcatcgaaaaggtaaaacgagaccactaactcaccaaaatgttttctagaatggccagaaacataatatataatcaccaaaggaaataaatctgtcatgatattaagagtttcgtccatggatgaacaaaagaaatgcatgcattcttgttctgcacataacattttggtactgactactaacacacgactacaaatgcaaaagatcttgaggcatgttattgtggtatatctgtaaaacaaggttcattctttgtattttggaacctacatgtttctggctgaggtaattagcaaataatgcatagcctgattatgtgaaaacaaaatatctcaaacatttattattttcaagtgtttgtctatgttttcagctctccacctttcttggatatggttgtcaactacaagtaaacaaaccatttgagcacaaacatgttttctgatatgtgctctgtcattgatgacatatcctaaatagtgctaacgttgtgataaatctctactattataaaaattgaagatgtttttgccggtactttggtacatcatccgtgtatgagtcggttttcaagttcgttcgcttttggaaatacaaatccgtatttgagtcggtttttaagtttgttcgcttttggaaatacaaaaggaattgtataggaaatctctttaaaaaactcgcatgctacttgagatggtcggattcctaattgcagctcatgattttctaataaaatatatatatccaagcgaatttaacagtgaatttcatcttaaataaaccatataacaataataagattaaaatagccttcacccgttgcaacgcacgggcattttttctagttgatactaaattacataaccgtcaataccgagtatgcgactgatcataaatccttaaaatcacaatttctgcatactagctggacatctcgatttgcactagatattagcacggtatgctgaacatagcacaatacaacaaatacagcaggctaagagcttaccctcagcaacctgagcatccaaacccgatctgtctatgccattgatctccccatcctgcaaccagaccataacaacatcaattcaggaaagttggaaactccaagcagcatcactaaacatatacgttgctagctctacctcctgctccggcgacatggccgtttcgtcatgagcgtagtccacgatagcaagcgggccacgccgaggggggcgcggcaggtcggccggcggcatggccgcggcggggcggagcggggagggggacgaaatcgcgaagggcgaggacgagcggcgcgaaggcagcggcgggagccccggcgaggggtaggggctggctagggttctgcggccggccggatcctcggcgaggggaggggatgggggcgccgaagaagcggcagcgttggggttagggtttgagccctcgccttcggtctgaggtgacggcgacgaggaggttgcggcggcgggcggcgaagggggtctgggctcgtcgccgtcatcctcttcctcgtcgtcgttgtacatggagaagagagcggctactgccttggtgtcggacgccatggcgaggcgtagagggggtgggggtcgaggcgagaggttagatttggcgatttggggagaccggagaagacgagtccgaccgtgaaggattcgcgaatgaaacagccgccgtatgggttctcttacaggagcttcaagttggtgatttgtgggttcgaacagaacgggccggttgatgacgatggatgggccttgaatcttcatggcgtcatggccttgaatctttatcttcatcttcatattcaggaaattcattgatggtacgattcaatggaacgaaccaaaacttgataaattttagaggaattttggaggacttgattcctatgagatacatttctatatagttatttgggataaaggaatgatcttctagggtttctttgaaatttctatagaatgaaccattttataggaattttggagaaaaaagtagcatgaggtttcttcccatgatataaagttcctgtccatacttttttaggttgtgttcggtagcctgtgttcccaacccatctctctcgtttttcgcgcgatgcttttcaaacttctaaatgacatgttttttttcaataaagaattatataggaaagttgcttaaaaatcatattaatctatttttcaggttagtcttagctaatactacctccgttccaaaatacttgtcgctttgaatttttgtttgtaacttttgatcatctgtcttattcaaaaaattatagaattattatttattttgtttgtgacttgctttattatcaaaagcattttgagtattacttatctatttttatatttgcaccaattttttcaaataagacaaatggttaaacgttacaaacaattcattatacgatagtacttaattaattatacgataacaagtcatttcgttttccgtgctagagagataggctccctaccagcacaaacgaacgcagattatggtatcttcacaatcctacgttccaaagcagccttaaagttttcattcagtttcatgagtagccaaataagcctccttgtttggaatttggttccaaatctatataacttggaggtaaaatgaggaccatgttattcaattaaatctaagatatctcgttaaacaccaatatgttgagaggttttatttgcacagatcttacttatgcattgtatgaacgctctatatatacatgtatattagtttggttgcgttcgaatcttctatagatgaagactaaaagtgggtacgcaaaacgaaaaatccattagcgtgtgattaattaagttttaattattaaaaacttaaaaaatggatttatatgatattttaaagcaaattctatataaaaaattttcgcataaaatataccgtttagcagtttgaaaagcgtgctaacggaaaatgaggaaaaatccgtatctttatggagttagaacagggccatggtgctatgtataattaaccatgcaaaaaaataacgactttgtaaatagcaagctgacaatcatcaacacaatggttatggcatcttccttcaaaatttagacattttaggctgtcctttgattacaattaattaaacttgagttgaaaaaccaatgtggtatgattgaaatgcatgatcttcacaggtaattgatatttaaattgtgtaataagagtttacaagtcattcctaacaaaggaatggttcacatatctaactactgaatataaacaaaaaaaaatacaaattcaatgcttatgaccagaaaatacaactttacatgttttcttttacaattggcatagctctagtacataattgttaatacgaatcattttgaaatgtggacccaacacaatttgtgtaggcatttatcttttgccacgcgcgacttaacagttttacagctcagatagagaacgttgtagcttcttccaagatgataactcgtgtaaggaaaaatagaagtagattgctaaatagcacagttgttaggatgaaaagtgaggcgagtagatggggagcttaatgcaaattaaaacaatgcggtaaaacacatgattaaaggaataacactggcgttgctatgagcccacgagtaaaatgagtgtctattgctatggcagcatgttctctcgacttaagtgctatacttcttgatataaataactcataaaataaagtcataaccttgcaaaaagtaacagtttgacatcttcacaaacaagggattaagagagtcgaatccacgagagtggagcataacaaccctagtatataggagatatcaattgcattactcaatactcatgcctctgattttactaaaaatatatttttttaagaaaaaaaacacattagaggatgtgaggttccatattaatagagcagaaaaggttacaagattacaactctaaaaacctataatcacggaaaaaaaacacaccaacagtcctgatgattcctacccaccaacttgaggaaaaaaactaacaccgagctgggacctcgcatcaaatagtgtaaaatgtatgtgatttttttacatgccttttgacttttcttttctaaaagggtacatcaaatataattataccaatataataggagaagctttgctacataaaattaacttggtgcactcccatagcattatcagagcaatgtgaaaaatgaacacgctataactcaacatcgatcaatttaatctaaaaattatcgagttacctgaaaaaatcaaaagaaattgttcttcctttgcgtacaagttacgaagcgagcttcgtttgataatttctttttaggttaaacagagtaaatttcataatacgacatatatcactactacaaaaatcgtttttctatacgagggggtcggtaggttccatgcgggccgcttgtggcggcgcctgcaaaaaccgcccccccccggggtgggtcgatgagccgcatgcgaagatccattatcgcatgcggctgcttaacacagccacatgcgataataggtttattttcgcatgcggctggcttaagggaccgcatgcgatgatcggccatatatgctcctccaggcccgagcttgaccatttgaaaacgaagctctctctctctcctaaagcaagcaccaattagggggggaggttttcaactcgaaatttttgcttgaactctatacgaaaggtgaagaactctctctcctccttcatttggctccatttttgttatatttcgttggtggaaagtggagttttttttaatattttgacaaggtttgttctaactagtttttgcaaaatctagcttcaaaatatatgttttgatgggtaaattttgcatgtaatcacttgtacatactagttcatgtattgttgtaatttttttgggagacaaatgcatttaaacttttgtatgaaatacctgcggtctatttttttatctgtaacttttttgcctttatataattagatggatcggtcgtcatggatgtatgagatgcggagaacgtagcctttattaaggaagcacctaaatttattgatcaggctaaggcgcatgctttgagggagaatatgacaaagatcttttgtccgtgccgtcattgcaagaatcagaaattgttggtagatcctggtgaaatattgggtcacataatggagtacggattcaccgccaactacatggtttggacctatcacggggaattcgccaatccggaagatgacgatgaagagttaagtttcgagatgaatgaggcagagaattttataatcgaagacatgtcccgtgaaagaatggatgtcgatgtttccaccgatagtgatgatttcgatggtggttttgatttagaggatatgctacgccatgttgaaccagaggtgctagcgggcaggtcacgaggattggagaattggcaggcattagagaaggcatcgaaggatcttctttacgatgaaacgaagggatgtgataaggatttcacagtcttgcgttcagtgcttgaacttctgagattgaaggctaaacatggatggtcagacacaagttttaatgatctgatgagtttgttgcgtgtgttgcttcctaagcctaactttgtaccatcaaacacgtatcaagcgaagaaactcatatgtcctttatctcttggtgtagaaaagattcatgcttgtaagaatcactgcatattataccgtaaagaatatgcggacttggaatgttgcccaacgtgtggcacaagtcggtataaaacggggaatgggcccgtagattcagagtgtaccgatccagattctgataagggtaagcgcggaaagattccctcaatggtgatgtggtacctaccaattaaggaccgcctgaagagtctgtactcaaacccgactgatgctgagttgatgagatggcatcaagagagccggaagatagatggtatgattcgacatcccgccgatgctcgcaagtggaagacatttgatgtaaaacacccagaatttgcaaaggatcccaggaatataaggtttgcgttgagcactgatggaatgaacccgtttggtgacttaagcagctcgcacagcacatggccagtccttctcacaatgtataatcttccaacatggatatgtcagaaacgaaagtacattcttctcactatcctcatacaaggtccaaaccaacctggaatcgacatagatgttttccttgagcctttgatggaggacatggaggagctttggaaagaggggttacgactatgggatgagtttaagcgggagcacttcaatctacgtgcgatcatattcgttaccatcaatgacctacctgcaaacttttcattatctgggcagattaaagggaagactggatgtctgatatgtctggagaaaacttcgtacaaatactggacatcgtctttgaagacagtgtacatgcgacatcgacggttcctaccacaaagacataggtaccgtaagatggctagattgttcgataatacagtggagaatgacactgccccagcagcaagaggtggtacatacgtgtatgagataacaaagaagattaaggttgtatatggaaagggaaagaagaagacagtaaagaggaagaaagctgatggtgacaacggtactgcgtcgcctttcaagaagcactcaattttcttcaaatagttagattactggaaggacctagagattcgacatgcaattgatgttatgcacctcgagaagaacgtgtttgatagcaccattggcacattgctggacatcccgagtaaaacgaaggatggattgaagtcacgtaacgaccttatagatttggccatacggcatgaccttcacccagtagtgctgccaaatgggaagaccgagattcctcctgcttgttactcgttgacacttgaagagaaaaaagccttttgtaaatgtttacaaggggttagtgcctactggtttcgcatcgaacatcaggaagctagtatcaatgaaggatttgaccatttcgggatacaatgtgcatgactgtcataggttgctaacagtattcctaccaattgctataagggcagtcaaaccagtccatacaaaggtggttataacaaagttgtgctactttttcaatcgaatttcgcaaaaggtatttgatcctctggaattaggtccgcttcagacatttgccgtcgagactgtatgccagcttgagatgtatttcccaccatcatttttagatatgatggagcatttgatcgttcacatcgtccctcagattattgaacttggtcccttatacttacatcagatgtgggcctatgagcgttacatgtcgatcctcaaaggctatgtacgcaatcgcgctcacccggaaggatcaatgttagagggatacacaactgaagaggcagtcgagtgttgtatagactacataaaggatgctaatgccattggcattcctgttcatcgacatgaagagagattatctggaaggggtactgttggtaggaagcagttcttcgataatgattacaaaaaggtgtccgcggcacacaacagcgttcttcaacaactcgctatcgttgagccattcattgagcgacacctagaagaaatcaaagcctgcttcccagggcggtccaatgattgggcatcaagagagcacaagcgtcgctttcctctgtggttcaaagatctaaacctgccagttggtgattctgtggaggaacttactttacaaagactggcatgtgggccttcaagtattgtcaattcatggctaggttacgacatcaatggatttaccttgagtacgactacgaaggacatgaaaagcaccgcacaaaacagtgggatccgtgtcaaagctattgacacgagtggagaaaagaggtcgtattatgggaccattcaagaaatatgggaactggactatggcctgaacatctagatccctgtgctccgttgtgaatgggttaaagacacaacaggagtttccgttgatgactacgggctaacgatagtcgatgacagtaaaacatgccacaaggatgatccatgggttttagcagagcgtgtggctcaagtgttttatgtgaaggacccttcagatgaaagaaaaactattgtcatatccagaaagcaacagatcgtcggcatcgacaacatcgaagaccccaatgattacaaccagttcgacgatgtaccattgtttactgatcttcctgtgcgaattaagaaggttgagagaacaatcgatgaagcgaatatgtcgtacgttcgagcagatggtgttgccaaggttattaagtcatagttattttgtaacctttagttctcattgtgttccaaatgtacgtgcatgaatttaagtcccccttatgttgtaatcattagcatgtaacatttggttacgagttttgagcaattttcatgagttttcttagtgccaaaaaaatttggaatgtttaattgtggcgaaatattgggaatatatatatatgtacagttatttagaggaaagaaaaaatatgagtttttttggtaaaaagatatttccatgcgggtgacttaagccagccggatggaaatatctttttcgcatgcagccggctttacggcccgcacagaaatatctttttcgcatgcggctggcttaacggcccgcatggaaagataattttcgcatgcggccggcttaagtcgcctgcatggaaagatcatttttccatgcgggctcttaagctgcccgcatgcgatgatctgcgcctatatatagggagcgcggggagccaaaattttctaagtcccggcgcccgcgaaaccctagccgccaggctgccaaaattttctaagtcgccgtcgccgtcaccgccgccaagtcgtccccgccaccgccggctcctccccgaagtcgcccctctcgccatcgccgtcgccgccgctaggacctctctaccccctcgccgtcgccgtcgccgccgccaagtcgtccccgccaccgccggctcctcccgaagtcgccccgtccctcgccaccgccgtcgctgccgccaggacctctacccccttgccgtcgccgtcgccgccgcacggacctctcccccctcgccaccgccaagtcgttgccgccggccgccaagtcgtccccgccaccgccatctcctccccgaagtcgcccccctcgtcgtcgtcgtcaccgcagccagcacctctcccccctcgcgcgtcgtcgctgccaagtccttcccgccaccgccggcaatacctcctccggtccaaggtcccccggtaacatttacttttaaaaaaaaagaaatgtgaaatgtgcaattgtggattgtttaattgtggatcgtggattgtgatatgtgcaattgtggattgtttaactttgagaatgtttaattgtggattgttaaattgggacttatgttaaatggagatttatgtttaaattgggacttatgttaaattgggacctatattaaattgtgacttatgtttaaattgagacttatgttaaattgggatttatgtataattgggacttatgttaaattgggacctatgttaaatggagatttatgtttaattgggagtgatgttaaattgggacctatgttaaattgtgacttatgtttaaattgtgacttatgttaaattgagaattatgttaagttcggacttatgtgaaatttagttaaattgggacttatgtgaaattaagttaaattgggacctatgttaaattgagatttatgtataattgggacttatgttaaattgagatttatgtataattgggacttgtgttaaattgggacttatgtcaaattgagacttatgtgaaattaagttaaattgggacttacgtaaaattgggacttatgtcaaatttttttatgtcaagttggaagatgttgagcgataaggttccatcgaacgcaccaatagcgcctcaagaaggtaacgctcctcaaaaatccggtagcaacaagcagccagacgcttctagtgaagaaatgtggcgcacaccaagtgacccgtttccaatggaaataacacaagtcgcccctcgcgatgatgatctggactacatacctatggaacaggctgtaagtgctgaaaatcgttagccatgtattatttcctaactacgatgtgacatgaacctaatggtgtatagagttacctattctgtgcagatgttagtccgacgccactcgaaacgtaaagccgggaggaacaggagagaggaagaagtttagatggacaccgttacatctgcacctgaacgtacggagacatctacaagtgcaggcgggagtgggaaaaaaagacgtggtgagagaagcaagaataaattaccaaggaaacttacaacgtgattgctctcgatcaggatgggaagcccgtcgagccaccgatagtgcggtccaagtttagcaacgcatgtggcactctagtcaggacgcgttgtcccattaatgtcaagttgtgggaaacggtggacgacaacatcaagacatttctctggaatgagttgcagaagtattttgtgttccctcctggatcagaggtcagggggagagattacgcacttaaaaagatgggagatcgatggcgacagtggaagtccgatcaaaatcgggattatgttcagaagaatctcccaccgtttacggattatggacaaatatcgcaggctgactgggatacgtttgttgcggatcatacaacagctgaagcattggctttgaggaaaaaaatgtccgagctcgcgaaaaagaacagatatccccatagattggggtcgagcggatacgctggtcacgtcgatcaatggcgggagatcgagcaaagatttgccgctgccggcaaacccctgctggtagaccccaaggttgaacgtagcaagaactgggtttgggcgcgcagcacaggtcaagtctcggataagggagacatactattcgaggctccagacatagaagaagtgactactaatttgcagcagatagtcgagaaagaaagatcagtacagttcgccccacggagggagcgagaccagcttactgcggcgttggggacggctgaacactctggacgtgtaaggggtttgtcctcaaagacgagttggaaggtagggtttccacaagacgcaccaagttataagaagagagacaaatacaaagaacaactatcagacaaaatctatgcgcaagtgaaggaacacttctactcgttggcagctgaaaacccgacagcctttccaaggttattccctaatggccagcaacccacacaatccgcacagcaaacaactaatgtacccaacagtgtaggctcagtgcagacaactcccttccctgtggatagtataactggaccaactccgtgcagtctcgtcgtaccaatcggccgcgctggaaagactaaggaggttgcaatgggtttagcgatacccggacgtcaattccacaacacggcaatccctgaggattacgcaagggtacaggtcgccaaggtccatagcgatcacgtttccttggaactagacatacctgcacctgaggggattgaacttcttggtgatgcagtgaatcagtttatcttgtggcaccgcagagacataatcctgaccgcggccgttccagcagcagaatcttcaactccatcctcatcacaggcaaggacagctgccgctcctgcaccaccgtcgcctcctgaaccaccgtcacctcgacatccgtcgtcaccaccaccgcttaggtcaccgcctcgccaacctacaccaccaccctccccttctcaacagccgcctctcccggccccgcaaccagttcaagcctctcccacctccccagctaaacagcatgctcccccggctccacccttagttcaaacctctccacctacaccccaatctgctctggtagaacaagtgcacataccggaaggtactacatccgaaccgaagtctaatcctttggaacctcgtcgtataattccaaagttgatatcgacatatgacccaaaggagattgacaaggataaggagaagttcatgtttcagctttcaggaattctgagaagagaaaagaacttgctcacgtcatgtcagactcccagaagtcagtactagcagcccaagatgaattgcaatcatggttatctgccgatgtgcctgaaacttatgagtatggcaagccattcttgccaacatatcttatgaacaatctaccctgggaaatgagggcaatgcacgaatggtatatcaaggcatataggaagggtctcggtttcataagcatcgccgtcccggaaggtgctttcatgagttgagtggtcctaatgggatattttttttatctctttccgagacctttacgccctctacaagctagataaaatggacgttaatctcgttgcggcattctgtctgtaagtctgaactctttattacatgttacacgtatcattccaaacaaagaaaccaaatctcattacttctttattcattatacagtatgcaattccacgaagctgatagaactggagcaaaggttggatacgtcgatccaacaagaatatgcaaaacacgacacaccgtagagctgagagaggactgcgagcaattggttggcaagacccctgaagaaaaggaagaatatgtgaagacattgcacaagaggaagaagctagaagtagcaacatacttggcaatagcaatgttggcgcacgccgacaaagatgtcttaatggtcccgtaccagttcacgtaagctttctcttctttttgtttaattaatttatcttcttcggaattttctgtctccaataagcctatcttatatgcagagaccactacatattattccttgtatatccgaaagaccaattgatcatatcattggaccccgcacactatgacaaggagacatttatggaattcctcactattttgaatttgtaagtgataaacatttcattactataaattgtttaggtcgatcaccagtcttctaactactaataaaacaattgtttccttcaaacagagcacacaagtactaccgcaaaagaggtggaccagtacatattccatcccagaagcagctatccgtcaggactggctggccggtactatcaaatctataccaatacaactaattatcgaacagtacatatatactaaatatatttactgagatcggtccccataattatatcgcagtgctacaaacaaccaccaggaaccaacttgtgcggttattacgtgtgcgagatgctcagagtaaatgggaggtacaaaacaaccagtaaccgagtaagtcatcgaactcttctctacaaagaaacccatctcgcacacacttctcactgagtaccattttattttcctttctatgcacagatccccgaaatcccatatattgcataacgattcaatgacactactatcttgaacgtggccgctgacctctgccgattcatccgtcgcgatgtctgcaacgcaagaggtctcttctacgacaaccagagtgaattcgcaatggacgacaaatttaaacctctcagagagtgggagaaagaacatatgcaatgacatgtacactacttatacatatgatgaaaaaactgtggcacttgtattatatatttcgtatgtaaattacgattgaattaatggttatgtattatatgtttgttactgcggcacttgtcttatctcatatgcttactattccgaaatacgataataaatccctcaataatttaatattaattatgagacacatctcaccaaaaggctagaataaatattatttgagctattcggaaattgaatttcgcatgcggtctacttaagacgcccgcatgcgaaaatagattttggnatggggttttgttaggtcgaccgcatgggaaaatatatcttcgcatgcggcttcttagatggaccgcatgcgaagatctattttcgcatgcggccgtcttaagtgaccgcatgtgaagatcgatcttcgcatgcggctgggacggccgcatgcacaaatggtgatctttgcataccatttcgcgcatgtgggccggccaaccgcatgtgaagatcgatttcgcccgtatgcaaaaacgctttctgtagtagtgtattttgatcaaaatatcgcaaaattgcatatttttaaaacatcgtatcataagactacacatatagtgaagattttagagtttatattcatagcactattgaggtaacaaaagttgtagatttgtgatatgttaaatctatagttttgtcctatgattcattaaatttgtagttttgtaaaaaagcatggtgtttaatatatagttttgtgatacacgtttttaaatatgcagtttcgttatacacgtttttaaatatgtagttttatgatagattgatcaaactacctgtaattactcacaacttgtacaccacgatccacggattaccctcttgaaactattgctcttactagtacaaagcaagtcaccatatgactattacatgtcattgcctctgttggaggctaaccttgggcttcgttcttttgttgtctagcatacggtttaggaacaataacaggagacacacacacatataagtggcgtagctagaatttaaagtaaaagtgatccatctatatataatatgtcaattaaaagggtggtccactatacaatttttactatattaactaggacatatactataatttcaaatttttaggtggtcagtggaccacggtgccacctagctggctacgcccctgacacatacatatatagttttgttttccttacaaaatggacagactcccttttaaaaaaaaacctatgtgttttatgtggtcaaatcttatagagtaaatttcacaaaaactacaactatttagttaaattatcaaaaaaaactatatttttaacatgatgtatcacaaaactacagattcaacactaaatttatcatagaactatagacttaggctgcgttcgttcattggagataggggagattgtcactcgtttttcacgcgcacgcttttcaaactactaaacggtgcgttttttgtaaaaattttctatagaaaagttgctttaaaaaatcatattaatccatttttaaatttgaaaatagttaatactcaattaatcatgagctaatgactcacctcgttttgcgtatcttcccaatcttcccaattctctctccctcaaacacacccttaaggtggaatgtcgcaaaactacggattcagtaacaaaaatatcacaaaaccacatatttattattaatttaatcacaaaacatggacatatataactcaaatatagcatgaatgctaaaggtttaaaccccaaaatctgaaattttgtgataatctatctatctattatatactaaaagtccattaaactttctacaaatcgctcctaaaccgccacatggcaactctacaaacgctcttaggctgccaagtagcatttaaaacatctaatcattgattttcatttaatctggtggacccatatttttaaccgttagatctaaaaataccaaatatatttaattcatctttagaattcagaaagccacacatccacgtcgatcactcgcgtacgtgtacgttcatgtacgtacatacttcgttagtgtacgtccttccccttccttcctttctttttattttttctttttctttttactcaaatgagataaaaactaaataaataattttagccaaattaattaaatagggagtagctaatcttataagcactttacaacattattatcttaaatttattacttaggtattaaaaacttaatatgtagtatacaatatactttgtcaatcctagcctaaaatatcaattattgtatatcctcaatgatccccatatatataagttttatacataagtcactatttactaatcaccaagtcatattacttacgaggtattcgtgcacaacgcacctaacagctggatagctgatatctaatgagcatgtatgtcatcaaacaccgatgataaagggcaattataagtgtgcaacgatcaacaaattataggtaagtagaggatgcaactaatccaccgcaaacaatagttgactactggtagattgtgactatgagtaatagcatttctatactcatgcaaacgcttctaagatgtcatgtgatgctctaattagaaataatctaagaaaaactgtaaaataaaataaaagtattattcatcgatttacacacaaaatcggcgatccattatttttcaaccattaaattagatctatgataataatccctctgtctaaaaaccatctaatcactccttacgtacatacacaactcctatgtacatacctatgcaagatatataaaaaggaagaaaaaagaagagtgtgtatatgatttgtcccatatggttgttttctctttctttctagatataaggtttcttttctaaattgagcatatacgtagtgatcactccttgccacaccgctgtctcatgccacccgttgctccaccctcttcctgtcaaatttttaaggaaaaaaaagaagagtgtgtatatgatttgtcccatgtggttttttttatctttctttctagatctaaggtttcttttctaaattgagcatatacgtagtgatcactccttgccacgccattgtctcatgccacccgttgctccaccctcttcctgtcaaatttttaaaaatactttttttactaacaatttaaagggcaatcacatgagctcatataaatgtgtgcatacgcacattatgaatacaaatacgcacaccctattcctataataaacaaatatttgtccgaaaagaaaaaaaggaaaaaaacaaacgttcatacgtgagactactattcgctagaaaaaacatacatgtaacaacattgtatctcttttttatgtcgtccccagcaaaatagtattaacatttagcacaaataattttaataaatttatccaatattaatccccacaaacatgaaatggtgaattagatgtataatacaagaaaaaaaattaaaacctatattaacttgtatgttagcaaaggatcacagtttgagcaaatttttttacgtggtccacaccaccaaagctattagatttttcgaattagagtccaatgagcaaccctgctaatttttaaaagagaaaattatatatataccactaaaatttagtagtatcgattaacaccataaataaattatgtatactctatataataaatcaactcaagacataaaaaaactattttcgtcacctccattttctctcactcataccctgaagggtgccaagcatgaatctcaactggctacattatagtaactatggcaagagtatgcattattgagctgaagtcgttttacccaaactgatataccttattttaaactgttagatctatatattaaaaaaaacctaccgattgatcaggccgtcagagtgcgtatgtacaacacatgtatccagttccctcctcacggatgaaacgaacctactggctctcgtctctttgtttccttaccacaattaagttaaccactgaataaaagaagatcctaaaaattaccccgaaaaaatatccaccttatttttttaataaaactggtagactaattacttcataccattagacatctaacgactttctaccaacttaattatatttctcaacttgtataccaggtctatttacctatacaaatatgtaaagctaaatcaatctacaaaggtacaaataaatctgtctatgaatggagctcttttttattactatatatctccgtcttataatggatcctaaaattttatacccactctgttccaaaatataacaatttttagcacttacgatttgtcccaaatataacaacattaccaccaacattcccttcccaactaatcataactctaaaacttcttatattctgggacggagggagtagaaatcaaggaggaatgaaaaaaaaatactaagatacccatcattaaataaggctcattaaataaggagatggttagtgtaatgttggataaaaattaaatgaagaatggctagatggaacgagtagtattaataattccttatattttaggatataaaatttaaatccttcgatttatggatggaggtagtagaagtaaatagaagtacgtgagtatttgtttaattagataaaaatgtcatattatcatatttttaatagaaaatttcttatattaatatatcgtcaaatctacgaagacatatttagtatacaagaaaaaaaataaagtttaaattaagatgctaaatatttttaaaaataaaagcatgtagtataaaaatgatatttttatatgaaccagctccattattgtgatatatttttctcataaatttaagacgacgtgatgcaagtaattttagtttacaatttgtaacaacccgtcctttagaacaaggcagcccagcctccatccaactggcacgcttacttataaatatcacctcacttacacttttattctcgcttcgcataaaatagtcaacccaaaaataatatggttgaagggacaatgcatcacaggttagctacactcttgcttaaatagcaagatagtactactactcatgtgcacacaatgcttatagacaacacatgtcaaatcctttaaataaaaaatatagaccacatcctaattgcactaggatttctaagacaccccctcaaaggatccgacgttcctgtcggtccaacttatctccatagtcacatatgcatatagacaaatatccagaaacatgtcccctcttaacgcacatccgtacgtccagtgatcgaaacaagcttccaaaacaatcccaaaaaatattgataaacacagatttagaagagtaaaaaaatattttttttttgaaaaaaaaatcttatacataaatattcatcacaaaatttcaaacaccattaaataaggtgcccgcgcatttgcgcgggctaccttcctaatttcattagtaaatctatagttatgcgatatttagcattaaacatgtagttttgtgaaaattaattgttaaatttgtagtttcgtgatacatcactttaattgtatagttttgtgataatttagccaaagtatctgtagttttttgaaatttactcaatttcataaaatttagattcaatgaatattctaggttggaaaagtgcagtcaatcctatagtagtactgtgattttgccaaattttatagtcaaagttcctcatcactactgtcgagaaaagttcttccatggctccatgtcaatgttcagaacatcgcaccaaatgaagcatttcctagtaggccataatctgtccatcaatcatttgcataaaatggtttgattgtagtgactgcaaaatggaatctggttcaggtctccaaaagtcgaagtaccttcgcaatcaatcatgtgagttgctaaaacaacccatccaaatttcccagttagtgtcatttctgacttattatccgaatatagttgctgcactaactgcggccgctacaaatccaatgctcttgatatttctgcagagtccctgtcatgcgtggctatatactcctattaggcaggtcaattcgtagccgggaagaaaatgacgaggattcccgatactgcttgtcccgttgcagaagccacaggactgacgccgacgtccgtgccgtagttagaccgtgccaccacgtccctttcggcttatcggcccattccggtgcccgtccctgtcgctgcgtatctaccagaactccagagccgtaggtgctttgctcgagtcatgtacctaatcctaaatggtctaatggcgtgtgcttgtcttggctcgtactccagcctgcatcttcacgcgtaatttgctgctagtgtttacagtgctcctgcagcttgggttttcagataaaacggtttaacactccacgtacttgccagcgcaggatgatgctccaagtgttggcaaagtggcaacggttttgccgtgacggtgagctagtgggagaccccaggatttcaggttccgtctcctcgcgaccgcgccgcgcgtcggtgcacgccaccgaccgccttcggtcgagcgcggcgcgcgtctaccgggcgagggcgaggccacggccacgcgccgcctccactccacacttccacaggcccgggtcccccttccttcccggggatggcgccgcgccgcgcgacgccggcattttccgttttgtttatgctatctggactggagcatcaagtacggccaagtgtgtggaaaaatcgcggccaaaccttgggcacgcctcgcgcccgcgcacccagccgggacgctccacctgtccgctcggggcatcgcccgtgcaccacgtcgccaccgcgcggtctatccgattcaaaaccctcgcgtctagaaaaaggcgatatgcggggacgctgcgctttattttaagcaaagaaaatttattgtactggtgctttttattagtgctagtattactcgtactgctgtattttcttgtgtatagtacatgtaccgcaacggtagtactgctgctgctgctagtattgtactgtagttttttttttctcagagaaaagaacagaaaataagagaacggaggagaagtaaagtggctgaaacggctcaattaagcacgctttcccgagaggccgagacgtacaccatggctgacaatgcggttcaggcatgttaagtcgcgttttgtaaggtacgcccttggagaactgggtattcacataatcacgtgaagaaccatcaagcgtacaacggctctggcctggctagttaaatttccccatttatgaaggtgaatctggtactcttacacaatcatcgaaggattttacatgttcaaaaaggagcatcatttaacgttgttcggcattgttatcttgttatagacattcagcattgtactatcgtgttatagacattcaatatttgtcaaaatggacggaagaaataagtggagctcgaaacagttttgggaatttatgaggaacgccatgctttgtgtacacaataagatacaacagcggagtaatgatgtgtatacgaatacgacttgattactatatcgattggttagacgacgatgatgttagcatccattttcattactgggagaggatgatgtgtatacgaatacgacaacataggtagccgattaggtattgaaacctaaccgcctaaatacttgatcaaacaaaaaagttgtatctgcatcgcacggtatggcttgaatggaacatcacaagttatgaacttacaaaatttgactactctcgaatcaaaaccgcaacaaatgtatgaaaatcagaaagatccgcattaaagaggaaatcattatgatatttaatactagctgagtaatccctacacgacacacaatccctacactctacctggctaaccaacaaattccagtaccaaagtaatcaagccaagccagctagtattgcacctcggtgtagcgtgagccgtggccagtccctcagcaacaaatggaagccaccttggatgtttgcttataatggccactaatttactggacagctgttatacttcaatacctccccgcactttctgtttaagcttagcttgataatttgtactcacaccgagtaccagcaaagaaaaacgtaactcactggcgcgcccggagttaaaacacgaagatcactcgcaacagccggtcgagatgaggcctcatccccacaaagtattttctacacctagatgctatgcatgtaatttaaatagatatataaaaattttataaaatttaataaaatagtacatgataatataagacactatgcaaacatgcaagtctaaattcaatcgatatatgaagaaacaaaaataacaaattttgtctgtacggtacgggtactattcactgtctgattttattatttttgtttctctagttgtagatccaatttagtcctatatgtttgtgtatagacttatatcatcacaaacaatgttactaaatttttttaattttttttataactatttgagtcgtatgcaaatgataggtgccatagcacctaggtgtgaaaaaaattttccgcctcatcccaattcccaccaatacagggaacggcgagggcttgatcccataaaacaacacgataaaaaaggcgaaaaatctcccccctaaaacgcgacctgtgcggccctgggcggagaataacccggcggcggcctacggcgatataaaccgtatattgagggagcaagccgtggtacagagcagaggaggggggagagagagagagagagagagagagagagagtcgtgtgtgcgtgtgtccccggggttctagctttgggatgctgatggcgaccgtctcgccggcgcggagggagccgacgccgcaggcggtgcgggcgtccccgatgccatcggcggcggcggcgttggtgaggagaggcggtggtggtagcggggggacggtgctggggaagtacgagctggggcgcgtcctgggacagggctcgttcgcgaaggtgtaccaggcgaggcacctggagaccgacgagtgcgtggcaatcaaggtgctcgacaaggagaaggccgtgaagggcgggatggtccacctcgtcaagcgcgagatcaacgtgctccgccgggtgcgccacccgaacatcgtgcagctgttcgaggtaatggccagcaagaccaagatctacttcgtcatggagtatgtccgcggcggcgagctcttctcccgcgtctccaagggacgcctcagggaggacaccgcgcggcgctacttccagcagcttgtctccgccgtcgacttctgccacgcccgcggcgtgttccaccgtgacctcaagcccgagaacctcctcgtggatgagaacggggacttgaaggtctcggacttcggcctcgccgccggccccgaccagttcgaccccgacggtctgctccacacgttctgcggcacgccggcttacgtcgcccccgaggtgctcaggcgccgcggatacgacggcgccaaggcggacatatggtcatgcggtgtcatcctctttgcgctcatggccgggtacctccctttccatgaccacaacatcatggttctgtaccggaagatctacaatggggagttcaggtgtccaaggtggttctccaaggattttactagattgataacgcgccttcttgacgcaaaccccaaaactaggatcaccgtgccagagatcattgagagcgattggttcaagaaaggatacaagccagtcaagttttacattgaggatgacaagctctacaacctgtctgatgacgtgctgaacttggagcctgctgatcctgttcccccaccattgggtttggcacctcctgttcctccacctccacaaggggatgatcctgatggttcagggtctgagtcagattcatcagtcgtatcctgcccggccacattgtcaactggggagagccagagagtccgtgggtcactaccacgcccagcaagccttaatgcatttgatatcatatcattctcaaaaggattcaacttgtctgggctgtttgaggagagggggaacgagatcaggtttgtatctggtgagcccatgtctgacattgtaaaaaagctggaggagattgcaaaggtcaagagcttcacagtgcggaggaaggactggcgggtgagcatagagggtacacgcgaaggagttaaggggcctctaaccataggcgcggagatatttgagcttacaccctcccttgtagtagtggaagtaaaaagaaaggcaggtgataatgaagagtatgaggatttctgcaacatggagttgaagccaggaatgcagcaccttgtgcaccagatgctcccagctccaaatggaactcctgtgagtgagaaggttgaaaggtaatgattctctcctgattttacttatatgcattgtagctaaatagggaagcaaggattttgtgttgtttaacatgcgcaaccgggcagaaagttaaattgattgatgcttcagttccaataattacataacaatgtttcacttcttgactatacatcctgtatttcaaattgagcgttcaagagtttgtttgctaaaagttaattgatttttattcatgctatttgtttttgttaacgtatgtttaattcacaatcatgcctattgcctaataccagtatgtagaaggaattagatttccttgcacggacacaatttaaagtaggaaagccttgcaattgaaaacctcgaacaactggaacttttattatttctagagtggtgaaagaatgctataggttttgctgttagattttgccaaccattaactagcttgcctcctgcaatccaatttcacagcgcttggataatgcgtatgtctggaaatttgctgccacttgaccattgcaagtgtgcttcgtgaaaagaagcaaatttgaatggttctaatcatcctagtttgtggctgttaaactgattatagattgttttgtttcattctagagcatgatttggtttatctaacatctgtgctcttttaatctatgctacgaactcaatttttcgtaaaatctttcccgcaccctattcttatggactttttagcttgtgatagattgtataagataaatgtcttttctagtcatcagttaatgaaaacattttcgcttgtcttatctatcttttggagttactttaaaaagtgattatgcactgttctactgcaccttagcttgtaaacttcctgctcttatttatttttctttatgtttccattttttttggataatggaattcaatccagtattgatgatgattccatgttaccccagcatttattggtgttgaatgtttacatgtgtcataattcatattgaaaaaacttttgaaaacaaatatagaaaggaaccgccaatatcatgtccttctggtttccccattgttgttatcaccaacttccatggattggcattgtgctgcacatcagcatatgggatagaatgggagcttgaagggaatgcttggcagtacctccgagtaccgaaatgtcatttttacaaagaacatgtgcttcactagattttcagcatgctaggtaaatgttgaaagtgctgtataggtttattatctggtgtagctccctctgacatagtaataacaggttgctttatgggaaacctggtagattttatctatttaatttggtgaaaccatgaaaatgcaaacatcatggctgagacattgaaaattacaaaacagaaagggcgcatagcaacaccatatactattcatgcaaaccatttctactattttaacctgtgagtttttgatggtttctagtttctttttacattcaaatgggctctaattcctgattttaggaggttcctttcttttcagtttcattgctgttattgataaattatcttttttttcattaatgataactttatactttgatggatctttgttgaacacttaatctggtgcacatgttagccacccaccattataggagaacacatgggacacatttaccttcagaggtaaggagggttatgtgcgtaagctgtgcctcggaggtagataggtgtgtttccagaagactttttgttacatttgtcaacctaattttcctccatcggagtagtacattctgtactgcgcaatactagcatcagttaggaaagttggttcaaatatgctccatggtacgtgggtgtacctggagctgttctgtagtcttgttttgaatcttcaatttaccttgaagaattttgcttttgccagtgaactgttatagtccatttgaattgtttgaaatgctactacaaccggaaactattgctttggttctcatagttcagaactcaataggaaatagaagtctattgctgttattacatacaagtgtgataagactaacagactgacatttgattatttccttcttgtcctgcaggtcttcaagcttacaggctcccctcaccctgaagttgataggaacagaaggcagcatgagctagagacaggagcttccatgcagttgacagggagatctcttttaccggaccaaacctgaccggtctggttcccgttgatgagctcgtggttttgataactagcaagagttctctttctctggatggcctaagatcgtttttaggcaatggatcgagacagtggatgtagatactccggttgtggatggtgcccaggtgggcgtttaaagtggatgtagataccctggttgtggtggtgcccaggtgggcgtttaaagtggattgtactggccagttttctctcgacttagcggctgtgtgcatctgcggtttggtttctttggcagcatcgaataattttgtggtaaccatgattctggtcgggggacagttgattgaggtatgggagggatatgcatgagccgggcatgtgccgaccgattggattccgaatcttccattcctgatgccattagcccattattggatgcgaggtgacagatttgggcactgcagtgcggttggttggttggggcctgtggggactgggggtcgagattacttggacctgctgtgctgcagcggctttggctgaggtcaccgagcacgtgagagcatcggtgggtggcatggttggcctaccccggcagtggtggcggccggctcgggccacgagagcgccgcgccgtttgtggtggcgcacggctctgcagtcggcggcgggcccgttgttgcgcatttccgtgataaagatcaccgtggtatgtcgtattctgttatacaatgctctttttgtggattcgaacttcgaatatggagttatggacacgggtggtcatcgatggagacaacagtggcgaaccggcgatttcatatggctcagtgagatgctttaaggtacataacaatttgaggtatgcattcatttaatcatgacatggcatgattaaccttggatttgtgtgaaagctatcactataacgacctgtactcttggtgatattccccaccgtgccaatttcctggtatctacactcctcaacggatatgtcgtggaaatgcagcatttctaacccaacagatacagggatcatatttcatcctacaaagattatgtgaaagagatcagcataataatggaaatacgcttaaaaagtaaaatcatgaaaattccatgtgatagttaggatcgacaatgacaatgattataatcatatcacaatataagatatagcctattgtaatataagaatttgatgctctgttttataatgttactacctctttacttcttgtttttgaattattctgcctccacttttctttctaagagtaaattgtattttatactagctaaagcgtagcatgtttcgctttgcactgggtcgtttagcatatactttcactttacaccatgttgtattgaaataaggttcacttaacactacgatacatcatgaaaaacaatttcatgaactttacaaaatatggaagaaacgtttgtgtaacatggtttcataaattttattcatactttacagaatttcctcgtaaatatatgacgcaacctagtgtaacgaaacttgttcagatgtactctggtataaagagaaaatatgtttacccattacaaagtgaaataaggtacaatctaccaagtgcaatttattcttcttttaacagtcaggttaataaaaaaagagagcatatatcacttatatgcttggggtgaataaacataatggtcctgtcatttcattttgtcgaattttgggctcgtttggttctctgccattggtaaccttgccaattttttctgcaacggcaagaattggcatagccaaaaaaaaggtagtgaactaagccaaataatttggcaatgttaatttctttttgctacaaatcaaacagtagataatagtagtttttttttgtttggttgggtttggccacaagccaaaagagcctactactatttattatcatttagttcaaacaatactttccccctcttgtagcaacacccttgtgatttatgagggtcgtgcctcacataaaaaactctcggctcacacacacacaagaaaaaaaataacatggccttttaatgaactacactcaattttttggttcgtacttcatcacataagatttacgggttgcaaaaggctcgaaaagccaaacgagaaacactaaatattttcaataccaacggtaactccagcttaagcaattgtagtagctcaggcacttttgttaatagcatttgaaatgacttaggcatggaaggcacagtgacgccataaaatgagatggaacggaagtgaaatattcgaacattgtattttcttaccccgatacactaatctagtttgtccttctaagtcctcttctatataagagaactatcctctcaatacgctaatgcctacatgaacatggaccaaaccgtctcacgaagttatgaacctagctcacgtaccacattaatagaccaatggccctcttaatttttcatttagccataaatactactactaaatttagtgttttaaaataaggtgattttaagaaagagatacgaacctacaaagttactcccgctatgttagaaaatagaaactagctaatgccttctaaaatcaacaaagtttttgtctgttttttttcttccaaaccgttagaaaagaatccaacatcgattcatagcctcagaactcgctgaacaacattattaactttaatccaactttacaacagaaaatcagctacaaagtatacaagcctaccactaagaaagtaacaccttctgacttttaaaattagccacactactgcttgcacgacatgcttgcccgctacgccgcatgtgtttaggctagtgcgctctctctatctctctcacacatacatttatgcacgtattgcctactctgtctctctctattcctcctaattacttaatcaacaaatttcaaatctttttaaattatatttgatttgtgatgattgcaccattatatttagtgcaattgaatctttataatataataaaaatctcatatgattacatttctgatgaaaagtatatatgttttaacgatgaaattcaatgtttcatgtgtgggatacaaatgtttcaattgaaatcccactatgttgctaattttttacttgattttatgagggtttttttaatgtttcacttgttgggacttaatgtttcatgtaatagtttatcagtgttgcaaccggtattttttttgaatgttgaatctcttcaaaacatttgatcaagtgagctaaaatatttaacttggtgataaaacaattttctgtatgtgctgaagctgtcccaacgcctatctttgttcagtgttctttgtttccttcctatgcaacagcttaccatttagccaagaaccacctagcaattcaattcaattccattagtcaacaatcacatagcaatcactagttttaatttgatattcacctaagtgacttcgttaatctcaaaatatactggcacactcgttagatacacttatagggaatgcatgtatgcacatgtctatgagcgtatatgtcgatactgtgtttcgaagaaaaaaaatcatccaacaacatttgtacctctaaataaactttagtctcactttgatggatcacataggaatattttggcaatctattatataattaaaggaattgaaaaaggagcctccacgttcgctctcatggcctagaaattctcacattaatcggagaaaaagaaaaaaccagagtccatatagaaatacaatttagaaatagctgaaattcgaaattaaaaaataaggaatattagaagaggagactagagtccatatagaaatacactttagaaatagttgaaattcggaattaaaaaataaggaatattagaagaggagtatagagtccatatagaaatacaattaggaaataactgaaattcggaattaaaaaataaggaatattagaagtagagtatagagtccatatagaaatacaattaagaaaaaaatagaaatttggaattaaaaaataaggaatattagaagtagagtatagagttcatattggaatttaaaaccaactaaaattcagaataaaaaggagcctccacgttcgctctcatggcctagaaattctcacattaatcagagaaaaagaaaattcagagtccatatagaaatacaatttagaaatagctgaaattcagaattaaaaaataaggaatattagaagaggagactagagtagttattacacattagtagttttgaaaagttattgcaaaatttaaaattatgttgtcattgtaatatattttattaatataatgagaaaacatatatgctattatatgagagaaaatataatgatgctagccgcgcaatctgtgcgggccaccatgctagctagtttccctaaaagaatattgacttccaatttactatgtttattacaagcctatccactaagaactaacacatcctaaaattagccaaagacgcctcgtttccttcctctccaacaccactggccaacaatcccctagcaattcctagcctcagaacccaccgaacaaatcaaaccccaaaaccaatttgcaatggtcgatcatccaccgtctccatctgtgcacggagggattcattgtccctccggccaatttcccggccggccggaacggcggaacctcgcccatgatcacttgaaacacctcccttgctcttcatggccatggagacgacgagccaagattcgcaggtgatcatggggcggtacaagctcggccggctcctcggccgtggcacgttcgccaaggtctacaaggcctataagttggccaccggcgaggccgtcgccatcaaggtgttcgacaaggaggcggtgcagcggtccggcacggtggagcaggtgaagcgcgaggtggacgtcatgcggcgtgtgcaccaccgccacgtcatccgcctccacgaggtgatggctacgcggtccaggatctacttcgtcatggagtacgcgagcggcggcgagctcttcacccgcctctcccggagcccgcggttcccggagcccgtcgcgcgccgctacttccagcagctgatcaccgccgtggagttctgccacagccgcggcgtgtaccaccgcgacctcaagcccgagaacctcctcctcgacgcccgcggcgacctcaaggtcaccgacttcggcctcagcgcgctagacggaggcctccgcggcgacggcctcttgcacaccacgtgcggcacgccggcgtacgtcgctcccgaggtgctcctgaagcgtggctacgacggcgccaaggcggacatctggtcgtgcggcgtgatccttttcgtgctcctcgccggctacctccccttcaacgaaaccaacctcgtgatcctgtaccggaatatcacggagagcaactacaggtgcccgccgtggttctccgtcgaggcgcgcaagctccttgccaggctgctcgacccgaaccccaagacccggatcaccatctccaagatcatggacaggccatggttccagcaggcgacgtgcccgctcggcgacatgtccctcgtcgcgagcgcgccctcggtgctgcttgccagaaaggaagccagccagcagcacgacgacgaggaggacgatgggtttgcacgggagaagaagaagcggtccaatgtgatcatgtcgtcgccggtgatcgacgtgaggccctcgagcatgaacgccttcgacatcatctcgcggtcgagagggctggacctgtccaagatgttcgacgcggaggagcgcaggtcggaggcgcggttctccaccagggagaccacgacggcgatcgtctccaagctggaggagatcgcggaggcggggaggttcagcttcaagctgaaggagaaagggagggtcgagctggaggggagccaggacgggcggaagggcgcgctggccatcgaggcggagatcttcaaggtggcgccggaggtgcacgtggtggaggtgaggaagaccggcggcgactcaccggatttccgggacttctacaagcaggagcttaagccgtcgcttggcgacatggtgtgggcgtggcagggaggtgattcgccgccgctcgtgccggcggcggggaggaggccgatcacgaagcgctcttgatatgccgactcgatatcgaattttcacgttgtaattgatatgctctctgcttattgatctctcgtacgtgtttgtgaagggtgatgggtgaaccaccgtccagctgatctgtgagtttttaaaagcacgaattacatttacgttggcattccgctgtcagattaaactaatcagagtttcgtaggacgtgacattccaattcttcttctttttttaaaaaaaaacatgatattccatatcctcttttttagctgatactgatatctcgctgatcaaaactttgaagtagtgcatagaaatatttcgtagaacacagctatcgcaaatgtcatttttatttctaaaaaaagctcatctcggcaaaaataggattcttcccggctaactgttggttcattttgttgttagattctagggctccctcatgtgtggatctagaggtgatatgctcataggaataatggtggttgtattagagagcgaacaggagagagagaagagggagataggaacccatactggcgtcggtcttggagcttaatgtggccatgtcaacggtgtggcggtgtgagggcgtcgctaaggacggtattgtcggtgtgggcgacggcggcggcgagactgtgagcagtcccctcacttcagcgcggtcctaaattgaagggtattctatggggagtgtgtgtacacggcgaaccttggatcgcgtgccccggtagctcccccttttattgtgtgctacgtgagaagagcccacagccacgaaacggctagcgccccgatcacctctggagttcgcaactaatatttgtgtccttcaggaaaattatgcatccacgttaatatatcaacgtttctgttataatcacgtgaatcatttctattttagtcgaaacatggtttggccattttatcgaaaaaagatttgtgtacagaaaaatattactgaaatcaaacgtagactgaaatcctggtatattttaaggtggccgttagtgtctaaaacggtataacctgtcttttgaggttaaaagttctaaacctgcactgtcaattttttctttcccggtttcagtacgagcaatgatggattttttaaaatatattttaaaccttttaaaaatttcttttatgaataaatcctttagaaaaacttattccataaatgtgcccattttcttggcaccagggtcattggcgccgagattattgtctcagtgtttatctcctagcaccccatgataaattagttgcttatacgaaggagatcagtgtcaaaagacttattttgaacatttttagaaaaattattttacaaataggttctcggtatccttctcttaagcgtcgatcctctacatctcggcagttaggacgacgaggatgtcaagatataagtgtatcctttttgaaataagtttttcttatacaactattgatgaggacatcctctactattacccgctggcaaagacgtaaaagtcgggtggcgaccatgtgagtctctgaataatcccactttggttagattgggaggaggaaaccaccttaaaagggagagccacccttcctctattggactagttttttagggagattgtgcctttccccgagtgggtgtgactaagaactgttggggtccgggcaactttaagttattgggcctccgccgacgtcttttacttgcttagcttgggaggaggaagccaccttaaaaggtctattggactagtcttttaggcccgagtgagtgtgcctaaaaactgttggggtccggacaagcttaagttattgggcctcggctgaccccacttggactggattattatcaactatttataaaataagttttagaaaaccaaaacataaaaaatccagcgaggtaatatatgtgtgtgtgaggaaatgacttgtgcttttctctactacttaaaaattttaaagtgtttccgctgtccataataaaaataaaaaccagagaaaaaattttcgttcgagattaaaaaaaaaatgcccgtatatgattttcttatctgttgtactcgcgcaaaaaaccagttaacgcacacacgcgctcgctcagagtaggacccgtgtggcatgtatcccgatctcctctctgggccagctgggacatctacccacagccctcaactacaagtctaaaataggtcctccttcgccgacctgagccaaatgggcctgttgcccctgaccacaccacacagcttgtgcaggacgcaattatcagttcatgtgcatgcgtgaatgcggtgaaatgatattctttagatgatttcaaaaataaattattctatattctttctatttttatttttttcataatttaatataaatcttttcacccaatatctcagaccatatggaaattgactcttctttgagtatagtcccgattctccctattcatcaaggttgactctaaatcctcttcttcattcttagtaccttaataccttcttttgacaaatttctttttattcaaatttagtttaaaaacccttaccacttttatgaattatggtctaagaaattctccactattgtcctataacctaaaccaagtgattccaattttattggaattaattgtcgacccatcctttgattcgaaacctatccttaactttcttccaaatccaaattccttcatttcgatctagccactaatttaattcatgtggcttgataccctctttggcacaagaataatatttttagaataattgctcttgtgctaagaaggatatatttttattttccaaattaatctccttttagcctcaaataattttctaaatccatgtcaggtagtttgtggctaaaaatcctatttatttcctctcgctgcctctcttgggccggctaggccgatctgggtcgagagaagaaaagggagttccggcccaatttgaaaagaagatttttagaattttgcagataattaagggatggagtttgaattcaaattaatatttggaaggaatttaggtggctaacttttgaaatgaatctatttttggagataactttcaaaagagatatttcctaaatatttgagtgcaataatgtggtctaaatattaaagcactcaaatgggagggaggcgcacggcgccacagcccagatcaggatacagagcgagaggcgagagccctcgacctcgtagaagggtcgagcagctgtcgcggcgagccccgccaaccataggcacgcgcctatacctacgtgacggttcattggacagtgtcctttcccggcaaaactaggggtgtgactggaactgaactctcaagaaaatgtctctcgttgtttacagtttacatgttacttaaataattatgaaaaattttaagaaaatgtattaatatatgataaattaaataaacatgtaaattcaatttaacttctacatctcgcaactaaaaaaataaaataaattatagttaattcatgtatatttacagttgtcacgccccgaactagtcccgactggaactagcccgtgacgctccaaattaacctgttaatcgataccagtcccaggaaacagtgctggtatcacaggaagacagaatatcacagcaacagaggtctctttattatagagtaggagtacagtcatgttgggctgcggacagatcccgagctcacaactgcattacaaaaggaaagcggaagccaggactaggaccaaacaacacaggcgcgacttgggaactaggccgaaaccctaaaactcatcgtagctggcttgctcctggaagaactcctcatcaacaggatccgcttcatcttcttcagcaactgagggggggggatatttatatagagcaagggtgagtacgggagtactcagcaagccatgggaattaagtgtttaatgcaggcttcaaggaaaggctgttgtttttacaattgattttatttgaacacctttctgaaaacaactaagtgagtgcttctcaaacgacacggttgagacagtgcgtctcgtccggtcggagtttgtgcaatgtatcagtctttagaattgatcaagattggcacccagccaacaactttcaaacggccacccgggccaacaactttcaaacggccacccgggcctagctgatcccgtcagctactgatttttcaaacatcgaacccctttccacaacagcaatttcacaagcagtagtcaaacaaaactacgctaggaatcacctcacatccgcccatgaccgtgggcacggctgttcgaacagtttgttaacctctgcagaggggggtacactttacccacacgacattactaacccggatcacccagcccgtggggatcagccacgtcgggagacctccaagctttcatgacaaggcatttccaaagccgacacaggtttaccatatgccgacgagaggggtcccagaccaacaacaggttaggtcccagaccatattgtgccagaaagcctaggggtcctccccgacaccaccccggcgaatccacatgtctctcggcatcaaggctcccctgataagctagttactcagccaggggtgtcccattccacccatgtggtcgtacttgacttatgtttggatgaaattccaaggaatcggtccttaagtgcgagagcgggaaaccgtacacccgatacgttccccggtccgcggttttggaaattcatttagttcgcaagcaccgacccaggtgtcgggttttccaagtcttttgtaaaacccaagttttacccaagttgtttttcagattttaagtttgaaggcgtccgtcgatactcgcacagggtgcacgaatatcgagacgcatctagatggttacaaggggacatgatataacaattaacaaagggaggatcaatgcaacaaattaggtatgtccgccaaactgccttgcagacgggacaacagattaagtgcgatcctatcagtgcataatatttttcaagcaacataattaaattttaaatataggatcaagatgttcaaaggtggcttgccttgctcgagatctggagcttgatcctcgaaatcctcgcactacgggtcttcgggctccgaaactacacgcgaaacggggcaactcaataaacggcgaaaataaagccctattaatgacctctaagcgtgccattagatagatctcgagatttgaggaattttggaagttgaacggagtcaaacggatttacggttgggaagatattgaatttctaagtttattggatttttggtctaaaggaaaaggatttaattaaatcctttttggaaaagaaaagaaaagaaaagaaaagagggagggaaaatagacttttctcgggcggctagggcgtggcccaagagaattggggcggtccggccgagctaaatgggccggccggcccaagacggtcgcgcgcgcgggagggaggagagagagcccgtggaccgggctcaccgcgcgcggtcccgggtgggacccgcttgtcagcggctcggctcaccgtgcggagggagtacgtggcgcacgcgcgcgggcgggggagggacgcggtgcacgcgcacggtctgcggaggaacggatgccgctggcccacgcgcagtcttacggttcgcggtggaacacgcgcacgggaggggctgaccggggtcggcccgtcccgacctcggctgggctggcgccgacgtggcgcctacgtggctgccacgtgggctggcgggaggtagacgacgacgccggccggaacggacggcggacaacagcggcgagcggcggagcgaaccacggcgataccggtgaaaacgagcacaccgggtggttgcacgagacgaggggagacgagccaacggctcggattcgccggaggaagcttgacggcggcgaatcgcggcggcggcaaccggcggtgggaaaaggggaaaacggcgacgaggtcacgaggggccgattcccggcggtgagagcatctacgcggccacgggaatccgatgctagcgtcggattgggcggagctacgccgagcgaggctggcgacgagcgggtgctacgaagctcgagcggcgacggcggcgagcacacggcgagcgacggcaacggtcggggcggcgccgactagctacggggaggctactcgtgctaccaccgaaaactaagggggggagatggagcgaggaggaagaacggagagaggcactaccgtgcgggtcggggcgctgtgacgagaggccgacggcgcgggagtaatctctccggcctcgggccggggaagaggaaggagagggcgcggccgaagtccccttccgcgtccttgctcgtgccggctcctccggcacgcgcaacgacgaacgacgacggcgaacagagcacgggggcggcggcaatggcgcggaggtgaatgggagaggaagggaaagggggaggctggggtttaaatgggcggcaatgtcggtttgggaaccgacttagggcggtcaaggcgcgagctggcgctcagcgcttgcgtccaaatcggcgacagggcggtgacgccggcgagagggaaaaaggaggaaaaagggggagagataggggggctcgcccctttcttctttgggaaaaggaggagggagcggaggcgtcgcggcagagggaggagggaggctctgcctccgtcccttggaggctagcgcgggagtggcggggccgaggcgatgacgacggcgatgacggcggggcggtttggagcggcgcgacgtcacgggcgacaggcgcgggctggcgcggcagagggtgacggcggcggcgaccaggcggtcggccactcggcacgcgcgcgcgggaaacaacgggcggcgcggctgggcacgcgcgctggctcgcggggccgagcggctgcaggcgcggcagagcagcggggccgggcgacgcggacggcgcagacgacgcggctcgggcggggaaccacgcgggcacgcgcgcgagcgacggcgcgcgggggccgtcttcgcgagcggggagctcgccagggagaggagaaggagagcgaggggaagggacactcggcgcggcgcttgcgcacgcgcgggcagagcgaggggaaagggaggggcgctcggcgcggcgctcgcgcacacgcgcgcgcggtgcgctggcggggcggaggggagcggagggagagggggagagggagcgcgccgggggaggggagagggccgggggagagagagagagagagagagagagagagggagagcgggagcgcgccgggggagaggagagggccgggggagaggggaagatgggccgagagaaattcggcccatcgacccggggggaggcaaaatagacttttgcggaggaattgatttgggaagggtttggattcggaattgaactcgacgatagatcggggattgagatcttgagatggcacggacactagacgacaagcgaagaaacaaatttcgcaattagggtttttagagataattttcccgctaggcgccacgacggaacgggcgctacaacagtccaaattattttttctgtgaaacttgcatgtttgcgaagtgatacatcacatattaatataccttaatttttttggcatgggtctgggttccggtcatcaactcgaacggtcaatgttggctagatacctgcatcgttatacgtcacaagttggggtggttgaacaggaaaaacaacaaggcaggcgataagtttttctttctagttagtaataaagaacttttggggtgaaatccgtagatctacgaaggaacgccaaaagcgaaggcagctctctgggtccctaccgacgctggggtgcacggagaaataaagaagtgtggaggagaaacagccgagctcattcccttcgcttcctgggccttcgtgcgtggcgtgagttggaatcctagaaaagatcgattgagactctctccccggttccacgaagatctctacgtacttgtctagtccaggacaactgggatgattgagcaccagtgatttcgtatccggtcaaaatcttagcagccaaagcttcctgtcggaaaacaggtacgattcactagaataccctaattatttgagtggcataaaaacaacaagtggtactttcaagagttcaaaatccactctaggacataggaggaatcaccatggagattttttcatataaactgttcattggataagacggtcagctgccatctacgacatgaaatgataaatgaagaaagaggagggtgtgtttagttcacattaaaattggaagtttagttgaaattggaacgatgtgatggaaaagttagaaatttgtgtgtgtagaaaagttttgatgtgatggaaaagttggaagtttgaaaaaaaaagtttggaactaaataagggccaagttcaaatgggcacaaaatatccaaaatatgataaaacgtgctaatatttaagctagaaaccttaagtagcaaacagttagcgggtgatttgattttgatctatacttcaaaacgaagcatcgaatccactcgttgaagtagattgaatctatacgtacagcgcgatttatttttattttattttaacgaactcggttttatttgtcccccgattattcgcaccgactctgtttctgttgcattcgatctcccgcgggccgttgccgcgaagctaggtctctaggaagagatcgccggcgattcgcgatggttccgtggcgccgctcctcctcctcctcttccgccccttcctcgcggcccgcgcggcgtcccgcccgcaccaatgcgagggtctccccagacgtctcgtcggaattgtcgccgttggcgggggaggagggggcaggcgaggagaggtggtcggcgttggtgcccgaccttctggcagatatcctgcggtgcgtggaggccggctcagagaggtggccgccccggcgcgacgtggtggcctgcgccagcgtctgccgccggtggcgcgacgtcgccgtcgccgtcgtgcagccgccgctcgagtccgggaagatcacgttcccctcctcattgaagcaggtgacgaccgatcaataccctaacttcaacctgtattggattgccgtctcgttaaacttggtggatgcatagacaatggtccgttacttttgattcctgaactcgggaatccatgcttctcccattgaccccatccaatggatcctaaatccctaatgcattagttctactataactcaatatgagtaattggatggtattttgtctattaattctcaaataatctaagaatttttttactttgtaccttggggagcaaaaggtcagtttctctggacagcatgagtaaagcagcttccagcttgtgtgttccaatttatcagaggatcggttaaaacctcaatctttcatcattcaaatgtaaagtgcatacggtctctctttttaatatctatttatttagttgtttgctatgttcagtttgggaaactattgttgctattctgataagatgtatatttataccaatgctatcgctgcagcctggaccaagggacgcaccaatgcagtgtttcatcaagaggaacaagaaaaactctacctttttcctatatcttggattaacacaaggtaagcctgcatgcagttttgttatctcttacttaaacactatgcagaaaatattaactcttggccatgtttttgctctatctttgacaaatgatgccacaatggttataatttttgaaaagaaaatgttagtagatcttgtttcagaagaaaggatgtaatgttttattttctttactgtgatcattggcgaaggtgtcatgcatctatgctgaaggttatttgtgttcgaataagaatgacaaggaaactttctattccctgaggcttttagactgaactgaaatacagtgagggttacgaagactctgctttaacaaccttttagtgttatggaccgtttcagggaggagtttcatacctgcatgtttatgttttacaatggccatcatggtgagatagttacaaatggacattttgttctgacgcttgaataaattgacatgcattgttgtgtaaactgtattatctttttttcacgtccaatttctttatgggtggttttcctgttctagcagaactaacagatgatgagaaatttctgttggcggctcggaggtgcaggcgtgggttgcataaggaatatgccatcaccattaactctgatggtctcttccatggaagccagtcatgcgttggaaatctaaagtgaggcctagccgctagtaattcagtaacttctattctcaatttttttggtcaattttatattgcaaataaattgataacaattttcctgggaattccacgatgctaataatgacttcgcaatttttgtatttaggtctaatttcacgggaacaaagttcaccattcgtgattggcaaccaccatatgaaggtgctaaggcgttcagcagcagatccggtcgctggtttggaaacaaacacagatgcccactggtttccacgggtgatgtagaagttggagaggtatcctataaatacagtttactcagaccaagaggtccaagaagaatgagctgcagtgttcagtgtcccgtcctcaagggtactgcagtagatccacaagacggaaaacgacttagcaatagcatccctagttcattggttctgaacagtaaagtaccaagttggcatgagcatcttcagtgctggtgcttgaattttcacggccgggttatggttgcatctgtgaagaacttccagcttattgctccagtcgaaccaggggagccgtcggataagacagtagtactgcagtttggaaaaattgacgatgacgtttttacaatggactaccggcagcctctgtcggcattccaggcatttgctatctgcctctccaactttggcacaaagcttgcttaactttggcacaaagcttgcttaactttggcacaaagcttgcttgtgaataggtagctccatgcacttattattgttgtagtatgattttattgttttcgttaccagtaacagaatttatttataatactggctaggaggatgtctaaaatgaggctaacatcctacattacagtctttgttgcccattctgaccattttgttctcgtctctagccatgtcgtctaacaactccgacaagagatatagcttgtgcatggttacgggagttcatcagcactttggagctaatgcggtcaagatcgttgatgtgctgaaaagaatagtttgagtagtccagagtgaaaagatgggataaagggttttcaaagtgaaacaggccgaaagtgtaattctatatgtgaggtgttgccgtatcatgtcataatgcaacgttgtgcttgtgtgtttgggatcctattaaatctgtatatgtatccaggatgaggaagacttgtaaatctgcagtcctcagtgtagtcatgtatgactgcagaatctttaggtgcgataagactgttactacaatcttctgagtggcattctatagactgtagagtggaacatttccttttcgccaatgacagatatatagtttgtgcctaatggatatcgactcatcaagaagccatttccttttagtgccaatacacttatacacgtcatggggttcaaatagttaatcttcccaattcgcagcatagaacgttcagagaaccaaaactttctgacaaaagaaaaacgaccttcagattagcaaagctttctgaacaaaagacgactctcttccggagggaaattagctgttaaataggctactgggtccttgtacaccgatcactgatgaggacacatctccatttctgcgctttgcggaacatcctcgcagtgaatatcttcatcgcacatgccagcattgtcagaatccgtctgcatctcgtataacagaaacaaacattcagcaatgcgatatggttaacactaaacactggcgcggaagacatgtttacctgcaaagccgtggtccggccggcgctccagcccagcagccggccgacggcgtccgcgaacgcccggtgcgccatcctcctcccggcccgggcgaccgatccggcgtgctgcacgagcgccgcgcagccggcgaacctctttgcccgccctggcgccgatcccctcgcacacgaggcacaggaaccggcccttctcccgctccgcctcgtagaaccccctcaggcccgcgtccttctccagtagctcctggaagaaccgggccacattgccttcctcctcttcctcatcctcgtcgtcgccgtcgtcgtggtcgacgtgctcaccgaagaaggcgcggcaagcctccacggcggcggcctgcggggacacggccgccggcaccggcggctcccgagggggttccgccgccggcgggccccagccacagccccaggacgcggagggctcgggttccgggggcgggtcgcacacccacggcttgtccggtagcgcggcgcgggatggggaggccgcagcggcggcggggcggggcggggcgccgaggggctcccaccgctcgagatcgagggcgaggcgctcctgctgctttcgctccttgcgcttgcggcgctcctcgcgcttgaaggccgtcgacttgcccggccggaggagtggctggcggcggctagggtttggagcgagggaggcgtcgacgcggtggggctcggggtccatggccgtcgcgccgcgatgccgcctgccgcctgcggctgcgggtgtcgctgcttacgccttacgggccaagtggacaacctgggcctcggcctttttcccatgggggaccaaatcgagcgaagcgtggagagcgtggtcgagttcgggacagtgtcactgcttcgatgttgtggagctatcagatgttctgttcttgaaacgtgacagaacggatgtgtcaactcctgcgtatgcacgccctgtcacgtcatttaggatacacattttgcttggctatgcaacaactaaacgttggcacatgagctcacctaataaagaaactttactcgaaactatatagattgaacatcgaaaaacgaaaggcacgaccgtgcaacaaaagaacaacgggtaataatatggcagcactgagttccaatggtgcaatgtgtagaaaaggctagcaacagcagaaaatcaacatcattgcgtccttgacaacatgaatttaggtaaatctcaccatagatcattggatgggcgttgatacattcaccatttcaaacacttgcattatcatctattgttagttacattgaaaatgacttgtaattgtattttttttatttctttttatgtttgaactcgacaagattcacacatactgctccattgtgtctcataattcattattatttttgtccatcgtccattaatattataccaacgccatcccttgttgcacttacaccaccaactacgattttcggttcagttgcgttctctctaattatagatggaggagatgttcacgttgcttttctcttttaaaaaaaggaagttcaaagttaaagaaaaatgtcacataataggctatttcatatgttattatgccagatttgccagtataccatttcatcattaggcattcatatgttgcactatatcatttctagcaaacatgtttcaatgcacaagccataccgttgaaaattctaaccctattttctatatcccgttcgattttttattttaaaaatagcttggttcctttaatattttatcataattaacctgtttgtttgtgtcggtgatatgggcccggggtatcaggtttagagggaggaggctgccccccgatgccacgtggccctcccccgaggggagtcaggcctgaggtaggacggtggccactccttcccagagactggatggaggaggctgctctccaatgccacgtggccctcccccgaggggggtcgtgcccgaggtagggcggcggccactccctggccgagactagagggagaaggccgccccagacgccacgtggctcccacccaaggggggatcgggcccgaggtcgggcggcggccgccccctcccgtgactaggggtcgggctcccccgaccccctctctaggtcaccacgtacggtgggttaggtgtccgtcttcaggtgcccatctacccgcatttatggcgtcccgagcggttgcgccacgccgcatttaatgtggcgtgcagtgcactcaaccggtctgtgaccggtcaaatgaccgatgggactggctagtgcgcctgtgcgctgctcgtgtgtcaggcggcgtgcagcctgacatgtcccatcaaatagtgatggtgagaggttctcatcctcttatcccagccggagtcggtcctcccgctctggtcaaagcaaggctcccgtttcccggtgtaataggagcccagaagtcttcacccattaaatggtgactgacaggggcaccccccgtgtcaggcggcaagatttgatgggccccatcatcaagacgacgtgtgcttggcttcccaagttaagagacaagacatgtatttaatgcaaagattatcatacttctccactggagctaggttaggttgttgggcccatgtggtaaccccttgaggtataaaaggaggtccaggcctagtgatggaggggggaacttccgagcgaactcgcgcttggtgatggagggggggaacttccgagcgaactcgcgcttgggtctcgcaaccccaagcactggtgttctacattcaatcaatcctgcacaggagtagggtattacgcttcatagcggcccgaacctgtataaacctctttggtctgatcgtcttggaggggcctaaccccctcaagaccacacagtttcgctcaccaaatcctcgaatctcacccgctgcccccggttccctggtggaggagttcattctccgacagtttgttttttttttgttgagaattcacccctatgaacacacgcacgcaaagcacaacgccattaaatcctgaaaaattcgctcccacggagagtcgaacctaggatctaaggtgctactgagcctcttataaccactaagctacatgccctttcgcaattaacttgtttgtctgactaaacatcactctctcaaactacttcccaaaacgttttttgcagttggcggagcaagaaattatcaaagccaaaggctaagtagggctcaactaatggagtattttcctcgaaaaattacatggtgaattaagagaatttaagcatgattatggaggcaagcctagggctcaacccaagcagccctaggctttgcttgtgcccctggcggcaactactcatttctgctcactctcttctgcttcaacttcctccgtcccaaaaaatcagagattgtttggggcatatcagagattcagagctgttcgaaccgaactgaactttatatctgtttatgaaagaaaaaataagcatgcagggacattgaaattcaaattactttgatgattttacctactcctacttgtctggacatgtaaactgaagttcagaatagttcacttaatacacttaaattgtaggcttgctaatggagcatgatcttcccgaactgccaaaggccatctcacttggcaatatctcctaaaaggccagttgtacaggattgttaaatggatgataagagtatcgcaaatggcaaaacatgatgtgccattattagcgagtagaacacgttgcatccgtctactgtgcagtcaggatgaagtgcagaaaatatctatcactaactaaaatagcactagtagtgtcctaaggtgaaccgcacatattcagagcagtagatgactaccatctaatattatgcccagtgccatggctactctaatccctgaaatcagatacacaagtatgcaccctgtcaggaccaaatgagtgacgatgattagcatttgaatcactttggtgaacaggtgtgcattccacctgtagttcccccttttcaacaagagggcatcttggtccagatcgtgtgtcaagcatctaggttgcttcgttcatccgaggataccacttactacaacacctcgaaagcttgacaggttttcaagcttcctgctaaatgctaatgatatagtagtatgatcaatgcgaaagagtcacgagcaacgtggcaaatggaatagccggcattccggcaacaatgtaccaaataaaactgctgtctatcatggcatggcaatctgtacatgaaccagacaagacaaatgagagtattactggaatcacatgagaaaaagctcagggaggatatacatttgagctgacatgagaaaaaggcatggaagcctgacttcttgtgccattttattctatgatacatgcaattacatttgatgatcaactcaaccttttatggactaaagagtactacatgatgtatggactgtaaggaagcaaacagaagctatgctgtatagatatgtgatttacaacagatttaagccaacgccaacttaccttgagttcacagagtacgcaaatatggcatgcacaacgacaattacctatgtactggtatacaaaaaagctgctaatagccaagattgcgacagcaaactgaggggggcatccagggaaaatttgggcgctggcagatacatggccgtgctgtccttcaaggcattatgaacagatattggtcttgagggaagacatcatatctcagcatccaatgaattaggcctttctaccacctaaaacaagcagccaaaatgaatgttcagcaatggctctgtgacaattggaaatataagcaaaacagaagaaaaataagtattacatctgcaaatcttatctgtcgtggcctaggaggtttaacattattctcctttggctgaattgaggcccagggagtttgtttcttcgactgcaattgaattccaagaaaagatggcactggtggtttgcttgttacggatggtaaagtgcgagaaagccaagattctgaaggtgatcttgggactggtaatgggagtagagattgcaaaggcatatcccttttggaaacactactatcttccagatgaccagaagttttcccatcatccaaattcactgatcttaacttttcagaaggtgctaacaacgtgcattctgtaacttcagagaccctttctgtcaatggatcattatcttcacctttcccaatagggtttttcccgacaatctgttctccaagctgagagccacacccaccagcatccagtgatgtccttgaatccagtaacagaaccgagtggctagtttctgagtcaatatctccacggtgatccattgattctacatgcactggtctatccagccctgagctaatggagcttgacccctttaaactactgcggtctgatccaagcaatgaaccacgatcatggtctcttccaagtgagctggaaccattactactactcattttgtcttcttttacccctgttccaaaagactcatctgccttactcgatgatgacaggacaacatccctgtaatagggagacataccaccacctgcggaatgatggaatggtgaagacccattgcccgcctgcgagtcactccagaacgtcagctggtttgattcacttgtcagcttgctcctcccatcctctcctggacgaacatacttctgctctaatttgtgcttgtatacatcctcccaggactgctgcaacacaatatacagtgagatgttactcatccctagcactaataacaagtagcataaattctgaactcatgaaatggactgtgtaacatgtatctgcatcagtaccccgttggaagcacacccaagatgcttgttttgtgagctccgggcaagcggactcggcgcccctcgtcccctgcctttggatgcgaactcccggactctcccattcccccgcggcttgccacgcttcatcgcaggcattggattcagaagtaacaatgaacccttcacacagagactagggagcaagccacatcccttggaggcaaaaccccgggtgctatgcacatcatagtcatcgtcgtcgtcttcatcttcctgctcctcacgtctgggatagctgcaagacaaataattgggaggcaaatgctggtaggggagctggacgggcgtcctcctcccgggatcatcgccactgcttccactcgcgttagacccagctgcacgcgcaagctcgcggccagaattgctcgtggcgctggctgccccggccttccggaaggtgtactgcggggagcctatggccaccgcctgcgcagccgggaggaatctatccatcatgatgccgcgtacgcctgcctcggcgccggcggcggcacgggaggtgggctctggcatgccgctgaggccgctgacgctgcagttcacggtgaaggactccgtcctggagagcgtgtcgagcgcgtccgagaacctctcctcatcgtcgtcgtcgtcatctcccttccgcagtaccgccgccacggacaccacctgcttctccgtcacttccttcttcgcctgtaacaccgccgcctccgccacctgcgccctcttctcatcacgcgccggcgccggcgccggagcgccagtccgggaacaggcgggggacgcgtccacgccatggagtatccccacatagtgctccccgagggcgtcgtggtatgggctcccgtcgatctcatcctccacgccgtgctccagcggctgaggatgggacgcggtcgtgggcgacggcggcgcgcggcgggtgcggacgctctttggctgcccgggccgctgctcccagacgaagggcaccgcgccggggtggcggacggggccggagttgaggtcggccttgtggtagggcagcgcgtcggcgtggcgcaccgaccggagcggcgcccccaggtcgatccgcttgcccccctccgccatcagacgatccgctcgcatcgctcacaaactacacagcgaagaggaggcgaagcagggggggacgaattcgtccgattgcttcggccgccgcggacgggagataggatctgcggcacggcgtgtggatggcggcgggcgaacactagaaaaggagaacgcactgcggtttcggtgcggtgcgagcttacttgctctactcgcggcggtcgtggggcaaacagatcagccgccagcgaagccgcctcctccactccactatagcgagtgcgagcgcgagtgcggagtgactcggcggggcgcggtgcggggggtggcggtgctcgcgcgtgaccgcgtgagtgtgcgatgttattgctacgcgtgcgacgagggacggtgacctgggggcgcgggcgggcgggtgacgactaaaaattgtagactttctgcgcgatctgcctaaaaagttgatgcgagcatggcagggggcagctacgagtatttttctactactaccatcactgtggctgccggaacatgcacggggacgggggccagggctgagctgcctcggtgcgaagcccgtggcattactgcgacggacatggacgtggccagatccgcgttcacgcttggcaggtggcggagttggcagaaactggttgccatcttggatgcctgcgtgtgaattggtcaattgggttagatctcgttttgtttggtcagttgtagcaaggaactagattcggttgggatcctgtttactataagagcaaggtcaatagtacagccagctgcttactccaattttgatccatcgcagctataggtaacattgtagccagtaaacacaataatcaagctatactactatggctcacacagtacaagaaattttattttaatctcccttctatccgcactctctctctctcctaatcccctgttctcgccggcgattgcttcttaggaactaggcatccaagctcatccatggccaaaaagatgaacaaatttatggctatatacacatccgttttgtactatacatctgctcatctacatggaaggaatcggtacaaaacaatatatacacatacgtatgctactacttcgcttaagctatctgatttttctagagaaagatgttattctattttctccatcagaaaatataaacagctcatcgtgcaggctcacgctgcccgtgtagctggggatagagcaaacgggtcaccggagccgagctcgtcgtccggcgactagcgttgagctagccttctgcacgcggaacggtggaagatagaagtgaagcaaccgggcaaaccatcaagctgattcataagcacaagacctcagaactcaatccaagctttgtgctctcttggtctctctcttctacttgctctccatggccacggtagacgagagccgcaacatcgaccgacgagggcaagggcaacgacacgatggtggcagccgtggccgaggcggacgaagttggcggcgacagctgcagtggacaaggtcggcggcagcggcatacagaggcgacgagcatggttgacaaggacgagggtagcggtggtcgtagtggacaaaggcggcagcggcggcggacgcggacgtgcgcgacgatggcggcgcggccctggacttggacgctccgacgcatgcaacggcgagtagcacgggtgcatcgcttgctacgggcgggcccacgtcctcgagccatgcgtacagccgggcgactaattagtcgcccgcttgcgccctctcccctccagctcagcagaaaatcctacatggatctcctatcgcctattattgtacgacccgataataattggtttgttggttgtggattgattcatgtttgtaattaatttagcctttaaatttcaaatcaatctagcatagaatgatgatgtgtactgctaatccgtcaggcaaacgcatagtcgttctactgctaaaatcatgccttgtttagtttcatcaatataaaaaaaacggtgtttcgtcgctgaatcaatatttctactaacatttaaaaagtttcgcaacatggacaaaccaactacattaattattaagttccaacaacttaaacattaaaaaaattataaaatcaaaacttaccatgtgcaagggagaaaacattgattttttaagataatgaaaagaatcttggtctttacatcaaagaagctacaaccgaagaaaaaaaaacagtgataggggttcataatgtcaattaccagaattactccttagcggttttctctattttctcaaaaaaaaaacactcatatccgactaaaaacgatgaaatttgaataggttttataaaaaactgaaattcaatgttatttttagtttaactgatgtaccgagtagtttgtcagttcgaacagggttgaaatctcaaaatttggcagaaaaacgaccggtttttcttcttttttttttagggaacgaccggtttttgttggttttatagtgtctggccctggacgcacatggtgatatattctatgatagtggtgatgagttaccgcgtcagtgtgaggaagaaacagtattgacatggtgagttacttggctactgcatgtaagactgttacttcaaaccataggaagacaaaactgcttgttctgtttgggattactccctccgatacaaaatagaatttaaattttgttcaaaaatgcttgttaactttgaagcattttttgtcacgtcaattatttctaatttaaatttttctcggtcatgtctctaactaccttttcactctcatccagatagtatttaataggggtacaataatcatttctcgtaaaccttaaattttacaaataacctggaacaacaataattctataacagatattgtactacttgtcaaaactcaactcgatacgccatgtaggactgtccgccgcatcaggaaaatggctgtcatggcactgtttctaacctacaacggcctaactatacgctggtaggtactgcgtcgcaacatttttcgttatcgcctagtatgagtagatacaatgtcatcttcgtcattttcatcagcacgtgcaggtcacttcagagcaaaacccctttcattgacagcatggagtgaggattgaggaccaagggtgacgagcgcgatgaattttgtggcgatcgatcgacgacactaccgagctaggggtggagaaattaataaagaatcagaatttagaaatgcccattagtccattacgttgtacatcaaggtgcatgtggttcgtttgaaaaatgaaaatcgcgctggacaagacgaggcgttgtggatcgatcgcttgaatcgtcgacgactccggcctaagcaaccagatgaaaagtggtgcgttcaataggctgttgactaataaccagtagttgactaaaaaaaaaagagaaaccaaatgcatctctccctcatccatcggttgcacagctggaggcttgcagcatattaataccgagactgtctatatatttaccgataaattatttttttcaaatataattatagtgtaattatattgtatatgatatttttttgaacgatacggtatatgatatataattacagtataatatacgtgtaactacgctataacgggatgtaattttgaaaaaatcgcgttagcacgcaacgataatactaacacgctgctcgcacggagcaaagtatgtgggatctgtctctcacacgttaaggtggagttattattcaatcactctgttgagaacaagcccgcaagatcgttgcctcctgaatctgccgccaaagcatgagccattggccaattgcacgttgcatctgtcgcctgcgaacgtcaaacaaacagaatcacgtatccggaggttaatccaacggttaacaaaatcgataaatttcgaggaggaaatttgtcgacacacatctatcgaaaccgatcggcaacacgcgtcacctgtgttcatgcccggcggttcactcgagcggcattgcaattgcagcaagctagcccggcaggaaaaggaccaggcacaccttgcatgagtgccccgcgggtcaccgcggtctcgcccatgtgtgacggtgtgactgtgtgagccgatcgattcggcacgtacgtacgctgtacgcccgcgcgcacgggacgggagaaggaccatgaggagatcgaccgaccgaggtatcgtgcgcttgaatcaaccggcaaccattcgttcgctcgttaaacctgtcgggccacgcggtcccggccgccgggcgccgtccaccaccacgcatgcatcccgttcccgtcccggcgtcccgcccccgccccgtgagcccacccactgtccgttccacctctcgtcgcagcgccggacgcctccgtcttctgttctactgccaggtctgggttcttcttcagcagtgtccggtagtttcggttgccccaccgtcgggtacgtacgtctgtgagttgtcatgggaataaacagctctgcgcctagtctgcctagtggtgcaccggtactactggtaccacacggagagagagagagagagagagagagaatttactctgcttttctcaaggagcacggaccgggcgaaaccgatccgtgcatgcgaagtgtgaactcctcccccgagttcaagtcaccctgtatttttatcctcaagtcaccgtgtatttcaccggggcgaaaccgatccgtcgatccgtgcgtgtgaactctcctcttttgaagtcatcgtgtacgctacatcacggtcgttgtacaaaacgtagtctttctacaaggagtttgctcgagtttcacgagagggaaaagaaattggtcgacatgcttcgttttttgccttgattatcaggtactgttcgtgttccctgatctcgaggaagaaagttttatgataccccctgtctcttaggttcgaagcaatatgaggcccggcgactgttggggctctagatctctccagcctgtgatcatgctgcaattaaaagggtcatagactcttccttgtcacgaaataagtatttcattttcctttttttttcctaacttttgtttgcagacgccgcatgtgccaacttagcaaatactacttcctcgacccaatgtagtagtctgtagtactacttcctcgacccaatgttgtttaggccctgtttagtacctaaatttttttctcaaaaacattacatcgaatctttgatacatgtatgaaacattaaatatagataaataaaaaactaattatacagttatggaggaaatcgagagacgaatcttttgagcctaattagttcatgattagccataaatgctacagtaaactacatgtactaatgatgaattaattaagcttaaaagattcgtctcatggtttacaggcgagttatgaaattagtttttttattcgtgtccaaaaagcctttccgacatccgatcaaatatctgatgtgacacctaaaaattttcttttcacgaattaaacaagccctaattgtatcagacaacaaattcattactaaatcactaaccaattttgcgttgtacaatgtcatttaaaagtgacaggaacatgcccattcagatttcttgtacttgaacctgcctattcgggtttaagtccctgactcgagacgtgtgtgtttgatattctctcagtgaaaagcgatacagtgtcgacataaaggtgttttcactatcttaagacatgccaatctatgtcttatatgaatagagcatgagtgcgtgcgtgcaaggaaacagatgacatgatccatgatgcattgtatcagcccatatggaataagtgtactatgtctccctcaatttatgccctggttgaattggatccctcaaccgcaaaattgggtatagcccgtcctccaactcataaaaccattgcaaatcaactcttcggatggtttgagagacggtttcgtccgacgtggcatccttaaccccttgactagctgaggcagcacatgggccccaatgttagtgccttgtagtacccaaagtctactttacctcccctgcattcttccttctccagccgatctcctgttcgtgcctatgcactgtagtgccgcctctccttccaaattagttgcagaaatcgattcctctcgatctcctatcctttcccccaccaagaaaaccccatcaatattcgtgttaaatcctgcgaatttggttcgttcttatcctaacaaactcaagattaagcctagtttcctatcgtcaaatcccgtttctagcctggtctccctctcctccacctatgtatagcttgcccaaggtctctcttccaattccaacaaccctagtccaagttcttcccatgccctagctgccttcctgcgcttgctctctcttcgccgaaggccaccgctccagtcgagccgcgtcgccacatccgtcgttgcctaaggtggctatcgccaccgtcgggtttgcaagacgaaggagaagcttggctgcaccttcgcttcgcttggacatcgccgaaacaccgccgtcgacatcaacccgagggcactgccttttcaagctcgctgtcggccagcggccactcttgtcgccgctcgtcatcgtaattgcgtcgataaggatcgtcgtattcccctcttctcacatgtgccctcgattttctccaccgcacccttgttcactgtcgcgccatggccaccgccgcgcaccaccaccgcctttacaaggcatttacatatggggtccacgtgctgacttagcaagtcaacggagtcacatgccacatcggacataattgtcccccaaaccgtccgacgagttgatttgcaatggttttatgagttggaggatagattatacacggttttgcggttgagggacacgacttaaacaagggcatgagttaaggtagtaaaaatagacttatttcattccttatagctaaatacacctatgtctgtcggcctcaagcccacaacgagtaatacctactgccacgtctttaaataggccaggccgtctttcattttcagcccagaatctgggtcacgaatctagtttggccctgatacttcaactcgactgaaaaggaataagttcatctgaggtcccttaacttatcagcgaatccgattttcgtccttcaactagaaaaccagatacaacaagtccctcaactgtcaaaatcggtgcagattatacccctcggcggtttggacggctgttttgactgacgtggcgcctacgtggctaatttgacttggtctttgtctgatgtggcgttgacgtggcgcttacgtggcaatttgatccggaaaaataaaaaactcttcggacgtatgtcagtttcacatagaaattaattaaaaaatattggggcccacatgggccccacctgtcatcctcagccctcatcttcttcctcctctctgcttcgctcgccgctctcctctacttctaccgcgcgctcccttgcacgccaccaaccatccatcgcttccaaaaacccaattgaattcaaccgcactgcgccaacaacgcgcgcgcgcgagagcgagcataacacgaacggaaaccagccatgaagcggtagcggtgacatactgacattagcttgggtggagcgtgcgaggagcacgaggcggtggtgagggagctgacgcgcaggcacgagctgacgacgtgattgcgggcaggggcaggggcaggtcgaggccaccgccacattcatcctcggggaggtctcccgtgccttcatcatctgcctctccatcatggccagcgcctccccgtctacctcgccgccgcggctagatgagacgccgccgccggccgactcggccgtctccgtgggcgcctcgccgccaccactaccaccacgcgcggcaagagaggacaacgtcccgcgaaagtgagttcttcgcacgtgctgtactactggaagcaaaaataaatgccgcagaatgtcacggtctcacgtctcaccgcaacagattcaagcgaggtagagagaaagagagagagttggagaagacttggagaggaggaagaagaagaagaacagagaggagagcagaaaagaacaagcagagagattggaattagattgaattgtattgtttacatgattcgatccccttttctctctaacctgccggcttatatagtaatgcactaacaagcctctctccctgacagtggcccagcctctatctactgggtccacacactcttaggaaaacggatactgggttgtgcctcacgcttggatcgcctaacaggctgggccgctgcagtttgatttgaatccagcttcagagaacttgccgccgtgacattccctccaccttgagacgaagcttgtccccaagcttcagattgaggaaaacgaagacgcagctcttgagcattctcccatgtgacaacatgaggatcatcccttgactgaatcctgggcaaagaaggatacagtgattcactgggcgccaaagctttcttgagttgggaaacatggatgacaggatgaatcagactagtggccggcaaagccaatttataagccacttctccaactttggccagaaccaggcatgttctggaacaggtaatggttgtaacattccagggtatttgacatgttctgactttgcttgctgacagatagaacaagaattcacaaactgcatcacagtagaacgtaagtgaggccaagcaaacaactgtttaacccgttgataagtgacatgtataccagaatgaccccctactggtgcagtgtgaaggttggccaaaatcttttgttgaacctgaacattgttaccaatccacattatgttcttaaagtaaagaacaccatccttcagagtgaagtctggaacagcagctggactaatacacaatgtttgaaccttactagaagcctcaggatcagacatatagccatcaaccacctcttgaatccagttaggaataactgaggatatagcagtaagttcaaacactttatcagcagatggacagcgcgataaagcatcagcagctccattttcagtgcctttcttgtaaatgattttataccgcaagccaagcagtttagttaacgctttatgttgccacggagtagtgagtcgttgatcatccaaaaaagatagactgcgatgatctgttctgataaaaaactctgcatgggcgccaatgatccacagctaacatgatagccaagctttctttctcataagtagacaacccttgatggcggggacccaaagctctactcaaaaaggcaacaggatgatttttctgcattaatactgctccaatccctttatcagaggcatctgtttctacaataaaaggttcattgaaatctggcatcgataatactggagcagtgattaaggcatgcttcagagcttgaaaagcctgttcagtttcagcagtccaaatgtacagttggcccttcctcaacagattagttaatggtttactgagaagtccataatgtcgcacaaatttctggtaataaccagctaaacccagaaaaccacgtaactccttaacagaggtaggggtaggccaattgctgacagcctgaattttatcttcatcagtcgaaactccattaggactcataatgtgacccaagtaagccaatctttgttgagcaaaggagcatttgctcttcttgactttgagctgatgtgtagtcaagatctgcaagactatctgaagatgcttgacatgctcaggaagagtcttgctataaatcaaaatatcatcaacaaaaacaagaacaaatcttctcaacaaaggagacagaatgctgttcatgcaactctgaaatgtggctggtgcactagtgagaccaaagggcatgactctgaattcaaaatggccatgatgagttttaaacgctgttttgtgttcatcaactgactgcattcgaatctgatgatacccagctcggagatcaagtttggtaaaccactgagctcgtgacaactcatcaagtaactcatcaataatggaaaagaatttttgtccttatagtaaaaccattaatatgtgggtattcgcaccaaaaaggcagtgtaccatccttttttttcactaccaaacctggtgatgaaaaagactagacctaggctaaattattccttttgttaacatctctttaacctgcatttcaatctcatccttttgggcaggtgtataccgatatggtctgacattcactggcattgctccaggaagaagaggaattgcatgatcaaacattcttgaaggaggtaatccagaaggatcctcaaatacatgggcaaattgagaaagcacttgttgaacgacagaaggaatggattcctgttctgaagtttcagagacagcacataactgaatgaggtgagagattgcttgtctgtccttcaacttctgaaactgctgagaagaaagccgtgcacattgctcaatttctgacacaattccttgtaatgtcacagattgatttttccaagaaattgtcaaagttttctttacccaatccacttgcataggactatgatgcattaaccaatccattcctaatatcatgtcatagcttcccaaattgaggaccttaaaattagtgcagaagacccatccctgagttatccattcacaattaggcacataagccaaacaagagaggattgaaccattggccactttcaccatagttttagcagttaaaggaaatacaccatcaattgcctgagccacatgagcactgataaaactagctgtaatgccagaatcaatacctcctttccttgtatatatcccaacatgcgcatacatcccacagattcagaaccatgcaaagcctgaactgatattgccattaacccttgactgtctacagcttcagtgccatcaacagaaacttgatctgacattgaatcaagctgcaatgtcgaaattaattcctgaactgcatgcaattgcactgtattagcacacttatgagtgggagaccatttctctgcacagatataacacaatccttgagctctgcgttaagcttcagaacagaaattttgtcagaactgtttccaatcttagaattattagcagctttgcgctcttctgttcgcatcatactgccaccagataacccacgattaggcggcaagggcaaggtcaaagcactcttgtaagcaggatttggtcggaactgcaacccagagtcactcttttttagatttgaagctgacaccgtagcagattccataattacttcctcttgcaaagaagcaattgccaatgttgtctccaaatctttgggctgttgaataagtactgcattcataatctcccgaagcaatccctcagtaaaacgatgagttagatatctcatattcaaatctgggtcataagctaaaagttgattcatcaactcatcaaacttttcataatactcccaaaccgagcccaattgtttaatgctgtccatttgtctaataagtgtttcatgcttgtctctatcaaacttagcagacactgctacacaaaaattctcccaaattggaaacctaacatgagccttagaggaacgcaaccaagatactgctcttcctgagaagtaaatggttgctattctaacccaaagccctgggaaagtgttattcacatcaaaataatgctcacatctcattctccaatccacaggatctgaaccatcaaacttagggaaatctaatttaggaaccctatggttatactggcgcccaaactgatccccatcacaatccccattcccgaactcaaattgctcaaaatttttcagagatgtggaaggagattcatacgtacccttgaccggagtcgggcccagggtggttgccactcccagtgcccttccccggtgttcatgaacttgtaggcggccactggccatcttgcttccgccttcagccgcagcagccgcttgagatggaatcggcggcgtaggcagcaacggcgccttcctttcctcgtctgtcaacggaactcgaggggaagacgtcgttgaagaagtttggttcaacttgttgacaagatccagttgttggtgaagttcgccgactgactccatctgtggcctccagtgactcacgccttggt

SEQ ID NO: 7411 - DNA, 9857 bp, Oryza sativa
tccggcccatcaaagcttttccatccgctcgcggatattctcggcccaaacctgctcggcccgatccgtcgccaacaagagcaaggcacgaaaccgcaacccttccgacctcaccgtctcaccgccgcatcccgctcgccggtcaccggctagacgccgccgtcgcgcgggctcctgggttgccgtgtctccatcgcttccttgttggcctgttcctgcgagcttcgccctctggcttcctccctgttcgggatccgggatcgtgtgtctgcctctcggctcgctgcgccgccgccgccgccggctcgtcccgtctgtgtgtgtgtttgtgcaggtcagtgttattttgtaattttactacgagctcagattcgtatacgttttaattttgtgtgtatgtgctactattcaacttgcatctgttcaagcgggtgacagtgttatgctgttgtacattagcattgtgcatttatgcatgcattttgtttgagcattaatttgtgcccgattcagtactagttttcctgttagtatttaccttttgtctctgactgttctaggattctggcttaaaagggataatctatgccgtcgaaatcgtggcatcagttgtcattcaattcaatccccttgttgattcatgtgcttgcagttgaaattggagtaaatatacaatgaggctgttgaaagcggatcagttgttcaggaaagtcattgacggcgggtggagaaagcaatctcgactgcttgggcttgacgttggtagtaagtatgttgggctggctgtttccgacgacaaaaataggatcgcattgcctctaaggtatgcacttcaaactattgtagctgaatattgtgttccttgatccaaaggtttcactgagatagtgagatgtttccagaacatatttagcacaagtgattccagtgtgtccataaaaattagaacatcactttctatgtgatgatttaaatgcaggcggttctatattccattcctctcatggattagtaggaatgttgagtttccaactcacatggattagtaggaatgttgagtttccaactcatttcaatggatcggcattttttgttgtacttcattcaaatcattatcatgttggattggaatcttccaactatcagaatttgtttcagtttgtatggtctctggcttttgtaagacagtctattattgtgctgtgtctgttgtattaggtccttctctttgattaattcgactatactaaacttcggtttgttagaaaataactgtagttgccttcaaactttaaggaaaattatttgcaatttacaatatatcgatacacaagatcttatccctactatcatagtgtacctttattatttttaaaaatattagtctttaacatatttaagccttataaggcttttcttcacgagaaattcttcacttaccattgttaagatggacggactgcacttggctaaagctgatatccttttacctacctaagcactcagacagagtggatctagatttgctgaagtatgcgtttatctagaattttgtggtcattgtctgcactgctagcataaggttatctcaggataacacccctgttttatcagatattgactctcttgaatttgcaacaatccacctgcctacctggttttttgtggccaatactatgatagtttagtgatgggatatatgatctgcatgcattcccttaaagaaatggattttcctattgggattaacaattgcattgtctcctacagtgtattgagcaggacaaagacaaacatcagcttgatggcggatgatttcgtaactttggtatgctgaatatgtttactgacatttaaattctggagtaatcagattgtagaatcacttaccaaaagatcgagttcttaatatgccatgtaacatcatcctacatcagatcgagtgcttaatgtgccatgtcacatcatcctgcatggctgcatcgcatgcctgcatactgcacaagcaattttgtagcatgtgtgttgaggttacgatgcatttatggaagccagggttacaggccttctctaatatgctgttctttactgctcaatttactcatgtcatttacatttccaaaatactcgagggtgacattgtccacaaagaaatcataaatgatttagcaatagaagttacagacagctcatgatgcatatattctttcattttagattctggtgaacatttaaaagcactcatgttttgctatttttcatacatggaagccaattccttttctttgtttttgtgaataggtctcaaaatactcccttgcaggctttgttgtcggctatccgttcaacttgcagggtcaatctagtccaaatgtaaagtgctcttgtgctgggagcctgggatagtgcacctcattttctcactatatgtttggtgatgtttcctttttctattaagcaggcattacaagtaaggcttcttgttggagagctctgtaaaactgggaaacttgatgatatgagttacacctattgggatgaaaattttacctcgaaggtgatggtacttttttgcccattatctctcaaacatgaaactacatattagcatggggtgcattactcatgtgaccattttatcctacttttcaagtacttttttatggtgaagtgttttgattgatctgtttatgtctccagtgtgtagaagcccttttacatcctctgaaactacatgacccagttgaaaccaaaacaatgacagataaatttgctgcggtttgcatactccaggtacatacaacaaataccaaatgacgtcattgtagacttcgttgtttcgattatgtaattattattgaaaaccagtactcatagttcatttagctgaacatctgcttagtgacattgactatcatactttgttttcctaaaaagatttttactttctgtgcagcgctacctagataatatgaacagagaattgagatctgcagataattctggaaaacagggtgacacctgagttccacaatgcatatattattctgttcggtgcacactaaaccaaagacaacggaatcagcatctgttcggtgtactgctgccttagtgtactgctgccttatgaaaaaggctgtgcagttcattgagacatgtacaaaactctgagtttatgctctcgtatacgcctgataagttttgtagatgcagacttgcagagctgacaattcgtcagctagcaagggcagcttccctgcctgcctgctagaggcaatttgttgtaggtgatgcacaagtactaggaatcttttcccccttcctttattttcttgcttatgaggccattggcaccgaaatgcctgcttatgcgcagcttgaacaatctcttccaatatgattgccgagcatgcgcgtgtgtatatgagcctctattgtgtttcgggaaaaaaaatgattgccgagccaagaagatgcaatcaggctgtcgagtcaaatcaggttgataatggcgtgctgcagccagattccatttcctatgtctgcatgcgcatgcttagacaaaattcaccgtgatgttaacaactcatgtcattcgacgacgggcagcttttgatcattgtcacatccctgatacttgtaaatcctcaataatgtttcctcagttgtgcatatccgtggcctgcaatgctccgtgcaattgttgaatctgtttccagaactgatagcgtaaggaattgtatgaccatgatccttgctgtctggttgcaaaagattgaaaattctactctacaaagcaagttaggctgacagagaatcttgtggatgggatgaggtaagttcacttatccaattagtttactactctataggagacaataggtgaagaaataggcacaagagctaatgtgcagacttgtgctgctgagatcgtttcagacttggacaaacaatgctatgtggtttacatggactgcgagtctgcaacagataaaatcaccaatctacagctgtaatctgcattgtccgtttcctagggttagcgtaaggaattttccgatgtttctcccaggatctcagtctcagtggctgagatcgctgctactacctacacatgcaaaagatcataaaattcgattctatcaagtaagttaggctcatgaggaagtttcagaatacaggtaactacacaaaggagttaaacacatcacacagcacaaaagaggagaaaaaagagagaaaattctgaggtggtaggcacatcacagcacagcaattaagcatgaaacataaggggagcaagcaggtcggcgcagccacttgtcaagttaacatagctctcacgtatgcctgcctgcttccatgccaaaagtctactacactacagctcaagctactatgtatctgcctatctcaagagcaggagacagtggtgagcacagcacgaaaccaaggtagccgaaccatgcaaagtcaacacagttgacaaccagcaatagctttgtgcaaaagagatttggcagccaaggaaagacaggtcaggagctcacatcaccattggaagtcagccactgatcgtaccgttgttatttttagggagccgtactgtctaatcagggggagaagagctgatgaaggtgtatactggcacgttggagatggcttgaaggtaaagaagacggctggttcacggtaggtgattcggtcgagcagccaacggttttggaccggaatgcacgagctagctcgatcggcattctcccttttattgtttatatattttcccggttgtttgtttgtttgttattccggcgatttcttgaccagagataagcagtcgtttatttcaaggtctgagtctttgacaatttgtttgtgtgttgattttgttttggaaattgtagactttgactgaaaagaacgaggttaattaatctcgtaatccagtcagagatgagtaattggcatagcgacggcttgcatgaaattagaagttttgttaatttcatattagcaactaatacgatctcctgcctgtttgcactttgcaggaggaaaattcagcaagagtaggaattggaggcagaagttaagcacaatgtagcatatatggagttatggatcaggaacacgtactctccaaaatgatattcagccacatatgcatagtttgtcctatttaagcttccatgaatactaaatataatatattttttcggtgcctacgaaaataatcaaataacgacccctgttggagtattagacaaaactcatacgtggttagtccatactacgtgcgcattattggctgatggccatagcaatagcagaacatgtccatacactgtacatgaaaatcgtgatcgaactctgttccctttactgttgggcacctgcagctgcagtatctactataccaccaaacagtactacccgtctgcatccaacgtgcaaacttcggtttgtccaccaccgggacatgtacctcgtgtgacagcgacaccaccaagcgatcgatcgagagcacgcttgcggtgaggacgtgaggtcgctcgcccggatgagtacaggggctcgaggccaaggagggggggaaccaaacgtgtgacgggaacagcaacgtctcgtgggggcagccccggtcgagccgaggcgcgctggcgctagctagagtccgtagcgtttggtgatcgatccgacggcctgtctccccgcgcccacgtcgtcacgcggtgagacgcgggcgctcggtccacacacgcgcgcgcgtacgtgcgtgcgccatggccaccatcgatcgcggccaccggctgggtgatagccggtgcgaggggaaatatccggaaggaggctacttcctctgtttcataatgtaagtcattttagcatttttcatatttatattgatggtaatgaatctagatagatatatatgtctagattcattaccatcaatataaatgtgggaaatgctagaataacttacattgtgaaacggaggaagtactatattacgagatctcattcgagataatatcagatatattgatacgatgttaaatctagtatcccatactgaaccatacccgttaggtctcagttgataccttattagtaacagaccgacacctatcgatactaaactttttacccattggtataaaccaatacccattagctatcagatctagccgagagaaatgagagaagaaaggatggagatggtagaactatgatgctctccatcctccctcaacacgaaatgaatatgacaacgatgtttcccatcatctctctgcggagggcccgccatagacgaggccgacacggagcgacctcccgtccgattcacccaccatccctcatccccccccccaccctccccccatttcccctcccactcgaagagcaacgcgtatagcagagaaggtgttcggtgcaacgtaaaaattgggtggcgaccaaggcgagcacgtggcgtcatggagcgagggcatgaggaggatgagtggggtggagcgaatcgtcacgcgaaggataccttcctatttcctaatgcatgggtacataatcccaatatatagcttcatttgttttttttttctcccaaaacaaattgagtctggatttgaaattttgtcttagcaacttaggaagaaggaacttgaggtttttcaattcttctctcgcatgtccatgcagtattcgaatcgatcaagcttaaaggtcggttgtggtcaagcgtaggcgtcgctcatctaggagtcttgttgggaggatcgtagtactcttttgatactttgccagtttcggtcaatggtttcggagtctttactccctttagagttttcttcttccctagtcgtttccttgtgttcccttaacaattgtctctggctgttgtattgtgtaactgaatttcggctttattctaatatattgacgtgtatttttttcgcgtttgcgaaagaaacgacttgaaattttgtggatgttattttaataggaactttttaaaattttagagagcttttataacatggtccacggagtttttcatttattcgatactccgtattattttttaccggatattttcccgggaggagaccctcgcgggcttttgtcatgccgctgtcccttggtcccgaggccgcagagccgtgctgtcccctccctccgatccctctaagatcgatcggtcgctcgaggccggctacgttagtctcgcctcgatcgatcggtacgggtacactcactggctcaccccactgcaaaaaagtcaggattcgacgcttcggccgattatcaccttgcgatcgatcgacaactcgggggttgtttcacgtgtacgtgttgagtccccgttcacgcgtggactagtcaggaacaggatacactacgtactacgtacactcagtggccttgacaatcagagacaatgtactaagccattcgatcacacctgcatgctgatcagcgagtcgatctacgactctctcgcccgttcgtcgtcgtgaccatggtggattaattagacgtgcaaattaataaggcgtcgctgtccagggtgccgggtgtcgacggcgacccgtggggacgagcggtcgtaccggagagagaccgtgccgcgcgctccgctccgcgcggagcgtggcgtggcgtgctgccgtccatgcacacggcgacgacgacgataggtgcatgcacgcacgcacgcacgcgagaggcgctaagctatagcccgctgctgcgaacatcgcgcgcgctcccgcggcggcggcgcggtggtattcggtcttcacgtcatggtcgatcgcgcgcccgacaccgccacgtgaacgatacgtcctgccgcgttccgtgtgtccatctctcgtacgtagcgccagcgtgcgcgtgcgtagcataggcggcggtagacggcgtacgtcgccgtatagcagcgcgcccgctcgcgcgtctcgcgtacgtcgcctcatcgcgtgcgtgtgtggatttagctagtctcggtagctcgatcggtctcgcgccgaatcaatcggagtcgtagcgtggcgcgtcacgcacgtagcggtagccgtgtgtctgggtccatcggacacgatcgatcacacgatatatgctactatagagaagctagatgcggacggtcgggctcggccatctttcgttttcacggggcgtcgttttgatcaggattcggttcggacctgacgacatgggctagctactacacagtagccgctaggcgtggatcgaaggatatctttgatggatgctataccgtgctacgagctagcgataggattgggggagttgtgatgggcaggaatgaaaagggcgtcttctttgagcgtagaggaatcaggcgtgtctgccgacagggtccaagcttgatctttgttaatgcgacctcaaattgtagcctgtagaggctggttcgtcttgctaatgttaactgagacatgcaggacgcgatagcatttgccgatttgcgtgcatcggtgcatgacaatacctctctctggtctggcttcgctggcaatgcttggctattgacgttaccaacgccctaacgataaggatgctctcttaattctttacactttgagatagagtacaatttttttttagaacatgagatagagtacatgacttctcaatgtaagactctgttcaagataagttcatctgacattagacggatgatgggtagagcgtcacctcaacttacaaccagggttttaaatctctcgttatagctgtcgctatctcccgctatagctgtttgagaagggttctagctatttactctcatgtacaatttagccgctatatctttatttagcccgctatagctgccgctatagctatttgagaagctaatcactaaatgccttagcctgctatttaaaacattgcttacaacacgttctttgaggactcgatgtcttccccctgcgtctacaacccggagctttttccttgcgctttagcggcggccaaccaaaaatgtgcaaccgtgaaataggcagttacaccgtactatgtgttatgtctacagagagattgaaaacaaatcaccatatcttgtcggagtacaagataggactggcctccctctcaccctgtcagaagcttcgtttcaagtatggtgagagtcctctcgcggcggttacagttaagatcaaaattggaaagggttcaaccccttcgttctggtggtactggcaccaattgttggaaataaacactggcgtatttgaggggatgtttttcacggtgaacactatggtcaatcacatcgtgcaagaagggaagctttggttgtagcgaaacctagtcccttatgaattccttttggcagttagaattccttatgaattctctttttccttgttgctttaagctgatcggttgcctttctttcttagttagcctagtgtgctcttcccctctcccggtaaggcggtaacccctaggacttgacttagtgggtggcagttataaaaactgttttttcttgctaatatatcgttgtgcaagccttgtacgggtttaaagaaatactccctccatttattttttatagtcatatttcgaaatctgaaaattttatttttgattggcatatttcaatccaacaacctatcctcttaatgattttgtcaaatttaatgcgtgactctccattcttccacacatgattggctatatgagcattgagaaatgtaaatattaattaatcgcttgtttacgaggaatgactagtagcatgtttaaatggatgataagtagaattacttattcttggtctatgtgtcagatgaaatatgactatcaaaagtagatgg

SEQ ID NO: 7412 - DNA, 1171 bp, Oryza sativa
cctctcccacctcccaagttaacagcatgctcccccgcctccaccctcagttcaaactcctccacctacaccccaatctgctctggtagaacaagtgcacatgccagatggtactacatccgaaccgaagtctaatcctttggaacctcgtcgtataattccaaagttgatatcgacatacgacccaaagaagattgacaaggataaggagaagttcatgttttcagctttcaggaattctgagaagagaaaagaatttgctcacgtcttgtcagactcccagaagtcagtactagcggcccaagatgaagtgcaatcctggttatctgccgatgtgcctgaaacttatgagtatggcaagccattcttgccaacttatcttatgaacaagctaccatgggaaatgagggtaatgcacgaatggtatatgaaggcatctaggaaaggtctcggtttcataagcgtcgccgtctcggaaggcgctttcatgagtggtcctaatgggatattttttatctctttcccagacctttacgccctctacaagctagataaaatggatgttaatctcgttgtggcgttctgtctgtaagtctgaactctttattacatgttacacgtatcattccaaacaaataaaccaaatctcatttcttctttattcattgtacagtatgcaattccacgaagctgatagaactggagcaaaggttggatacgtcgatccaacaagaatatgcaaaacacgacacaccgtagagctgagagaggactgcgagcaattggttggcaagacccctgaagaaaaggaagaatatgtgaagacattgcacaagaggaagaagctagaagtagcaacatacttggcaatagcaatgttggcgcacgccgacaaagatgtcttaatggtcccgtaccagttcacgtaagctttctcttctttttgtttaattaatttatcttcttcggaattttctgtctccaataagcctatcttatatgcagagaccactacatattattccttgtatatccgaaagaccaattgatcatatcattggaccccgcacactatgacaaggagacatttatggaattcctcactattttgaatttgtaagtgataaacatttcattactataaattgtttaggtcgatcaccagtcttct

SEQ ID NO: 7413 - DNA, 12236 bp, Oryza sativa
ctcaccataattgcagctggaataggaatgaagaagtaaagatagactagtttctttggatacaaaaagatgtcaagaaggataattgcattagcagcagcacttgcaccctgattcacatgaatataataggttatgttttgggtgtaacaagtaataacttagtactagtacaggtagagatggcaacgggtaatccccgctggggaatacaacccatccctatccctgcgggccacaaatttccccaccctcgtaaactgcaatcaggaacaattttcccatcccaccccacgcggggaattaatcctcatggagggcccgtttaaaacaacatatacatctcaaatcgaaatgtaattaacaaataatatccacactttatataaatatactagcatatatccactaatccacgtgacaacaacacaagatcttcatccactaattatggctcgattggacctttaggcctacataatttgcaatggacttggatccctatcccgatttttaatcgggtatcctcacgaaggacagggatgggcaacagaagatcatccccgcccatgctagacccaagggggcataagtttttccacatttaatttcccgtggagaatcagttgcaaccatccccgtcccctgtggaagaattccctgtgggggaacagggaacgaggctccactgacatctctgagtacagtagcaaataggatatccctttgttggctatatatacattaaattaaactatcatagcgattcaaatttgcagtactgctttttaattaattatttgggtgtataagatgaacacataataggtaggtgggaaaaaatcgctgccatcagactactgatgtgattatgtcataataatgcttgttttctgaataccagcgcgaaataaagtgaactgcaagaacaagaaatcaataaatcacatacaagcgcaggagttcttgaattgtcccatccgccataaaactgcaaaataaatattacatattagattagggagattattgcaaaatcataaatattgaacccttttcatgcaggatatgtcccacacgagtgccaataccaagaggctggttggcatctagtagctagcagcgaactaccaggtactagcattttcacaggttagcttttcttaactagaaatcacgttgacataggattttgtttcagaattggatgacataggacatcctggtccaggattagaaatcctggttccctgatgcataagaattcacatcatatccaggcttacctgtcttcgtggagctaggaaggctttctctagcaagaagaatgcagatccagcaagtgctcctgctacgtacaacttcagtagaaaagcaggaccaaacatgttggaaatctgattcacaaaggaaaaaaaaagcaattcagcacatgcaatataagtaataaatggccaatagaaaatcagagtacaatatatatactagtcccttcatttggagaacgaatcttaactacactaaacatgataaatagaaatactaaaattagaagggaatagttatatgctattgattttgtttttataaaatggataaaccgtatctagtacattcaaaccatggtagacattgaattcccatggcaaatcattgcaggatctctctacctagctggctatttcatcagacctgaaaaacagcctcacatcttctcctgcatggtgccttcatcagtcatcaatacgtacaactctgattggctcggttgaataactagcacaggaaatgtcaataacctctctgtgtgtctctggactgatggaggggggcttggcaatgaagtattataactcttcattacatgtgacctttgcaagaaactaatgaaacaaagaattgttttacaaacatcaagccaattttaattttttttactagagaaaaaatataatcaaaatttgattggtcaaattcaataatgtcaaaataaagaaaaattgctagatcaaattcaatactccactaccaaatatattactctttcttaattttacacggtcaagttcacccagcatgaatcatgccaacaagttgatggtaattcagacttgcttgaaatattcaacaaaagatgctggaattcagatgagcatatattatagcaacaagatcatgtcttggatcaagtgttagataatgtttttagtctacactcaacttatgattctttgactgatttgataattcaaaacagctataattcaggtgtttcagaaagcaaactagtaatagtaatgatttccactatattgacaagtcaccatatccattcctttgtttctatttaggatttgagaatgcataaagttgcacataggtgcatagaaggacaaactaatcctttttacttgtcgtttaggacatcaacatagtcaccaatgcacttgtttgatcattgttttttttaatcatatatttataaagattatcgaagataactacatgaaaatcatgaaaatctgctgatgtcatttgcacacattaaatcttaatattttgatattaaaatgttatctatttgataatggagggagtacagacttctgcattgtaataacaagagagaatggtgagcagctgaacatcttacacttgatccgaagaagtagagaccgatcatattgctgatgaggtgaccactctctgcgtggctgaaggcattcgtgagcaacgtgtgtaacctcccgcttttgaagttatcaagagaaatctgctcatcaaacaataatcaagccacacttaatcaaccacttctgaaacaaaagcagaagctcttcgactgatcactaaccataaaatgcctcctcatgaagctaggatcagccaggtgccatagcatgaacacgcccacattggcgcccacgagcatcaacactgccccatcggcggacggcaaccacttcgtccttcattgaacatcaaaaccaacccaaaaaaaaatcactaaaccaccacgaaaatcccccatttcaaaccatacgaaccgaaacctcaccaggacacgccgctaaggaacatggacgaggaggggaaccaccccgaggacctgcgccgctgcagcgagaagagctcgagcgagcccgcctcgcgcgcggccatcagccaccgcgccgcggcggcccgggcggctgccgccgccgccgcggccgccgccgcgctcaccggcaggagcgagccagtgctgcgccatagggggaggcgggagggcgaggcggccgcgggactggatggggcgtggaggaatcggtggggggggtttggttggggtttaggtctcggggcggcgcggaggcgtagggcttgctgcgcgaggagcgactggaactgcaggaacctcctccccgtcgccattcccgcctagctccccgccgcctactcttcgctccgccgccgtctcctccgcctcgggctttcgcggcggcgcggccggtggctttgcgctctccggttgatcagctccaatttctcaacttccggcttcgggaaggacacggaagggggaatcgctgggcctactgcttgggccgcggcccatcaaacgtccacgaccgctttccccgcacgtaggccgttgatttctcgatcgaacggctgctgctgtcgcgattgcgtagccgacgcagcgagaaggttttaagggtaggcggcgccgcggcggaggggggctcagctcgaggaggacgacggaaaccttcccggcggcgcgcgagtctcgcggggggaggagagcgatgtcgaagcggcagggtcccccgaagcatcagaaccgctacgcgtggaagcccaacctcgggcagaagatcaacgagaccgtgagtcctcgagccgcctccctctccttctttatcctctttttttcaaggcctgagtctcacggctggaatcctcgccgctgcaggagcccggcggcaggttccgtcctttgtcggagatcaccggcgtctgccagcgctgcaaggaccaaatcgactggaagagaaggtcgggagtccccttctgtagtcgtcgttaatcttagctcgtaattttagcttcttggcctctcggtccgatctgtttgtctcttcttggcagatacgggaagtacaagcctatcgttgagccggcaaaatggtaccttctcttgccctttttcgtaattatcgcactcactcgattgatggaactatggaggagtgggcagtgatggatgctgatagttctcgtttggtttttgcagtcagaagtgtgggaaacggaacgtccgacaggcgtatcacaacgtctgcacgggtgaatttcggctactccaccatgtcgtcttttgctatgatggtgttgatgttgttactgatttctctgttgcatatgctcaatgcagcttgctccaaggaccttgggatttgcgcgaagtgctgcacttgtgttaaagcgcttgtcggaaggtgatccctgcttgtttactatgttgtggtactagtattagcataaccaaatgatatcctaactttgaaacttaggtggctaacaattttctaccattttctagggatcttagtgaacaggagagtgagcgcaaggaactagaggaggtttggttgtgctatatttgaatggagattgttgtgaacgttttcttttgtgctgactattaaattattttgtaggccataagaggtgctagggagagggagaggcgcacacttcttcgccttgtgagtacttactatggcatgtttttaatgatatatctttatctgattaggtatagcgaatgtttgtcttcaagggatgcctaatcacaatatatgtttcccatgatatctgaaggcagcactgcaagaaattagaacaaagattttgtcataattgtattgtttgatttatcatttgaaaataatccccagttcaccacagtatttcgcatatacccttgaatttttcccttttatgtgtttctttggatgcatcgttattttggacaacttaaattatggagatctctaaattatgtgtattctagtattaaggtgccactgcctttgtttcgatgtccaagttgaatgaattaatattatgcaccttctcttcttgtgctattcatggtttttgttgttccaatatgtagcattaaatgtgaatagaactttgattgttttaaattcttgtacacaattgtttgctctggcatcagtggttcgtttaactgtaaggattctttacaggtctttatctggagttctattatattgctatacattaaatctgagcatgtgaatataaatggctggtccatgttctaaagtttcacctgtcttgaaacattttgacctgtaattactaattagtagtatcagttaagattgttttataccccgctccctgtagaatgtaaatatgatctgttaatttagcttttcaggtatggaaaaagaaaaacatagcatgcttgcttagaatggttgcaatatcaagatccatagtacatgagatgtactattattattattcagctttggaacatcaattcttaaacaaactggttgccaaacttttgacttgaaattgtcgagatgaaagtgcattaagattccaaattatcatggtaccttattggaactgaagccttagcttattattctaattttcattttggtaaccaaatggaaatcatttttttagaattgctggtccatttagttattcacgtgaactagtaattccatgcatatttattaacatcaacattttgttgcagatgaacaaaggtggcggggagagcggaccgtcggttccaaagattgctgacagaagtcgtgaaggggacattttccctgctgcatcccttgacgaatatgctgaacaagctagacagcaagatgattcagatgaagaagaggccagggattttgtagaagattaattttagaactcagaaaccttttcttttgcaaaaggatttatatagccttatgtggtgatttacattacatggtgggtaatcccacccactgcggaaaacaagtgtattagttttggcagatatatttccgtctatcagatgtttatcagtgtgtgctcccattccgtctgtgcttgttcaaactgaagaattggaaagtagcatatattgcggtttttccggtttacatgtcttttccccataatgcagcttatcggtgtgtccggaactccggatcagcttttttttattattattccgaggaaaagctcttctattattctcttttttaccaacttattgcgtgcatgatgcccttgaagatgttctctgttctgttcttccctccatgtcaagcgaggttgttttcttcatgtttacggttttatttagcgggctgccaaatttttcgtatacattgaaacgttaaaaagtatactattgttactaaggctgtgtttagttcacgctgaagtttggaagtttggttgaaattggtacaatgtgatagaaaagttgtgtgtgtatgaaaggttgatgtgatggaaggttgaaagtttggaaaaaaaaactttggaactaaacagggcctaagagcacccgctatggtaaagtagggtgctctctataaaacatgtacatctcagcaatagactagattaatagtaaatcacctcaatagtatgtctacataggtatctatagctctctcatgcattgcctcgtttttctctatagactatctctaatctagtagatagctttgctctctctcttcatttaatatcttccaagtaggaaaatatgctgacattgatctcttatagatagcttatagataaccattgtgggtgccctaagagcatgtccaatagcaggctataagccagctgcaaacatattttaaggagataaataaagagaaagaagagcagcaagctacagatttgtattttaaggagataaataaggagagagaagagcagcgagctacagatttgtagctagctgtagcacggactctaagacgcaatgtgtgtttgacaggtgggaccaggtattaatagtgtagtatgtaactattgtatggatgagctattagattggttatagatgaattgtagctactacttagctatactattaagcttgctctaacaggggcttccttcttgtagctcgggttcattaacccaaaaatcttgcccacgtttgctactgtcatgtcagagcatggccaggacatcaaaaccttccataacaaaacacgcaaaaacagtaaacaagtgtctcggcaattcggcatcgtccgccgcccggtgccgttgtgtgcattcgtctcccatgatcccatatcccgtcggcgtcgagacatggaccagactccctccgccagtgccgcacctgttcctcctccccctctttcaaacaaaagaaaacaaacgagatctcatccgaacagtagaacccaccacgtaacgttactctcatctcgtgccaaatcaaagcaaggcaggcaagcaagaggccgttcgagctgcggggacgatatgcaacggccggcccagtcgagatcgggagggccggagggggagtggtgcggccggcgggtgccctgcacgtgagcgacgcagccgcctgcgcccgtcacgcgcgctcccgcacgttcccgacgttgtgccctctgcctgcggccgcgtgtctcgccaaatgggccccgacaaatccaagccgctgatacacaccaatcgctttccccgaaatgccctccccaaagttggaaccctttttggttgccggcacactgcccgcaccaccggtggttggcacgggttggatatggaccagctgtgactattccggcgatcgagtggtgttcttgattataaaccctttgtgtttcaagaaccttttctttttagtttataaacccttagtacatgactgaagttttatgatgctaagcgatatttgttaaaaataaatgatgctaagcgatatgactccactagtatacgagtgttgatttaatgttaaatattatagttaacacttaagatcttaacaagaaagaaagggattgtttagtaggcggacaacggcggctatggctatgccgtcgttgtgtgcgtgcatggcactgttgatgtcgagtatagtgcagtcacaaatctagcagccgaacaaacaaaaatgataaatatgcatccgtgcattatgacagaatattttaaaaaattataacacatctaaaaacctaaaactatttaattaccaaactattcacgtgatgagatgaaaagtgctgagcagtcaactatatcgataatagactataagttttgcatggattattgccccataagcagcgatggcccatcaccgtccaaaaagaagtttttaaagtagtgatataggtttctagttagagaaaacaacaaaggtaatggtcacatcgttaaagatttcataacgatatctttattttttcggcaatagatataacggttacaaagtcatttaataaacattttagcggtaacatggttcacgtcatcttattttgcacttcaatttagcgcacaaataatacacgtggatcaaattacttggcaaccaggggcagcataaacaaagctgactccagagtgagggcattttggtaaactccggacagaaaggcaggcggagtcatccacagtccgcaccattcccccggcgctgcaagcaaaaacatgcccaaaagagcacacaaccttggctggaggcggcggcaggccgaatctccttatcagtccgggataaccccaagctctctctccccctccatccctttccccactcaccagtagccaccaccacatctcgcaaggccaaaagccctagccaccgtagtagtagctagtagctatagcaaggtagagagagcgctctagatctctctctcgcggggcgctgggcagatcgacctggcgatggcgaccaaggggaataagctcggggaggtaatgtgggagcaccggctgcaggcggcggccgtggtggcgctggtggcggccacggtggtgtcgatctccgccatcgggcccaggctcggcgccgtggtctccttcttctggccgctgctcgtctccacggggttcttcctcgtggccgtggccgtcctgctccggatctcgccgcccccctccagcaccatcgacgagtccggcaaggagctcatcgacttcgtcgccgggtgccgcccggagcaccaccccccggaggcggcggaggccgccgtggacgtgcctccggagccggagatctagaaaatcgagggtggcgggcgtggcgcgggcggccggcggaatcagcggcgcctcgtcgccgggcggcggtggggttgtgtggggtaatcgccagcatgggcccacctggaagtgcgtgccacccccggtgtacggtgcggccgtgggctctgtgttagcgtaggattccgcctccgttgtggtccggggtgtacaataccattctcaataaaaacatggcataaattcgtcctagtactactcggtatcgacttccattatgatcgcgtcttgctttgagttgatgcaacgcaggttcgctgtaacgccatgaagatgaaggcgagagtcttaagcagttaagctatacttacgctcgaagaatatgcgagtctgccaatcctcctcgagcctcaaaattctcctcttcatcccgctttagaaagctagattcactcatcgagagctgaaagcaaaagaaatggtgcaattgtaaatctcatttcgcatcattgatgttccgtgagaaaagctataaagacggaaaagagaaatggattgatagtagcgtggtagcaggatgccctttcggcgtaatcggagaccgacactctttcggtgttaaggagttgctaaaccggtcactcagccgtccagttttgctcgtacgcgacgccggttcggacggtcacggacgcgcgtttctcccatcgttgtcgccgtagtaggaccccgtcttactaattctcatctgttatcgagcggacgcaggcctgatggtcactgtcacgaggctgaacttgatacggtttttataaaggaagacgaggccgtcatgctatattctctggtgcataggtcaatgcgtctgacgtggccaccgcgtggtctggtcgggtgcttccatggtgctgacgtaatggtctctttgagctttggattccatggtgacatttcttggcacaaatgaatttagttggggcatttcttttcttgaatatgtttttttttcttgaacaggttgaagcaggttttactagctacgtagttatatgctaatgagccaattctattgattaactgacatcgagaggacgataggagaagaaggtgaccggacaccgaaaaatgcacaaacatttttgtctcgaatggatttgaatatggtcatgatggatgtgaagttctgtagttagtaaatactccatctgttctaaaaaaatgaatctagaactgtccagattcatcatatcctagtacgatatttgatttttcttttggaacgagaagaagtatgtattttccaataacttgaaagacacacatgcacacacgtcatcacgcacgcacatcacagtcacacatcctcgcaaacacgctaacacacgctcaaacagaagaggctagtggcgtaactgctacaacttttgcgcaatatctatggacattaggatttaaaaccttagaatacaagattatgcacctatgacatcactaacacatcatcgatggttcctagttagaaaactatcaataacatagcaaacatatttttgacaatgttatcctactaaattttggtgttacttatggtgcttcacagctagccaaatgctacctaaatttccaagaccaccaaatgtattttacacagtgatatcttacaaaaaatgataattttgaaaatgtccaccactaaatatagtactgcaattattaaatgttctgaaccagatttaccgaaacacgtactacttgttgtagcagtgaggactaggtgtcatacctcctattcgaccaagacacgacttcaggccttgatgggcatattcctgagtttcaaagcaggtgacaaaaaaagagttcaagttgctatggacggaaacatgttaattgggcaaatagtattcaagcttgttatagaaaggcaagcggtgcgtggaggatggagaagaagcttggcggctacgttacccagcaagaatattctcttacaagttccctagggtttctagtcctttggattatccatgtaacttcgcatgtaactaccatggctatataagccgatctaattatatagcaacacgatttatactttactgaaatagcgatcatgagtgtcatttgactcatatcaagctcatctcgttacaaggataggcgagggaaacacttcctcatctatccccattatgttcatgacgttgggtcacaacttagggaagactacgcgtcggatgtatggagaattaaaaaaaatcggacataccccagtacctaccattgttgcatgcaccgaacgaatctgccctatcgatttcatcggtgcttattcctacatgattactctcttcaccactctctctcctctatgaccactttatcaacaacctataaacaatttttcctcttaaattctttatctgatctaccatctgattacgtcgttatacttatagcaattaaatctttacaataagatgtcacatgaatatattttgattatatatatatatatatatatatatatatatatatatatatatatatatatatatatatatatatatatatatgttccaactagtgaaatttgatgtttcatgcgagggaagcaaatgtttcacatgaaattcgagtttgttgcagattttaagttttctttgttgcgatatttatttaattttaatgttgcacatggtgttgtttggatggtttaataactattttcttatgtttcacttattcatttgaaatgttgcacatggtattcttgggatatttcaacaaatgttttgtaatgtttcaacaattataagtcgatgtcatgtataatgtaaaaatattttagttaggatttaacaatattattttccttatttatttgttcttctacatgtgtaggaacatgtatacgtaaatatctagatcgttcaact

SEQ ID NO: 7414 - DNA, 39766 bp, Oryza sativa
atcatatcgttccaattttaaccaaatttttaattttggtgtgaactaaacacacccatagtatatcagtatggctaacaagttttggcatacgaaactttttacacggttggctcaatcgtggcgaagaacttgccacatgaccagctagcagcaactggtaggccattactgaacctgcacttcgtggaattgtgcagatagccgaaaaaaattctctgccggcatgtgctgaattgtgtgttcagattaatgaatccagttaggcttaactactactgatcaggataaaggtgtcaggggtctcactgatttcatgccagtaataaggctgtctagtttgactattgctgccaatgttgctttgtggaatggcatgtgcactcatggttggtgctggaaatgcaaactgtttgctgtttggtcttgttaatcagcccagcatgtggaagaacatgaccaccatgtactgtcttgatgttttcctcttggatctactcgtggcaatgattactgagcaaaggtgggaaccaacatgtgccttgatctttgcttctgcttgcttgtggcctttagatttgctgatccttgaaagatttcttgtgacgatagattctcgagaaagtgctccttgctaaaggtctcctttagaatgtactccctctgtttcatctatcccatttattctaatatttattttaaagtaagtttatttttatcatttatctaccatcgttcgcaaattgaggaatttgattccttcaatacctttatccatctaccaatactaattttctattaatgagaaatattttggtattttttccagaaaaaaaattaaatctcaattataagaaatgaactttatgtttggatagatgaagtagtaattttacatggttttcattatttcataggaattaaacttattcatgtgaaagtcctcttaaattcctcttgttccaactaagagatctaaacaggaccagaaactgctatcataatccattgaccgaccattttttttttgaagttcatcactggtccctaaatttgtaccgctgtgtcattccggtccctaaattcgcaaatcgaccgctcaggtcctcaaactcgttcaattgtgtcatcccggttcctaaacttgcagatcactcgtttaggtcctccaacttattcagttgtgtcaccccggtctctaaacttggatttaaatatcatctgggtcaaatagaatggtctaaagactttatatttaaaaataattcataactttttcatgttaactctaatgaagacaaactttatatcaaacttgtagccatcgacgcgatctacaactttatagttgatttttttatttcaagtcatttttgtcccaatatgtaattttaaaattaaaatttcaaaatctataaacatgcaacaatattttgggaccctaaacaattttaattcaaaaacttttcaattacaaagttgtaggtcgcgtcgagggctacaattttgatataaagtttgtcttcattagagttcacatgaaaaggttatgaattattttttatataaagtttttagaccgtcctgtttagagaccggtgtgacacaactgaataagttagaagacttaaacgagtgatctgcaagtttagggaccgggatgacacggttgaacaagtttgaggactaaacggtcgatttgcgagtttatggaccgggatgacacagtggtacaagtttagggaccagtgatagactttattcttttattttttttttgataaactggcagacgcatcatattttgcttggacttccgacttcttacatggacggatgcatatgcagagtacttctccggcaggctaaaaattgtcgctcgatctatgtacgcaaagcacgacgatgaagtagtcgctactggcatcgctgtctcgtggaaaatgtcagttgttttgtctacagatcgttacgcattaactcatggccactagcagtcaaacgaccctctcaaaaatgggctgacagaggcaaggggaccccctgggttaactttgtcacgttgcttctgcaacagtagtccacggtaccaccaccaccaccacgccaaaatttcttcgcattggaagcagaaatatcttcgctttccaggcttagctacgttttttcgtcgatcccctttgaaaaaccgatccgaacgtgtctgtctagtgtataccctcgagaccttgagtttcccgtttttacggagcacggtacagtggcgaggactacgaccgtgcaccagaaggaaaaagaaaaaggaaaaaaaaaactccgtccgtatcgtgtcatcagatgtgctgtcagcttcgtgcgcccttgacccatctgtagttaagcgtgtgccgcagctttcatgctttcattcaagcagcatgaatgaatgcactgcatgcagcaggcagcaacaacatcaaagaaaaagaccgcgcgcgatgacgtcgaaacgcacaggagatgcatgtgttgatgattggtactggagacggctgaactcttctcgtctggccaccggccgcggcccggcccgcgacacatgcatgcagtcagccacggtcacacacacacctgatcgacctgccgcctgccgtctgcccgtctgccgcgcgctgcttctctctccgtccgatggcgcgtgcagtgcgtcccattgccccctcgttaattttttttttcccgctcgtctcgcgcgcgctacaaacgcgaacggtcccacggcggcgcgcgtacaggcgtggttaattcgcgcatgcatgatttgtaccacagtttgacggttagcctttgcccatactcgctctatcccaaaacggcacaacctaatttaatcttaagacaattattttattcggattaggtgtactagaatagatcacatcttattttagattaggtaattttttttaagacgaagcgagtataattttctctcagatcgaggatcgagctgctccttttgctgctatgttagtactttgggttagagactactccctccgtcccagaaaataaacatttttagagttggacacaattattaagaaagtatgtagaagtgaatggtggagggttgtgattggttaaatagtggtggtaggtgggaaaagtgaatggtgaagatttgtgattggttgggaagagaatgttggtggagaagttgttatattttgggataaatcttgagggctaaaagttattatattttgggacagatagagtagctagagggttcacggtcgatctgattgtactccctccgtcccataaaaaaccaatctagtactggatgtgacatatcctaatactataaatctggacatacctctgtctagatttgttgtactataatgtgtcacatctagtcctagattcgttttttcggaacggagagagtacgtagttaaagggggaagaaaggcgttaggctgatatgtatatatgtatatgtatgccatgctctaagaagacgcatgggtaggtgtgcttttgtttcagaagtactccctccgtctaaagaaaccaacctcgtactacgacgtgattaggatgcgtcacattctaatactaaggttgtatttttttttttgcggaggaagtatatggttcgactaatttctgtgataaggtagatttatgagtgcgatctgatcaggcgcaatggtgcacacacagttgttgcatacacatatatgtgtacgatggatatgccatgtggtgctgatggcgattcgtgtctcgatcgatctgtgccagggcctgcattgtgccggccggccggctgcagcgacgaccatgcgatgcagggcagaataagcgcctttggagcatgcaacctaactccagcttgcaaaaagggcgtggcgacaaaccgctagcggagatcgaacatgcaacatgaatgatcatgcgcgggggccatttcattgtttgatcgtgcgtgcatgcgcgcggttgcgcttggaccggccggccgagcgcctcctccacccatcgatcgctttctctgcagattggaagcagactttatattaatttgtccctccagggacatcacatcgttttatatatggcgttcaaaaataataataaaaataaaatatttatcaagatatatcaatatatgatatatcttttcgcaaacatacgagttaaattttgacttatacaattcaaaacaaaaataatatgaccgtgaattacacgttctattcgtagtcaaatttattatttttatttctacttatataagttgaatttgaattttttatatttatgaagtgacatataacatattaatttatcctactatatttttttcaattttttttataacctaaaaatggcccaaccatcatcacgctcatcagctcatgcattgtcgctcgataggtgcagttgggagacagtagtagagattcaggggaattgaaacaacatttacaaacaaattaagtgcaaactctaaataatgagatctgctttaattaacgaactactccagtatttaaccgtatgacgtcatacagtcgactgtgctagcgatattttgctagcggtgcttccatatttagccatatgactttgtgcatagttagggcaacgctctaaacagttaatggaggtatgtattattcatgccacgttttcaaaattgcgctttttgggtcaaacaaaattcctacatccacatttgttatatttataatatttaggacctgttttagatccctggcaagttttatcaccatgtcacatcgaatatttaaacacatgcttgaagtattaaatatagacaaaaaaaactagttacacagattgcgtgtaaattacgagacgaatcttttaagcataattgcttcataatttgacaatatggtgctacagtaaatatttgctaatgagggattaattaggcttaataaattcgtctcgcagtttacatgcggattctgtaatttgttttgttattaggctacgtttaatactacaaatgtatgtccgtatatccgatatgacacggcaaaaattttcacccctggatccaaacacagccttaatctaatttacccgtatatgagtaactttcatccagtcataattaataaatcaattcccagttagaagaagttggtagaatagtcgatcttagggtaaatttaagataagctgaatctatcgtcatttctttactcatttggcattctaagattataacttaacaaacaactgtttgagataacctagctaattacttcctccgttttataatgtaagtctttctaacattgtttacattcaatatatatgtgtgtctaaattcattaacatccatatgaatgtggacaatgttagaaagtcttacattatgaaacagagggagtatatgatttcaaacggtaatgctacataacgttatctcattccaaggcatggaatgagatgctcttatgctctttcctccgcaaatgcgagggaggggcacgccttgccgctgcatggttcaaccagcgaaaccgcctaccgccaacactattgcctcttgctcctcttcctcctccgcagatcctcgccaccgtccccatctccgcatgcgcagtcgcctccctatgtccgcctagcaccgccaaacaacgagtaatacacaatgtgacgatgagcctgagcggcatcctctagagtctagacattacggagcaggacaccaaaatgccttgctacagttagagagcttaatttgccaatgacttgatgtcctcctcctcttccacttgaaagaagtttgcgatggacatggtagccatgagcctcctggattgattttgatttgagtcgatgtatttgctacatcctcttgcttctagaatcaatatacttttcctagattccgagacaactgtatgggtacgtacttgtcattgttgcaaaactgggctaagtatgcaaggtggctatatcttgattcatcatggggtagtgctctcttgagaatttacacctgattccgagtttccgacatgtattaggcttgatacacctaggtatcgatcggcctgttaccggatgatatcatttttgtactgatgggtatcacttggtacaaagagggggtatcagatcgatctggtaccggattggcgagtagtactattcaagatgctctagcagtcccctgattcaattatgcagttagcttgtggaaacactaccaaactctcctcttttaaacatgatcgatgaagattcacacgcattattatttttgaacagtattagagcatctgaagctctgaacatgtatggttcatcttcatccgtagcaaatgcatgcacaggagttcagctacttccttatttacaccgttcctagctgtttgaagctgcaaatccggggctggcctgtatagtactacacatatacaccacttggtgtccattaatgtcgaagcatgcgtggcccatttgtctccgaccatgcatgcatgggtactaaccgtgctagcagaggtagattaatggaaaggccagtatatatagcagagtgtgcgtacacatgatcagacagaatgaatgcgtggtcggtctcgacgctgcgtgtagttcctttcaaagttaaaaatttaggttgaaattggtatgatgtactgagactgaaaagttgtgtataacatgttgatgtgatggaaaaagttgaagttttgatctaaagacagccggagcttaatttgcatgctcttcgctgtcacactactacacgtacgacctcgctgaacaaccttagaactgcatgtgatgaatatctagcgagccatcatgccagtactgtgtaccgtagcctgaatatatgcatgcatgcatgcctgacgagctgagtgatcgatcgatggcagcacgttgctgacagcaagcatgcatagacgagatgcatgcatgtgtgatcgatcgaggcgctagctgccgcggtgatagcgtgcatacatgcatgcagtagtgcagagtgcatgatcgaggtactcactccgtttcaaaggccaatatgaacattttcaggatttaaactttattaccacataatagcattttctaacacctaagacattaattccaatatacaaggtgatataatcgagggaaaccaagcaaatcaaaatttaaaatttaaccattaagatgactaatatagtacattttaagctttacctacgctaaacaatatagaggtgtttatatttagaaacggagggagtataagcatttataggatatatataaattttgtaaatactattaagtatttttgaaacattaatttcaatgcacgggattctaagcattttttaactaacaaaatacaagtgttcttaggggtgtttatgagggaacttaggcaattcaattttctttaacgaatcagcacagaccgtgccaatttcattaaatatagagggagtaaaaatttatgtacacgaagtgaaaaaaatatgagttgtacaaagatatgctagggcatcatcaatgattaaggtcgctaaaggaataaggtgggaaccaatagtcttttcttgatcttgagctaggacccactgataaaaaaaactctattcagtagaaataaaagagcatcatacatgttgcaaaggcgtgaactatttttttttattttttatgatctaaccttaagcttaagattgcccatagcaatattccttgctttgctactctcctaataatgcataaaggtagaacaaaaatactactttattccttaaggttactttgcatccagtattagcctgcaacattatagatgccctatgactcttgctttatggtattagctgcgctagccgatctttacaccaacgagcacccaagttttcccttcttccttgattttggctagaagcgatagcataaacaacctcttttgctaaaaaaattctcttgtttcactctttccagatttttagcaaccttatcatgtttgtctttaaatttgttcaacgcggtgactgaatattttcctttatccttaatttttggcaacctaatgatgctttatgttttgaaacgttgggagtagtagctactccctctgatcccataaaaaaccaaactaatatcggatgtgacacattctaatactacgaacttaaatatacatatgttcagatttatcgtactataatatgtcacatccgattctagattcgttttttataggacagatggagtacgtagcatgcaggatgcagccaagagaacccatccgtggccatcgctagatctatccattaatccatgcatggatcgatcgatcgattgtgcagaggctgcagacatgcgtacgatggcagaaggacacccaaattaattaagctcgcgcgcgcgatcgatcgacgatcgatcgctatagctactagctatgtggatgagagcagaaatcgataattaattatgacaattactactgggccggggacgaacagacacagagaaccacgcatatttgcagctcgatcgatcacactgatctgcatctgcatcgatcgcgatcaatcgatcgatcggcggacggcgtactgccacctgctgctgatcgaactgctgatatatgcgaggccattgcgcctacgtaccgcgacgcatcttatgcgttgtctaggctggtctcagctcaaatggggcgggagctactgtcttggcctcaggccctcagctgaaatggggcgggagctactgctagctgtgagggtagtagcttgattgctgctacggatagttcagatgatattgagactggcagccatgcatgctgctgctctgctccctgcatgcatgcccaagggctgcatacccctgcatgcctggccggcctgtatacatcgatctatccatatactacatgcatttccatttcagcttggtttccaggggcagcaggcaggagagggaggctgctggctgctgctgcagctagcgccactgcactgcacacacaaacttaaaggtggcctttcattcattgcccctcgctagtggccgctgtccccaacactgctcctctgcctgcctccatcctccccccccccccccaccacacacacccaaccacaggaccacctcttcgatctctctccctcctttttcagctgcaccagctgcaactctctcctctctctctctctcaccgagctgcattgccgcagtggtcactgctcagatcagagcggtgaagcatgcaattactggctgactagctagctgctgaaacgagctcaaaaggaaagagctgagctgagccgggcgcgcgggcgaggcagcatatgcatgcatgttttgtatgatgggcaatgaaacactgcaggggcaggcactagctacttgcttgactgtgcctgctcacaggcagctagctgtgcgagcctgcatgtcttctagtgtgcctcagcgaggaacagagatatggatattactcgtaaagagattggtcctagaaacagatcgatctgcatgcatgcctttcaaaccccaaaacaattgtttgcttgggttgcaaccatatggtggaaagctgtcatatatgctagtattgctcatgtatgtttttctcacatttgcagcaggatatcgcaggtgtttccatggccaatttctgtgtgtttcctacagcaattatggacttacagcaggtgtacatgtgcgtgacccagttcttttttaattccatcaccaccgccctcttcttatattcattcatccattaattcctgtgcttgctatccattggggaccttcagttagtttgggccctctgaatgagttgtcccaaggaacaatctataatgatgttctgatgactgccactgcatgttgtggtgtgtgtttgtcgccttgatgtgtctgtgcatgctagtagtagtagtatattgcaataaaccttttgcacacaagaaaggggagaatgctctgaggcgagacatggatgatactcctaccgaggaggatcatattcataggttttgtgcggtgcagtgcgtgctagcgcctgctgcaagcaggcatgtatcaagattcaagatatggcatgcaagatgctttgcacttttttactgtatctgggatgatactatatactcgtactatgcatgatcgattctcgcatcgcatgcatgcatgagcatgactttgccaatgggatgtcagtgatatatgcatggctagctcatcgcttctgggtattatgttgcagtgatgcagccttgcttgcacggcccaatgcaacggaaagatcagaatatactctctccatcctaaaagaatttctatcctggctatgaatctgaacacacaatatgtctaggtttctaagttaagattgattttttattggatatatcattgatctcctttcacatactcctacctactcctgaacaggcacaattaaaaatggtgagaaagaaagggcaagatcgcaagaggaaatgtcaattaactaaataaataaatatataatcatcagtgtcatattgtgtgtgtatgtgtgtaagaggaagataagggggagccgtggaggcacaggtgagaactgagaactatgctcgatctttgagaacgtgagaaacattgcaaatgatacactgctgattctgatgggtatcatcgtcactgggtggtagctactattcatatggccaccgtataaagcagctagctagggaacattgttctgatttatgacatgcaccagctagctagctagactgatatttactccatccatatatgttttcttcatccatcctaagatataaagctgctccctctatccgtgaatataagagattatactttttttttaagaattaaggaagtaagaaaatgacatgtgatgagataaaatgtgatgtgtgaaagaataaagtagtactctctccgtcctttaatataaaatcccttatattatgggacggagggagtataaaaattagtaggtgggagaataaattagtataaaagtagatggtagatgaataaattagtacaaaagttggagaacatgatgctgtcttggaattctaaaaccccttatattttggaacaaatttgataaaaaaatctcttatattcatgtatggagggagtatacctctgcagctcaatatacatatatatttcgtaagtacatataacatctctctaaaagtgttatatataaaagtttgatttattttaaataaagcaataataatattgtacgcttattgaggatacattcaaaattcatccttttgtgtcgaaatgacttcaattatatttactcctccgcttcatattatttattgttttagctttgtcctaagtcaaatattcctaagtactttagctatatattaattttagatattcatatagtttataatatatgaattatttatgtaatgaaagtatttatcatggtgaacctaaaacaatactaaattttataaatgttaaagtatataattttctaaaaaaaggtcaaagttagtaatatttggcatatataacaaagctaaaaacaacaaataatttgaaacggatggcataaagtattttaaaggcaaattattgggtaattaaaaatagtttgacttaacataacgggagagatattaattagtaattaggatagcttgagccagcattatgtatttgatactgctaattagctagagcaatgaacaatcaaaatcaaacaactgaactgacctattgctgacagttttctgtgagcatgagaagatgatactaatcccaaatccttttccttttcatagaaatgatcttatctgattatttctcccttttttgggtccaaatttatgtctttactgaggataaaagtaggtgtggtcctgctagctactagttgatgctcaaaagatggatggtccctagactaaactagcctcctagatttcgatgttgaaagatttgtaaaggtactgtattttagtgggaagaagaatattattcaacaatctaacaaaattcaaaatcaagtatacatactacctgccactaaatgttgatttttttagagaagggtatttatacccagcctctaaatccaaccggatatatgcagcctttttaatttagaaacttagccctcaaataatccaatctaaaatttgcttctacgaaaatttgaactcagcatcttgaagtgctacttagttcactgcaaccactagattacgtgccctttcacaccaaatgttttgatatataacatctaaggatcttcctttttgcaaacaactctcatcagctttcaagaccatactaattcaaagaaaaacaattaaaattccagctgatatagctatactcatggaacactaaaaactctttaattagttcaacctaattaattcaccagacgaagttagtgtaatccgaggaatagaaggtgttctatgaaattaagaagcatatctaggcattggcatccttgtatcttgctaatctaaccccatgttaatgctagtagcactttgatttgttgtccactgcacacagggggtgctagttgattaattaggtcaagcgtagtttatttcatcgtttgtttgatggcttatatatcaaccgcaacaaaatttaaattttaaaaattatttttaagttgatttaagttttttttactatagtttattttccagcgttgtctttaaattgttaattaggaaagttataaagagttttccctcaaaataatagttataaagagttttctcttaaaaaatagttataaatagttttatctataaactattttttattgcctagtcatagatcgagcaaacgatgcatgagaggtttagccaggtcaagtgtacatatgtaaatttaggaaagcatgtatatgcccgtatatacactccgctaacatatggcattgagcttaatgagcttatcagctcgccaggtcagctccgatcctctgctggccaaattgccaatatacgatctatacgatcgatcgatcagggagagtgaagtgagccgggggagcaacaagggagagagcatatggtggtaaaaggacagtgacgcgacagcgacgacgctgatcatttattcctcagtgtaaatacccaccacaaagcttcacaggtcgtcttccacatccttctctccgacgacgctacctagctaagctgctgctctgtagctggcaggctagggtttacgctagctgatcggagctaccaccaacgccggtggttggtagctcggcggcggcgggatcttcttcttgctcgggttaattggcgagctatatatatatctagctcatcggcgggaaggggaaatctcggctgacttgaagggatcggaggaggccatatatatgcatggctgagttcttgtaagtgtttctctctctgaatacatctggagccggtttgggtgtttgatttgttaattcttggcgattattctatggatttggggatcacaaaattatgtgtgtgtgtgccttttgagagtttttaatctccccagctttccgtggtccttgattaggattttatgctgtggatctgagcccagatttgttaattcttcttcaattattttctgtgagactgtacaattccctcttggatttctttcgtacctgagttccatttctttttccatggaaggtttcttctctgaacctgcagtactgggtcgccaaccaaataatctttgtttcaattgcaccggatcgcctctctctgatccttttgcttccggaacgacctggttgatcgatctgtcaatttaattatccattttgcccactgctcttcatttttttcctttttttttcctgaatatagtgttcagttctaggaatccccaactgagtaaattaatcctctgtcaagcctccaaaaaatttcacctttttcgctcgccacacaaatttcctccctcgatcgattggtttcaaagagcacaatttaaaagctaatgactgctacagttaaagactgggtgcatgctgcaggccctgcaggattagctagctagcaaaagctattcgtctcggcataaaggctagcactcaatacaaaccccccgacccagccttctcctgttcctcattcccatgggcaaatagtgatcctttgtacgatccaattcatagctcttcttcccaccggcgagacgaatcatgcatggctgctcgattcaatcatggaatcatatcattcccacacatagtgccactgctgatggctcgcatgcagctcacccagctagagctgcaagcgcagcagggaagagccggtctttcgatctcgatctcgctactagctactacctaggtagatcgattgataggagtagagatatagctagctgttgctcgcaaatacgcagcgaataaagctggctcgctttccccattccccaatggaacagtgacacaagcagagagagagagagagagagagagagagataatccgtcgagatcgggtggtagacccttccgtgcacaggagagatttatttaccccgggttaattactagtagtgctggttgattatggcgcgaaattttatgctaatcagtctgcatgcgatgttactcctaattaattaggtgttgttgtgtgtgtaatgattgggtagctagctagctaggtggatcgaggactgacgatgggaggatgagctcgaggaggcgttgataaggatgatactaggaagcaaccaagcggccgccgccgcggctgcggcagctgcggcggaggaggaggcggcggagctagcgaggaagcacacggcggcggtggcgacgtcgcggcaatggtcggcgcagacggagtcgcggatcgtgcgcgtgtcgcgggtgttcggcggcaaggaccggcacagcaaggtgaagacggtgaaggggctgcgcgaccggcgggtgcggctgtcggtgccgacggcgatccagctgtacgacctgcaggaccggctggggctcaaccagcccagcaaggtggtggactggctgctcaacgcggcgcgccacgagatcgacaagctgccgccgctgcagttcccgccgcaggaccacctctgcatgggacaccaccaccacctgccgtcggccatgccgctgatgcaccaccacggccaccaccaccacgccgacgacgataagtaccacgtcgcggcggcggcggccgcgctggccgcggagaaggaggcggcggcggccggcggcggaggaggaggagggggagacgacgtcgacggcgggggcggcggcggagcggcgcacatagtggggaggttccccgccggtggctaccaccggttcatggggctgaacaacccgctggggatggtcaacagcgccgccggcgccgccatgccgttccactacgccggtgagtcatggaataatggcagcgtgcaagacagcggcgccggctcgccgcaggtggccgccgccgcggctcaccacacctcgccgttcccttcactgctttccttggctccagggccgcatcatcagctggtgttctactcctccgaggccgagcagttcacagtagacaaccttggctcgcagggcttgtccctgagctcggcgagagctttccatgatcagacaggaagctaagcaagctcgatctacacagtacacacactggaacaacactcttcgatcgtcgacaaggtaaggatcgatgagctctaccaaaagaacaaatctaagctagctagtgcaagtgtgtgcattgctttgatctatgtattaatttctttcaagggaacaattaagcttgtgggttaagatttaagaaggaagatactgccagctagctggctgctaatttcttttgctctgaaactagggcaagaaatatgcagggctttgctgcatatgcctgtgtgcaatacggatttgttacttctttttatatgcaaagaagtaattgatgtattggcttgtgtaataattaataagttctgaattttgaacctttcagttctgcctagccttaattttctttattttttcaaaagggaaacttctttgtgtgtgtattcagttttctgacgccgttgctgcatcccaagcttcctggctgtacacaaaacattgggcaatgaatatctggttgacacactgcatactgaggaagtatgtccctttttccagttcattctgcgaaatataaatacactccctgcaaaatactaatttccttccaggtatatgtagactgaaccctgaagtatacattatttatattctaaatgtgaaacaaagaaacttacagtggatatttcttaatgttggaaaaaaaatgctggtttcttatgtgaaggaagcatatatatacacatgattatttttcttaactgtcccaataaattaaaatggtatttttaaattatttcagaaacatggaaatagtatagtgtgctttgatgtttaaccctatgcttgaatgtttttcgaggaattaaaacttataaagggctacaactcacacaaagtaaacaatttttcacctcatgcatatatgagcttgggtaatagtcaatccatgtgattccacaaggctattaattgcagtcataatatacataatgcaatgaaatatctatatatgggttaatggatatgtatgaataatacatacatgcgtcgtcattgtattaatttgagatctctaccagtacaattaatcttacgtgtacacatcttgttattttgaacgacacatgaggtcacatatatatagctagatatataccgtgccaaagtaacaagataaggttctatctgcaggttaatgtttattaacacccaaacatctttacaactcctacctagctaagtttaactagagaaggaacctctttacaactcttaccctagctagttcagtttagagtttaggccgcttagggacatggtccacatgaatatatagagttatgtaaaatagtaggcattcttccatgaaacacattgatagtacatgcctacaattatgaaaacggcaagcagctcactgaagcatgataggaagataaacataatctagctaagcatcatcttattgttgtacgtacgtgcaagtgtagcattatattgcctagtcacaaataaattaagaacttaatttagaagctagtagcaaagtaaattcgaagaggatgctgaagtacccaggaaaaagtatattgaggctaggaaaggatcagcacaacgttgcaattaattgtgaaattgtaaaaatgcagcaaaatgattttcgatccatttattaattaggtcaaagatacgtataaccgtaccaactgatcaaattgatgatcagattgacatgtgaaaaaggaggatcaataaattatactcctagtatatgtattggggcatatatgttttcacttgattgataagccggctaatcctatatagcttaagaaatcatcaattactatgttttctcatacgtattattgtcaaattaatatatatgtcaattaagttcccaaattaactttctcagtcaaattgatctgctcctcactaattaatttgccaatttgttatgaaaaaaatgcatatgctttacacttttcatttagtatataacatgattaaaggcagattttaccgaaataataaattaaactaggtacaggaaatcatatgactgacttgagttgatataaattcaaataaggaaatattggtcatgtttatttcttaaaatacggacatgtttaagcaaagattgtgcttatcacatggaagatggaacttccttcaagaaaaaaataattaaacttaattaatggtagagctgaaaatgcttttgaagttttatgcggcttgatcgatcccatagaaaaaaaagaaaacaatatgattgtatatatatatataccattctttcattactctatatactatatctggtttcaaataattgtcactttgagtcttcgatcatcaataaatttaatttaatagttagattatgatgtacaaaagtttcatgaatatatttaggatgcaacacactttgttcatatggaatacttctaagcatttaaaaattttcttaacaaaagatgaatggtcaaagtttgaaaatgaatacaatgacaagtatttgaatactcatgaagtatatactccctccgtctcaaaataagcgcaaccataaattttcgcgtacaattttgatcgtccgtcttatttgaaatttacgattagtatttttattgatattatattataaaacatgaacaatactttatacgtgacttatgtttttagtttttttttcaaaaaaattttaaataagacggacgattaaagttgggcacggaaactcatgattgcgcttattttgggacggaaggagtatatgggaaatatatacattcttcatttcatatgaatagatatgtgcacttctggaaagtcaaaatgacctcagatccacaccagttctacaaatataaatatttatatatagtagaaaagatgcccgtgcgttgcaacaggggaaggttttttcatcttattattgttatacagtttagttaaggtaaaatttactgtgcggattcgcttggatatatatattttttagaaaatcatgagctacagttaggatcgtctcaagttagcatgtgagtttttttaatgagatttcttatacgacgaattctgtatttccaaaagcgaacgaatttaaaaactgactcaaatacggatatgtatttttaaaaggaaacttaaaaaccaactcatacacagatgacgtaccaaaatactggtaaaaacattttaaatttttataatagtagagaagagttatacgtacttgtttttcggacaatccggttttcagagccagctagtacaaagtatttcagaagtcaagacctgtcctcagatgactacactcattatatattttgttcgtgcatgcagaatgcatttaattctagacgattgttggcgaaagaaagacaaactgagcagctcaaacactgttcacaccatacactcctacctgttgggactagctagctagttagatggtcacagctcacaaaacataatggtaaagtagcgatgtaaagagagcagtattaccgaccagctcgctagcacattcaactcgaccctgtactgatctgtcctctatctctctctctctggtagatctctgacccgtaaacatcatcctgcgtcacccccaccagcaacgggatgcccaaagaaaacaacaaaataagacacggtggacacactttgttggcgcagacccaccaactaacgcacagccagctagctgctagcttagcacaaacctaattaagctagaggctagtatagacaacatgcatgcatcaacataatatgcatatcacttttgtaaatggtaacatgcctagatagctagcttacctagctagctaaaagtaccaatcgtgtaaaaggaagatcatcagcagaaaggcatgcacagttacacgcaagaaattatctgttaatctaatcacgggtactgtatatgcatgacaattactacacaaccacctaacattcttaactaagaattatccgcagcagcagaagcagtggtaatatcctactccctccgtgtttaccattcgtcttattcaaaaaatttaagtaattattttttttttcatatcatttgatttattgttaaatatactttcatgtttacatatagttttgcatatttcacaattttttttgataagacgaacagtcaaacatgtgctaaaaagttaacggtgtcaaacattttgaaacggagggagtaattaactagtactatggatattccacaacgatctggagtagttgttttagacatatataggctgctccagtctatatagggcccatttggaatgtaatgtattatatatacaagaatttggatgcatgtcatgcatggctagtttaatcatacaagaattaaacatgaagaatcgtttaggcactgaaatttgcagaaattcttaaagaaaaagtctgcacaatttatcttagacacacacacacacacacagagatcagaaagatcagaatgctctgaaacatctcaaaggaaatgaaaatatgaggtctcagcatatgtttgaagtcatccaaaatatggaggaaggaaagggattccatggtaattttcaatctaaaaaaatccgataattcaaaaaggttctacaggaaatattctatatagtttaagcctatgaaaaaaactacacatgcatctcttaacaagtcctaagttttagaaatataatgttcctcattgttggattactactgtgtaataatgtaaagttttctaagaaaagcttctacacaccattcattaaattgagtgggtaatacacaaagacctagctaaccacaaaatttaacagtatggtgtacgttaagaagcaatggcaaccaacagaccacaaataaattaaaggagaagagaacaaaccgaacaagtgaacaacagctataagatctcgaggcacacatcaaagatctccatactgaccatatatatgtagccaaaaatggaggcaatgaacaactcccactgtactccaaattaacaccggagcagatcaacattctcgacaactttggaggattgattggtacgaccagtaaattatggtgaagacaccctctcatgctttaagataatcggtcccatatttgccaagcaaccttggtgaaaatcataattaagacgtactatcaactcgcactgaagttcttctttgaaaattctgtcttacatgttgagccaccaatatccatgaatggagaatcaccgtgcggcataagaaaatcattcctgagacaagaaagctagccactgagatactagaatacattgacaatgtgtatgtattagattaatattattcaagcaaacttaattaacccaacatgacagttattcttcttgttgtcagtcaccaccaatatttgaccgatcactaattggtaattaagtgagattattaattagcagaccaaacagcagctaagacctgcgtatcagcggttcattctgcgtgccatcatcctacccatttgaccaagaggaaagcgagcactgcgtacgtgggggtcactatctcatcttgcgtgccggatcgatcgattgagagcaatatatcagggctaggtagatctttttccctccacgtacgcacctttgccaaagctgaacccaaatcccaaagcgacctttcttttgtgcactgatctaacaagctatagctactcgatcatctgcacgtatatgtgcttctctgcttatttggggaaaaaagacgctgttcccctgccttagcagcggctactactagctagtagagccgaaaacatttcctgacaaaaacccttccaaacaactcctgctgtctaccgtggacaagaccctgcagggtcaaagacaagctaagagtaattaggactttgtttcaaaaagaaagccagggttttgaagatactacttcgtaattactaggacttgagccttaggagttaggctttagctccataatcctatttacatgctataaaaaatactatacaataattcaaaacataaattaagaagtagctaccaagggcacattagctctgctctaggttcagctctacacccctgaataaaacatgaatatctgcaaagacattgcccagctgagaaaagacagccttttggttgatttgtatatgtacacatgtatatacagaggcatatatacacacacacacaaccatgtcttatctttgaatggcatacctaaaacaaaaggacaagcatcttaagtttgcaaaaattttgtctccgtgaccaccaatcatctagcctagcagttccccaagaaaaaaagaaaaatcaagctgctatagctagcaagcagcaagcgaagggaagtgaccagtgagtggggttgatgagtagtaaaagaccagcagtggggctggctctgtggctggcctggcctggccggggggctggtctttggaggcgagctgagctaggccccctacggttaaagcgctctctctctctctctctctctctctctctctctctctctctctctctctctctctctctctctctctctctgcgtgcactgtgtctgcatagccctgtagctagggtttgcatgcatgcagcaagcagttagctaagcagatgtacccttcgtatcttttgccacggagagacatggaccaatatataccctttcacatgaatggtcccctgaggctaccacgattcctccccacatttttcctatcaaactcatcttcctttcatctttagtttcatccgtttgttaactttgagtatagctaactagcttagcaacaaaccggtaattagctagactagctgttctcatgctggaaaagtaacctagcctacgcatctagtaattatgtaattatatgcatgcacacacatgaaccgattttgatcaacaatgtagccaactagctagagcaatagattgcacgctggctatccttaggtgtgaatatatggtgtatggcagttaaggttgattattattaagggagatgatgatgaactgtgtagtgtgggctgtggcaaatggatgtgtcttgcatggtacgtgacagacgagcaaattggacacacgagcaatgatactctcgtaagattatgctttggagagcagtataggggagtggcctaccaaatgcatagcctgtaccatgcattatcctcatttcgttgatcactctttcgtttatctcttctgtagcatgactaattctatagtaggtacgtgcgctagccgctaggtacagatcgaaccgtgagtttcttaactagaaatggggagaaaagaaaatcagctaccttaactagctgctaccaacctaaattctgtaagcagatgcatgcatttcattaattaacaggatgcgatcgatgcatgcaaagggcggttgctcctcgcggtattttagtcgtcaaactgattctccccatgatctattgcatattttgagctatttttcaaaaaaaaaatcacaaaagcttaattaagtggaacacaaaaggcgaacatattgcaactgcgttaattcgttttttattaagaaggaaaaatcacttgaatgtcttctgaaggccgtcgtacgtccatatcgcgaaaaatcagtgtgttaaccgacggtcctgacgaattctacctgtgaaggaaaaaaaacggttccaatataatgtagtgattgcacgtgtacgtataactactgcagcatacagcagacccattgcatatgtacaattaacctggcgctacagtatgcacgggtattacttcctccatcccacaatataaacatttttagagttaaacatggttattaagaaaagtaggtacaattgaatagaggagagttgtaattcgataagtggaggtatgtggaaaatttgaatggtggagggttgtgattggttgagaagacaatgttagtgtaaaaattgttatatgttgggacaaattttagaggctataagttattatattttgggacggagggagtacctgacggaggattaattggaccttgttcctttgcagctgacgcatgtgtgtacaatcaacctgtcgccggcccttaagaggctggtacatctgtgtttgcagtggacttcgagctgggcctgcagcctgatgggccgacttataggctcatcaagagaacatgcatcgatggttccatccatgccaggcgaggcgactggcaaatggtaatactgatgcgtgacacagccggccgcacagcacaggtgtaccgcgtgtagcatcgcattatcattgcaggatagagcagtagtggcgagctaaaccctctccaacgcagtcggaccataataaaccaactgtgccatctgcttggagccttcgatcccgacctcccgttccctggcaacttctgagcttaattactacagtaccatctgtccagctaattatagcacccgcttgcacgcgagcagagacatttctgcatcacacatgttagtatgctattgacaaattgtgatgaccagccatgaaaatgcccttgcaatccaccacagggataaatgttattatgttaaggatggtttcctgccaatcagtcaacaatatctagtacgatgctaccgagatattctccaggaagtttttaagcattcctacatcagagacttggacgagtcgcatggtccatgagtaactcgtcaaatgacatgttgcaactatcagcccaccagatggagtacatgatcagatccaacccttcctgattcgagcccatgcaagagcagctattagggcaccacctaaatgagaagtacctgatacctgaccttgcctctaaaaaataaacagatatcagcctctgtacaactttttttggggaaaaggaagtatatatataaaaagcataaattagataaatgtaatcatcaagaagaaagatataaaacatagaatttcaactagccaggaaaggctagtacattctagaaacagaaacatcacatggaaaaatcagtaaaatattcctagccaccctaaatgtgaatatcaactttttaaaaaatatcaggttaatttaagaccagagctactgcaggcaggaacttcacagagtaagcgattcacaaaaatcccaaaattgaaataaaaatgaaagtagcagtgtccaacagctatactgtaatgcatctgctgaaccagcacactaccacagtcaaaactcatggaaaagcaacagggtagcaccaaaaaaccaaaaggagcacttattacattagcaaatccacatgaaaagaagtcacattttaagttactgcataccttcaccctcagcaaatcagcaccgatcaaaatagccccctgaaaagtcaaagagtttttgttttacatcatagcaaccatgcttaacagaaagttttgaagaaaaaaagcttctcaccataattgcagctggaataggaatgaagaagtaaagatagactagtttctttggatacaaaaagatgtcaagaaggataattgcattagcagcagcacttgcaccctgattcacatgaatataataggttatgttttgggtgtaacaagtaataacttagtactagtacaggtagagatggcaacgggtaatccccgctggggaatacaacccatccctatccctgcgggccacaaatttccccaccctcgtaaactgcaatcaggaacaattttcccatcccaccccacgcggggaattaatcctcatggagggcccgtttaaaacaacatatacatctcaaatcgaaatgtaattaacaaataatatccacactttatataaatatactagcatatatccactaatccacgtgacaacaacacaagatcttcatccactaattatggctcgattggacctttaggcctacataatttgcaatggacttggatccctatcccgatttttaatcgggtatcctcacgaaggacagggatgggcaacagaagatcatccccgcccatgctagacccaagggggcataagtttttccacatttaatttcccgtggagaatcagttgcaaccatccccgtcccctgtggaagaattccctgtgggggaacagggaacgaggctccactgacatctctgagtacagtagcaaataggatatccctttgttggctatatatacattaaattaaactatcatagcgattcaaatttgcagtactgctttttaattaattatttgggtgtataagatgaacacataataggtaggtgggaaaaaatcgctgccatcagactactgatgtgattatgtcataataatgcttgttttctgaataccagcgcgaaataaagtgaactgcaagaacaagaaatcaataaatcacatacaagcgcaggagttcttgaattgtcccatccgccataaaactgcaaaataaatattacatattagattagggagattattgcaaaatcataaatattgaacccttttcatgcaggatatgtcccacacgagtgccaataccaagaggctggttggcatctagtagctagcagcgaactaccaggtactagcattttcacaggttagcttttcttaactagaaatcacgttgacataggattttgtttcagaattggatgacataggacatcctggtccaggattagaaatcctggttccctgatgcataagaattcacatcatatccaggcttacctgtcttcgtggagctaggaaggctttctctagcaagaagaatgcagatccagcaagtgctcctgctacgtacaacttcagtagaaaagcaggaccaaacatgttggaaatctgattcacaaaggaaaaaaaaagcaattcagcacatgcaatataagtaataaatggccaatagaaaatcagagtacaatatatatactagtcccttcatttggagaacgaatcttaactacactaaacatgataaatagaaatactaaaattagaagggaatagttatatgctattgattttgtttttataaaatggataaaccgtatctagtacattcaaaccatggtagacattgaattcccatggcaaatcattgcaggatctctctacctagctggctatttcatcagacctgaaaaacagcctcacatcttctcctgcatggtgccttcatcagtcatcaatacgtacaactctgattggctcggttgaataactagcacaggaaatgtcaataacctctctgtgtgtctctggactgatggaggggggcttggcaatgaagtattataactcttcattacatgtgacctttgcaagaaactaatgaaacaaagaattgttttacaaacatcaagccaattttaattttttttactagagaaaaaatataatcaaaatttgattggtcaaattcaataatgtcaaaataaagaaaaattgctagatcaaattcaatactccactaccaaatatattactctttcttaattttacacggtcaagttcacccagcatgaatcatgccaacaagttgatggtaattcagacttgcttgaaatattcaacaaaagatgctggaattcagatgagcatatattatagcaacaagatcatgtcttggatcaagtgttagataatgtttttagtctacactcaacttatgattctttgactgatttgataattcaaaacagctataattcaggtgtttcagaaagcaaactagtaatagtaatgatttccactatattgacaagtcaccatatccattcctttgtttctatttaggatttgagaatgcataaagttgcacataggtgcatagaaggacaaactaatcctttttacttgtcgtttaggacatcaacatagtcaccaatgcacttgtttgatcattgttttttttaatcatatatttataaagattatcgaagataactacatgaaaatcatgaaaatctgctgatgtcatttgcacacattaaatcttaatattttgatattaaaatgttatctatttgataatggagggagtacagacttctgcattgtaataacaagagagaatggtgagcagctgaacatcttacacttgatccgaagaagtagagaccgatcatattgctgatgaggtgaccactctctgcgtggctgaaggcattcgtgagcaacgtgtgtaacctcccgcttttgaagttatcaagagaaatctgctcatcaaacaataatcaagccacacttaatcaaccacttctgaaacaaaagcagaagctcttcgactgatcactaaccataaaatgcctcctcatgaagctaggatcagccaggtgccatagcatgaacacgcccacattggcgcccacgagcatcaacactgccccatcggcggacggcaaccacttcgtccttcattgaacatcaaaaccaacccaaaaaaaaatcactaaaccaccacgaaaatcccccatttcaaaccatacgaaccgaaacctcaccaggacacgccgctaaggaacatggacgaggaggggaaccaccccgaggacctgcgccgctgcagcgagaagagctcgagcgagcccgcctcgcgcgcggccatcagccaccgcgccgcggcggcccgggcggctgccgccgccgccgcggccgccgccgcgctcaccggcaggagcgagccagtgctgcgccataaggggaggcgggagggcgaggcggccgcgggactggatggggcgtggaggaatcggtggggggggtttggttggggtttaggtctcggggcggcgcggaggcgtagggcttgctgcgcgaggagcgactggaactgcaggaacctcctccccgtcgccattcccgcctagctccccgccgcctactcttcgctccgccgccgtctcctccgcctcgggctttcgcggcggcgcggccggtggctttgcgctctccggttgatcagctccaatttctcaacttccggcttcgggaaggacacggaagggggaatcgctgggcctactgcttgggccgcggcccatcaaacgtccacgaccgctttccccgcacgtaggccgttgatttctcgatcgaacggctgctgctgtcgcgattgcgtagccgacgcagcgagaaggttttaagggtaggcggcgccgcggcggaggggggctcagctcgaggaggacgacggaaaccttcccggcggcgcgcgagtctcgcggggggaggagagcgatgtcgaagcggcagggtccccgaagcatcagaaccgctacgcgtggaagcccaacctcgggcagaagatcaacgagaccgtgagtcctcgagccgcctccctctccttctttatcctctttttttcaaggcctgagtctcacggctggaatcctcgccgctgcaggagcccggcggcaggttccgtcctttgtcggagatcaccggcgtctgccagcgctgcaaggaccaaatcgactggaagagaaggtcgggagtccccttctgtagtcgtcgttaatcttagctcgtaattttagcttcttggcctctcggtccgatctgtttgtctcttcttggcagatacgggaagtacaagcctatcgttgagccggcaaaatggtaccttctcttgccctttttcgtaattatcgcactcactcgattgatggaactatggaggagtgggcagtgatggatgctgatagttctcgtttggtttttgcagtcagaagtgtgggaaacggaacgtccgacaggcgtatcacaacgtctgcacgggtgaatttcggctactccaccatgtcgtcttttgctatgatggtgttgatgttgttactgatttctctgttgcatatgctcaatgcagcttgctccaaggaccttgggatttgcgcgaagtgctgcacttgtgttaaagcgcttgtcggaaggtgatccctgcttgtttactatgttgtggtactagtattagcataaccaaatgatatcctaactttgaaacttaggtggctaacaattttctaccattttctagggatcttagtgaacaggagagtgagcgcaaggaactagaggaggtttggttgtgctatatttgaatggagattgttgtgaacgttttcttttgtgctgactattaaattattttgtaggccataagaggtgctagggagagggagaggcgcacacttcttcgccttgtgagtacttactatggcatgtttttaatgatatatctttatctgattaggtatagcgaatgtttgtcttcaagggatgcctaatcacaatatatgtttcccatgatatctgaaggcagcactgcaagaaattagaacaaagattttgtcataattgtattgtttgatttatcatttgaaaataatccccagttcaccacagtatttcgcatatacccttgaatttttcccttttatgtgtttctttggatgcatcgttattttggacaacttaaattatggagatctctaaattatgtgtattctagtattaaggtgccactgcctttgtttcgatgtccaagttgaatgaattaatattatgcaccttctcttcttgtgctattcatggtttttgttgttccaatatgtagcattaaatgtgaatagaactttgatgttttaaattcttgtacacaattgtttgctttggcatcagtggttcgtttaactgtaaggattctttacaggtctttatctggagttctattatattgctatacattaaatctgagcatgtgaatataaatggctggtccatgttctaaagtttcacctgtcttgaaacattttgacctgtaattactaattagtagtatcagttaagattgttttataccccgctccctgtagaatgtaaatatgatctgttaatttagcttttcaggtatggaaaaagaaaaacatagcatgcttgcttagaatggttgcaatatcaagatccatagtacatgagatgtactattattattattcagctttggaacatcaattcttaaacaaactggttgccaaacttttgacttgaaattgtcgagatgaaagtgcattaagattccaaattatcatggtaccttattggaactgaagccttagcttattattctaattttcattttggtaaccaaatggaaatcatttttttagaattgctggtccatttagttattcacgtgaactagtaattccatgcatatttattaacatcaacattttgttgcagatgaacaaaggtggcggggagagcggaccgtcggttccaaagattgctgacagaagtcgtgaaggggacattttccctgctgcatcccttgacgaatatgctgaacaagctagacagcaagatgattcagatgaagaagaggccagggattttgtagaagattaattttagaactcagaaaccttttcttttgcaaaaggatttatatagccttatgtggtgatttacattacatggtgggtaatcccacccactgcggaaaacaagtgtattagttttggcagatatatttccgtctatcagatgtttatcagtgtgtgctcccattccgtctgtgcttgttcaaactgaagaattggaaagtagcatatattgcggtttttccggtttacatgtcttttccccataatgcagcttatcggtgtgtccggaactccggatcagcttttttttattattattccgaggaaaagctcttctattattctcttttttaccaacttattgcgtgcatgatgcccttgaagatgttctctgttctgttcttccctccatgtcaagcgaggttgttttcttcatgtttacggttttatttagcgggctgccaaatttttcgtatacattgaaacgttaaaaagtatactattgttactaaggctgtgtttagttcacgctgaagtttggaagtttggttgaaattggtacaatgtgatagaaaagttgtgtgtgtatgaaaggttgatgtgatggaaggttgaaagtttggaaaaaaaaactttggaactaaacagggcctaagagcacccgctatggtaaagtagggtgctctctataaaacatgtacatctcagcaatagactagattaatagtaaatcacctcaatagtatgtctacataggtatctatagctctctcatgcattgcctcgtttttctctatagactatctctaatctagtagatagctttgctctctctcttcatttaatatcttccaagtaggaaaatatgctgacattgatctcttatagatagcttatagataaccattgtgggtgccctaagagcatgtccaatagcaggctataagccagctgcaaacatattttaaggagataaataaagagaaagaagagcagcaagctacagatttgtattttaaggagataaataaggagagagaagagcagcgagctacagatttgtagctagctgtagcacggactctaagacgcaatgtgtgtttgacaggtgggaccaggtattaatagtgtagtatgtaactattgtatggatgagctattagattggttatagatgaattgtagctactacttagctatactattaagcttgctctaacaggggcttccttcttgtagctcgggttcattaacccaaaaatcttgcccacgtttgctactgtcatgtcagagcatggccaggacatcaaaaccttccataacaaaacacgcaaaaacagtaaacaagtgtctcggcaattcggcatcgtccgccgcccggtgccgttgtgtgcattcgtctcccatgatcccatatcccgtcggcgtcgagacatggaccagactccctccgccagtgccgcacctgttcctcctccccctctttcaaacaaaagaaaacaaacgagatctcatccgaacagtagaacccaccacgtaacgttactctcatctcgtgccaaatcaaagcaaggcaggcaagcaagaggccgttcgagctgcggggacgatatgcaacggccggcccagtcgagatcgggagggccggagggggagtggtgcggccggcgggtgccctgcacgtgagcgacgcagccgcctgcgcccgtcacgcgcgctcccgcacgttcccgacgttgtgccctctgcctgcggccgcgtgtctcgccaaatgggccccgacaaatccaagccgctgatacacaccaatcgctttccccgaaatgccctccccaaagttggaaccctttttggttgccggcacactgcccgcaccaccggtggttggcacgggttggatatggaccagctgtgactattccggcgatcgagtggtgttcttgattataaaccctttgtgtttcaagaaccttttctttttagtttataaacccttagtacatgactgaagttttatgatgctaagcgatatttgttaaaaataaatgatgctaagcgatatgactccactagtatacgagtgttgatttaatgttaaatattatagttaacacttaagatcttaacaagaaagaaagggattgtttagtaggcggacaacggcggctatggctatgccgtcgttgtgtgcgtgcatggcactgttgatgtcgagtatagtgcagtcacaaatctagcagccgaacaaacaaaaatgataaatatgcatccgtgcattatgacagaatattttaaaaaattataacacatctaaaaacctaaaactatttaattaccaaactattcacgtgatgagatgaaaagtgctgagcagtcaactatatcgataatagactataagttttgcatggattattgccccataagcagcgatggcccatcaccgtccaaaaagaagtttttaaagtagtgatataggtttctagttagagaaaacaacaaaggtaatggtcacatcgttaaagatttcataacgatatctttattttttcggcaatagatataacggttacaaagtcatttaataaacattttagcggtaacatggttcacgtcatcttattttgcacttcaatttagcgcacaaataatacacgtggatcaaattacttggcaaccaggggcagcataaacaaagctgactccagagtgagggcattttggtaaactccggacagaaaggcaggcggagtcatccacagtccgcaccattcccccggcgctgcaagcaaaaacatgcccaaaagagcacacaaccttggctggaggcggcggcaggccgaatctccttatcagtccgggataaccccaagctctctctccccctccatccctttccccactcaccagtagccaccaccacatctcgcaaggccaaaagccctagccaccgtagtagtagctagtagctatagcaaggtagagagagcgctctagatctctctctcgcggggcgctgggcagatcgacctggcgatggcgaccaaggggaataagctcggggaggtaatgtgggagcaccggctgcaggcggcggccgtggtggcgctggtggcggccacggtggtgtcgatctccgccatcgggcccaggctcggcgccgtggtctccttcttctggccgctgctcgtctccacggggttcttcctcgtggccgtggccgtcctgctccggatctcgccgcccccctccagcaccatcgacgagtccggcaaggagctcatcgacttcgtcgccgggtgccgcccggagcaccaccccccggaggcggcggaggccgccgtggacgtgcctccggagccggagatctagaaaatcgagggtggcgggcgtggcgcgggcggccggcggaatcagcggcgcctcgtcgccgggcggcggtggggttgtgtggggtaatcgccagcatgggcccacctggaagtgcgtgccacccccggtgtacggtgcggccgtgggctctgtgttagcgtaggattccgcctccgttgtggtccggggtgtacaataccattctcaataaaaacatggcataaattcgtcctagtactactcggtatcgacttccattatgatcgcgtcttgctttgagttgatgcaacgcaggttcgctgtaacgccatgaagatgaaggcgagagtcttaagcagttaagctatacttacgctcgaagaatatgcgagtctgccaatcctcctcgagcctcaaaattctcctcttcatcccgctttagaaagctagattcactcatcgagagctgaaagcaaaagaaatggtgcaattgtaaatctcatttcgcatcattgatgttccgtgagaaaagctataaagacggaaaagagaaatggattgatagtagcgtggtagcaggatgccctttcggcgtaatcggagaccgacactctttcggtgttaaggagttgctaaaccggtcactcagccgtccagttttgctcgtacgcgacgccggttcggacggtcacggacgcgcgtttctcccatcgttgtcgccgtagtaggaccccgtcttactaattctcatctgttatcgagcggacgcaggcctgatggtcactgtcacgaggctgaacttgatacggtttttataaaggaagacgaggccgtcatgctatattctctggtgcataggtcaatgcgtctgacgtggccaccgcgtggtctggtcgggtgcttccatggtgctgacgtaatggtctctttgagctttggattccatggtgacatttcttggcacaaatgaatttagttggggcatttcttttcttgaatatgtttttttttcttgaacaggttgaagcaggttttactagctacgtagttatatgctaatgagccaattctattgattaactgacatcgagaggacgataggagaagaaggtgaccggacaccgaaaaatgcacaaacatttttgtctcgaatggatttgaatatggtcatgatggatgtgaagttctgtagttagtaaatactccatctgttctaaaaaaatgaatctagaactgtccagattcatcatatcctagtacgatatttgatttttcttttggaacagaagaagtatgtattttccaataacttgaaagacacacatgcacacacgtcatcacgcacgcacatcacagtcacacatcctcgcaaacacgctaacacacgctcaaacagaagaggctaacggcgtaactgcgacatcaataataaattctaattgataaagctacaacttgtgcacaatatctatggacgttaggatttaaaaccttagcagacaagattatgcacctatgacatcactaacacatcatcgatggttcctggttagaaaactatcaacaacataacaaacatatttttgtctcgaatggatttgaatatggtcatgatggatgtggagtagttagtaaatactccatccataaaaaaaacgaatctagaactgcatgtgtccagatttgtcatatcctagtacgatgtttagtttttctttgggaatggaagaagtatgtcttttccaataacttgaaagacacacatgcacacacgtcatcacgtacacacatcacgatcacacatccttgtgaacagctaacacacgctcaaacagaagaggctagtggcgtaactgctacaacttttgcgcaatatctatggacattaggatttaaaaccttagaatacaagattatgcacctatgacatcactaacacatcatcgatggttcctagttagaaaactatcaataacatagcaaacatatttttgacaatgttatcctactaaattttggtgttacttatggtgcttcacagctagccaaatgctacctaaatttccaagaccaccaaatgtattttacacagtgatatcttacaaaaaatgataattttgaaaatgtccaccactaaatatagtactgcaattattaaatgttctgaaccagatttaccgaaacacgtactacttgttgtagcagtgaggactaggtgtcatacctcctattcgaccaagacacgacttcaggccttgatgggcatattcctgagtttcaaagcaggtgacaaaaaaagagttcaagttgctatggacggaaacatgttaattgggcaaatagtattcaagcttgttatagaaaggcaagcggtgcgtggaggatggagaagaagcttggcggctacgttacccagcaagaatattctcttacaagttccctagggtttctagtcctttggattatccatgtaacttcgcatgtaactaccatggctatataagccgatctaattatatagcaacacgatttatactttactgaaatagcgatcatgagtgtcatttgactcatatcaagctcatctcgttacaaggataggcgagggaaacacttcctcatctatccccattatgttcatgacgttgggtcacaacttagggaagactacgcgtcggatgtatggagaattaaaaaaaatcggacataccccagtacctaccattgttgcatgcaccgaacgaatctgccctatcgatttcatcggtgcttattcctacatgattactctcttcaccactctctctcctctatgaccactttatcaacaacctataaacaatttttcctcttaaattctttatctgatctaccatctgattacgtcgttatacttatagcaattaaatctttacaataagatgtcacatgaatatattttgattatatatatatatatatatatatatatatatatatatatatatatatatatatatatatatatatatgttccaactagtgaaatttgatgtttcatgcgagggaagcaaatgtttcacatgaaattcgagtttgttgcagattttaagttttctttgttgcgatatttatttaattttaatgttgcacatggtgttgtttggatggtttaataactattttcttatgtttcacttattcatttgaaatgttgcacatggtattcttgggatatttcaacaaatgttttgtaatgtttcaacaattataagtcgatgtcatgtataatgtaaaaatattttagttaggatttaacaatattattttccttatttatttgttcttctacatgtgtaggaacatgtatacgtaaatatctagatcgttcaattctctcggccaaatagtgtcgatacgtgcaacacagtaaaatgcttgttgaaacattttgctcatatgcatgaaacatcaaatataaacaattgaaacatatacatactttttattagaatatagtcaaacgagatgtcattgtaaagatttaatcataagaaacataattgtataataaaattatagattagataaattgtttagaagaaaaatcattttaaacaaggaggtgggagagataaaaagctaatagttggttacatcatatccattgcatgctgcagctcatcacatcacatccttccatgctttgttgcatgctgccattatctccaccataaataatccattttcgtgctacgttttgcttgctccgacggaatgttcgattttttgtcgggcgtcggatgtctgataagaagcattttcgtcacaactcacaacacaacctaaaaaaaatagcagtccaaaagtgtaccataatttagaaaggaataagtccattttgcctccctcatctcttgcgcttgcgtgaataacatccctcaaccggaaaaccgggtataatgcctccttcttctctgaaaaccagagcaaatcacctccctcggcggtttcggaggtggttttgtcctacgtggcggctctgacttccatctgcgcatcgacgtggccgcttacctcgccactaccctcaaaacaacatgtcaatcgcgccccacatgttagtgagtaaaacactaaaaatcaaatattgggcccacatgtcagctaccttcccccttcctctctatcctcacggcaagcgcagcatggagagagctagctcggcggcagcaggacggcgggtgctcggtggagcggcggggcggcgggagcttggcggagcagcggggcggtgggagctcggtggagcagcgggagagtcggggcggcgggaggtcggtaggagctcggtggagcggcgggagaggcggggcggcgggagctcggcggagtggcggaatggcggggcggcgggaacgacagggcggcggaagctcggcggaatggcggggcgacgagagcggcaggagtgacggggcggcgggagctcgctgcctcccctcccacgcccctcctccgccacctcatccctatcctcgcctcttcggcctcgccgccgcctcttcttctccttccccggcatcctggcgaagatggacgccgacggatacgcaaagttggcatggtaggatgcagcacaggggtcgtcgaccacgcgtcgctagtccgacgtggacggagccagaacgccgccgccatgaccttcccgcgcttcggcgtcctccatccaacattcggcactcttctcgctgcgccggcagcgactggtagtgtcgccatccaatcttgcgttggggcagcaggcaacaattggccgatgacgtgtgatcatcgtaggcgcgtcctcttcgtgtcacggcgatcctcgtcgccgtagtagccgtaagcagcaccacaacagccgtaaggcacgccgtagtacatgtaaggatcagctccgaatggcacgccgacgccgaagaaggggtcgacgtagcctggcgccgggccgaacgggaagccatagctgccgtggtgatcgccgtcgacggcgagggctccatattctgtggagtggtcacccgccaccgtctcccacgcctttcttggtccgaggacacctgatgagatcgtggcgcttttcttggaagacacgttactgcggctcacctgcgaagcggccaggctctgcggcgccgcctctgtcgcgttgctgctggcggagctccttggcttctcggttccacttgaaacgctcgctgtgccgctggtggtggcgagaacgttggcgatggtggtgcggaacgttgggttggggatcaggtcgtcgacgcacgcctgcgccccgaacgcgcacttggacttggcggcgatgt

SEQ ID NO: 7415 - DNA, 12674 bp, Oryza sativa
aattcctgcagccctcttgagtggacaatggcgaaaacaagcttctcacattttgcacatacagttaaatattcattggtttctccaggcctgaagaaagcgaatcacgacggcaagagttaaggctgcttgtgctccattttcgcctcaaattactgccccaagacgcgagatacggaactcttgatgttgttcagaaacttttccctgcagaaaaacaactgggctagtaaagaaagtgcaacaaaagaaactcttcaactatggtgctcagaacgataatacagatgtcccgagctgcattataaagtgtcagtacggtgccagttcaatatatatccagtattctcaatgatgcaggtatgcaggcatagtgcagcaaaccaaaaagaaattgacgttatgttgtgtgtaaatgtgaaagttccataaaacttcatcgtaaagtatatcaaactatcagtatcttctcatcaatgattcaaaaaaagtaagatctctaagggcttgttaatgatacaaagcaagttagatctttcaagcttggaagcatctgctatgtaaatatacagaaatggagccatttctcaaacagatccatgtaaacttttgcaagtgtgatatatggcgattacaaagttacctgtctggcttgaatagtaggttttgatatatgaacaactgcaaagagttcaacagtgaagattcataagattagaaaatataattcataaaggagaatagtcgctgcctaaaacttacccatgcaaccaatatgccaattaattcaaagagtagagggagaacaggaagcttgtcgatgacctgaagttgatttattgtattatcatgaaaacgctcttattccaacaatcgaaaaactgcacatttgaagctagatcatctggaagttacctctacaagatttatagaagcccataatgcggcaatccctgcaaatcctataccagctagagcaaagaggtcttcaggactgctgaactgtttcagttttttttcaggaaacaaaagtatgatgagaacctccatacataatcaggtgcctcaaacacaattcagaacaatttatggtatcaagttgtcttcagtgcataattactccaggtaaagtagcagactgtgaaagctgatcagaagcgtaagtgcgtacaacgaagctttctgaacttgcgtcagaaaaaaaaattgccaatgtcatcagggttcctgaacttactatctacctcaaagctcaaattgattagtagagataaaaaaaactcaccgaactctggacatacttcacaacgctcccggatgacggttctgaactgtcctgcgcagcctttgcagcgacgacattgcgactcctcatcctccctgcatacgagcacattagagcacatgatactcaatggctcgtttgcaaagaaacaacaatataaaaagaagtgcaagagaaggttgagattgattgggacccttggaggaaattaaaaagaaaaacacctgaaacaaatctggtgcttggcactgcaggcagcatggggagattcccggtgatgctctcgctgccgccgcgcggaacgagagccgcaggccgagcaacggcgagagcagaggccatcgcggttagcttcccccgagaatacggtggaattgcggaggtcgcgagcggtggatattgggaagaactactgcttggccttcgtctgctgcagcggatgcgagtggaaggctcctcgtccacgaaagcaccatcggttggcagatttgcagattgccccttgccttctgcagatattctgattaatttccattctacgagtattactgtaccgcctgcctgtccgggagaccggggaagttcacgctgggatacagcttcagatttcgctaggtttatagtgactgactagtgacacacagatgtttcagtttgtatcttttttggagtatattaaaaaactaaaccgtcacaacttttttagtaaaaacattcaaatgtgttgactttctttttaattgctcgaaccgaaggtcctgagctttgttttttgcttcacacttataaagtttactcctcctctattcaatgaaattggcagcttaccgattcgttaaaaaaatataactacaatataattaaagtataactacattgcaattgtattgtaaatacgatataacttataaaactcgtattcaacttatgatttgattagctaacgttgagattttacgcgtgatatgtgtgaacatttctttctattaaatccatttttttttcctttatttatactacgagcgctacgtaactggaatctgtacgataatgacaaaccagcactgctgcaagctcccctgtaactctgcataatactgtagaaactaaacgagcagtaaacaaacatcggattccttaacttacatcggggtcgtacaatcgacggcgagctttaaccaaaattctcgcggaagagagaatctgtctgtccgagaccacctgcgactgaggctgtgatccctgtggcaccggcaggacggcagtacacgcccccccgtgaccccgcccgcgcacaggcgcagcgtggcgccgtccaagcgttcgagtctcactcacctccaccacctctcgcgcccccacgttcctcggactagccgcggtgtcgcctctgtccagctcggttgcttcgctacgcgtcgctcgctgctgccaccgcgccccgcttgatagattcgagcacgcacgccgggttggcgctcggcgccgcgccgcgccacggagggtgtcacgagaccgcctggcgcgcacaggcgcagccccccgtgtcgtcttcctccctggttccttcttgtcaccgggacgggcgaacctctttcccgcgcgtctgcacatgccattttcagcttccatcatcaccatcactactattcactacttggcctagtagcgaccgagcagtgcccactccgttgctgcctgcctgcctgtccgtcctagctagcatcctacgctcgcgtgtagagagggtgaactggcgaagggctgagcagagagatggaggtagcagaggccggcgtcgacggcgtggcggggaggcggcagcaggaggaggcgtccggcgcggcgccgttcggcaggtcctcgtcgctcatcggcgccgcgggattcgacggcgcgctgagagttgagcacttgtttggcttcttgccttcttccccgatcgtgtctcccgtgtgcgttgtgtctctgaccttgaacatttgggctggtcttgtgatccgcaggagctcaaggaccttcgctcccagctgcaccagacggcggactgctgcgagaaggcgttcctcgacaccgagaagaagaagctgtcagtgcaaagcttcagctatcacatttaattatacacttctcccgccactgttttgtttctctcgtgcctaacatgtcctctcacttgccactgttttgcttgaagaattctggagagcacgaaaggttacatctgcgacgcgattgtagcggtgattgatcatttggggaccgtctcatccaagctcgagcaacagctgcaggagaagattgagatcacacaaacagagaaaaagctcaacttcttgaagcaggtcaggacatccgtcgactgaacctattttccgtgaatttcgcatgacaataagagtcagtgtagttacagaaaatagcactagtagctcgcaacatgactagtagcttgaaccatttcaatgatgaagaagtagttgaaagaaacagagtactcactgcttaaatgcttagtactttagtatgattaggtaacttagctcattatctaaaaaaggcaagtgaagatcctgtactccttcaactttttccgttctttgattcagggataacttttccgttccaatttcaagaagttagtgtaatagattttgaaagtgaacggttcatggttactgctgatgaacatcgatcaaacgacactttagtactgccacttattttaatttttagtctcttcatgttcatggtaccagaggctcctgacatgtgaacagtatgcaattactctcaaactattgaccgtacgtggggacaatgatgccattcagtatcatcgccgttacctctcgcaatgtaaattctctaactcatttgattttgtgttgtcgccattacttcttataaaaaaaagggttgctgatatgtggtcatttggacagcttcaactctgttatcattgactaactatattattcactacagctactggaggaaccaaagaggaaaatggtgctaactccaggtttatgccaactaaaattttcctttgatcattttactattatagcatgtgacctgcatcatatcgatttataacattagtagttctgcacacaggaaagatgatgtaaaatttgtggagtacaacagcccaaccatacctggagcaattcttactttcaagccatatgatattcagtcaaccattggtaaattcggtatcttgctcatgttatgaagatatgtatgcttattattgttttcagtgtatgatatacatttctcattgattagtactccttactatcttcaatttaagaactaggaagtagtaactatgtaaatctgtttttttttacaagtaactatgtaaatcttagaagaaatgttatatgaaattctgatatgtttctgatgagatcataattgtctagtttccttgtgttatgaacttgaagaaaattgtgaagatccctaatcaacatgtattacgtaatgacacaaactaactgatagaggaatctgtacatttttttctcctaagtgtgtatgttttatgcatggaatagatttgtcatcaaccttctatagactatagtttaccacagttatagttttgttttccgtataataatagcatttgcatgttatcccgagttatgtgttaagctttctctcttgatatttgtggtagattgactgtttgtttattttcatgatgttgtttgtctttagggagagaacgttcggtggcaactacagactctgaaagcccaacaacggatgcaaagagttcattctctttcagagcagaggtattctctttaagagcaaagagctccttttttttttcaaattaaaaaatatgtttttaaacattatttactttaccaaatcaaaacgctggcgaatagtttcatactagccagttagcgtgctaccctttttgtgacaatttagcataacaagatgcccgtttgcaggacgttcccattgttctagctgaacacaggaagaaggcaaatcatggcagcaatatcttgtcatttatcaggaaaggtagacggcatgcgtaagagccaaaagcgccaccggaatagctcgagactggatatatgcacgcatactttaatgaattcagtattgattggcaacaatgtacaacctaatatcactgaatccccaatttctgtcaaaccagtgtccattgaccatcatgtatgtttagctttgcatttgtgccagcagtaaattcggcccgatcatcctgaacatgtaacaaacttgaaggatcgagcagtaatatctgcttggaaagctagtttttcttcccctctacaaactctcaatatcatgtaacaaactttaatctgtctccttattatcaatgacaaagattcaggtgaggaatctctcccctccgatgacttcgtaaaaaggaaacctgaacacgaattcagcaaattctgcatcatcaaggaaaaatacatgtacgttcagtacttcagggcatcttttcctttgtgcttgagaaatcaactcccgaatcccgatatatcatatatatacatgcagtaattctcataacggtgtgaatcaactctcgtactgtactgtggcgtgctactactagtagtagtataaaggaatttcgctttttacgcgacattcttgagggtagctggcccatcataggactaattaaaagcactcgcataactactaattaagtagtaagctcctgccacaagctatgccaattcgatgagcccgctcaacatcatatcgatcgaccggctcacgcatttcattcaagaagcaccgtccggttgcatgaacgccccgcgccgcgcgtacgtagataactaccattcaaatccctaactgcctgtctgccatttctctccatctcggtctgtaaaatgccatgtatctagtaccagtagaacagttgtactacctcctgatggtctcacgtaacttctttgttccctttctcttcaattacgccattgccgtcttgcccggtcgatcaaccctagctttctaagccctacaaaagacagcatccatctgctagtgttagcttagccttcagagttcagagagagatggggaccaaccggccgcggccacgaaccaaggacttcttcgcagctccggcgctctccctcacactggttcgtcacatcgttctatcgacggcccgatctttatgtagatcattttgtctgaaattttcacctaatcacctgtgtgcttgtttgtgtttatgtacgtgcgtaggcaggcgtgttcggccggaaaaatggacctgcggcgtcgggtggagacggggtggaggaaggcgacgaggaggtgcaggctgcaggcgaggcggcggtggagatcagcagcgagaacgcggggccggggtgtagacagtcccagtccggcggtggctccggggaagacggcggccatgacgacgacgacggagagggtagtaataagaagaggaggaggaagaactaccacaggcacaccgccgaacaaatcaggatcatggaagcgtgagaatttcctccatttctgttgcgtgaatatcagcgtcaggtgtttcctgtcccctgggccgcgggtgaaaggggtgcttcaccaggcccatggatcagatagggccaggcccagaaaggatgaacttgcatgagagggagatttttttagtttaagcaagcgttccagtagttcctcaatgatctgacatgaaaatatttttcaaaatggaattttgttctgaatcggttgaatgagcaggctattcaaagagtccccacatccggatgagaggcagcggcagcaggtcagtaagcagctcggcctctctgcacgccaggtcaagttctggtttcagaaccgacgaactcagatcaaggttaattactagcgctcagtcttaactataccagtgtgctcgtcccaccgatcaacagcaaacagcaaatgaatcatgaatgcatggggattttgatctgtgcaggcggttcaggagcgacacgagaactcgctgctcaagtccgagctggagaagctccaggacgagcaccgcgcgatgagagagctcgccaagaagccatctcgctgcctaaactgcggcgtcgtggcaacctccagcgacgccgccgccgccgccacggcggcggacacccgtgaacagcggctgcgactcgagaaagccaagctcaaagctgaggtttgtatgccgccgccgcgaagccgcgcccgtcctttccggtgcgctacactgcaagacactgactccggcgaactggcgatgttgaacttgtttcagatagagaggctgcgagggacgccaggaaagtccgccgccgatggaatcgcctcgccgccgtgctccgcgtccgcgggcgccatgcagacgaacagcaggagcccgccgttgcacgaccacgacggcggcttcttacgccacgacgacgacaagccgaggatcttggagctggccacccgtgcgctggacgagctggttgggatgtgctcctccggcgagcctgtgtgggtgcggggcgtcgagaccggcagggacattctgaactacgacgagtacgtgcgcttgttccgccgcgaccacggtggttccggcgatcagatggccggctggacggttgaggcttccagggaatgtggactagtttaccttgacacgatgcatcttgtgcacactttcatggacgtggtatgtgcatggcgatatgccgatattgtgaacacacggacactagctcatacatgcatacaccttgcatgatttttttttttgtgcaggacaagtggaaggacctattccctaccatgatctcaaaggcagcgacgctggaaatgatcagcaaccgcgaagacgatggccgagacggcgtcctgcaactggtgacccgtcttgtgtctctctgcttctgaccgacgaaattcatagtgctaaacgtgtcataccttgctcgatatggtttccagatgtatgcagagcttcagacactgacaccaatggtgcccacgagggagttatacttcgcccgctactgcaagaagctggccgcggagagatgggcgatcgtcgacgtgtccttcgacgagtctgagactggcgtccacgcgtcgtcggcggtcaggtgctggaagaacccatccggctgcctcatcgaagagcagaacaacggccggtgcaaggtatatacgtagaacacagtatggttcaagctggcgtacggccgtttcaactttcaaccaaatctctgcaccgtggtttgactagatgacctgggtggagcacaccagatgccgccggtgcacggtcgcgccgttgtaccgggcggtcaccgcgagcggcgtggcgttcggcgcgagacgctgggtggccgcgctccagctccagtgcgagaggatggtcttcgccgtggcgaccaacgttccaacgagggactcgaccggtaaaaccattactgacacgtcgcatgcagcgccgcgtgatccatcatcatccatggccgtctcacggatctctcccgtacacaggggtctccacgctcgcgggcaggaggagcgttctgaaactggcgcaccggatgacgtcgagcctctgccgcaccaccggtggatcgtgtgacatggcgtggcgcagggcgccgaaaggaggcagcggcggcggtggcgacgacgacatctggctgacgtcccgggagaacgccggcgacgaccctggcgagccgcaggggctgatcgcgtgcgccgcggcgtcgacgtggctgccggtgaatccgacggctctcctcgacttactgagggatgaatcacggcgaccagaggtgagccgccgctgcgcgcatttcaacttaccctgcatgcacattatgcacactctgactcactaatcaaattgttgtagtgggacgtgatgctacccggaaaatctgttcagagccgcgtgaatcttgcaaaggggaaggaccgtaccaactgcgtcaccgcctacgtaagctaaccttccctggcagctacatgtgcatctcgtcgacacgtacattattgctttccttcggatggatgaactgcaggccgctcgaccggaagaagaagaagagagaggcggcaagtgggtcctccaggacgtctgcaccaacccctgcgagtcgacgatcgcgtacgcggcgatcgacgccgccgcgctgcagccggtcatcgccgggcacgactcgagcggcgtgcacctcctgccgtgcggattcatctcggtgatgccggacgggctcgagtccaagccggcggtgatcacggcgtcgaggaggggaggcgaggcttcgggggccggatcgctggttaccgtggcgttccaggtcccggccagcccgtcggcggcggcggccacgctctcgccggactcggtggaggccgtgacggtcctggtctcctccactctgcgtaacatcaggaaagccttggggtgcgactcgtgcgaggaggaattctagtccacgggacgcggaaatattctactcctacttcggattcgttattcgtatgatactccacgactccacgtgaccatgtttgcaaagtaaatttgcatcgtgacttaccatgaacataagtgtacagctaaagggatactcgtactatagaactacacggtactgtaaagtcaacaattaagcgttaaaaatcccccgtcttgcagacttctttatggtcaccgcaactagcagagagccgtgccatgggcggtttcttggaactcgatcatatccgttgcaatggaacgcaacaaaacgtaaagaccagcccaagacgtaatgatatcacgtctccacaccgatgacgttgggccgctgcgtcggtgagcccgtatcatcttctacaaatccgaccaccgcgtcgctcctgctcggcacgtcgtcgccgccgcttcccaaatcccttctccctctcaacaattttgcgtgcagcgctggtagcaacagtgcacaactaggctggtcaaaggtgtgcacggtggtgaagacaggatttagtgatagggggtgctggctacgagatgtaagaactcaccagctcctcggtaaacctctcggtagacaatggtgtggatcttgatggctcagttcatgctgagtagcagattggcctcacctcacctcttgttcgctctaatatgcgtagtcgccaaaagaatcattttttaaaattaggcaactaaatagcaccaattttacaaaatacatgaatgacaagacatcatttctattcatcctttttagttttggagacttgcaaccacatcgcttagttacgttaactcaggtaatcacgtaaagctaaaatctattggtcagttatgtataggctcaacttgcaactaactaatgagttaattgtatggattagatgcctaatcacccggggggtttgcagtgcatggggatgggggtgtcaggcccaccccggcacccccggtggcttcgccactgggtgtgcacacgaaaataaaaactcaaacacaataaaaattcgtctaaaagcaggataaaaagagataaaaaaagagagagaaaagcaacggactgcagaactatagccagctgcagcatgaactccaatacgtaatgtgcgtatgacaggtgggaccaggtatctatctattatataattaaaggaatagaaaaaggagcatccacgttcgctttcatggtctagaaattctcttattaatcggagaaaaagaaaaggcagagtccatatagaaatacaatttgaaaatagttgaaatttggaattaaaaataaggaatattagaagatgagactagagtctatatagaaatacaatttagaaatagttgaaattcggaattgaaaaataaggaatattagaagaggagactagagtccatatagaaatacaattaggaaataactgaaattcggaattaaaaataaggaatattaaaagtagagtatagattccatatagaaatacgattaggaaataactgaaatttgaaattaaaaataaggaacattagaagaagtagagtatagagtctatatagaaatataactagtaaataatagaaattcggaattaaaaataaggaatattagaagtagagtatagagtccgtatagaagtacaattaggaaataacagaaatttggaattaaaaataatgaatattagaagtagagtatagagtccatataggaatacaattaagaaaataatagaaattcggaattaaaaaaataaggaatattagaagtagagtatagagtccatataggaatttaaaactaactaaaattcggaaaaaaaagaggcctccacgttcgctctcctggcctagaaattctcatattaatcggagaaaaaaaagcagagtccatatagaaatacaatttagaaataactgaaattcggaattaaaaaataaggaatattagaagaggagactagagtagttattacacattagtagtttcgtaaagttattgcaaaatttaaaattatgttgtcattgtaatatattttaataatataatgagaaaacatatatactattatatgagagaaaatataatgatgctagccgcgcaatctgcgctggccaccatgcttgttaatagtatagtaagcaactattgtatgaattgactattatattggctatggatgatttgtagttagtagttggctatactattaaacttgctctaaatgaagttctccaatttgtgtgtttagttcacgtcaaaattagaaatttggttgaaattggaacgatgtgacggaaaaattggaagtttatgtgtgtagaaaagttttgatgtgatggaaaagttggaagtttggctgtatttattccacaccataattgaaagtttgaataaattaaaacgatgggataaaaaaattggaagtttatgtgtgtagaaaaatttaatatgacggaaaagttaaaaatttatagaacaagattggaatctaaacagaacctttgtttaaagagtttggaaataaactcggcctttgtcgcaaaatttcgggccttacctcgtggaggcgtggagctggcccttgccgccacggtacgctttccctgacggatcgggccaagctgcctatataaaaagtcgtcgtgccacactgccacgggccacggcaccaccatcgaacaaagaatagcgcgcacgcattcgcctcgacgccgcatactcgcgtccacgagccccgcgagaaacagctatccacgtcatccgcggcggccgcccgccgttttcccttttccaggcgcgactcggcggccgcacccggttgcgcacgccgctcccccccc

SEQ ID NO: 7416 - DNA, 1298 bp, Oryza sativa
agaatgacttacattgtgaaacggagggagtacgaggcaatattattcttttgtaattaaaacacctgggcagctgtatttttgcagcatataactttttttttgtgtcttttatgttatgttgtcatttacaggatttatcaaagctaaacagaaatcccgcacaagtcatttatatcagtgggcatgctctggaatcatgcctgcagcctgaaaattgtgttgagatcaaaccttggaagcttgaaaatgatgacactcaactgcttgatcttattccctttcttgaatgtaagacttttaatcaatttctcttattatcctgtcatccagttattttttttttccatttttgtggttcttaggaatgcaagtgcattagccaactaacccctcatattatttcattcctgtggtttttgaagcatgcttgattgccccacttgcatccttggtatttctgtttttcattcttgtcaatctgtgcggcagatgttgctatggcaagaccttcggatatcagggctgttcttgcgtcctatcaaggccgtgatatacctgctgagtttattgagcgttcaaaggagcaccagaggtaagcagatgctttccataatcttcaaatagttgtagctgatgctaatcttctcaagtgaaagtaaatccatggattgcaccagaataagccacgccatcaaacaagtatgactcatcagatgcacaattgaaatgaaaaaagaccgttggatcgaagagagcaggagcagtcaaaaagcaaacattaccgttaaaactctggacccttccaacactcttgagaatgagaatagcaggaagagtacagaaagaactatatgtacccgtacccttttcaatttttgccgtatcctactccctccattccaaaatataagtcataaccacccttaacccaaaaaccaagaaaataattattatcatcttgtagtttggattatcctaataaatacaatgcatgcatccaatagaattagagaacatgagagtggaggatttaaaaaagtaataatttaatggagaaggggtcataattaattgcctacatgcatgcatttcttatactccctccattttttaatagataacgccgttgactttttctcacatgtttgaccattcgtcttattcaaaaaatttacgtaattataatttattttgttatgagttgttttatcactcatagtcctttaagtgtgatttatatcttatacatttgcataaaatttttgaataagacgaatggtcagggctgcaggaat

SEQ ID NO: 7417 - DNA, 23953 bp, Oryza sativa
ggaacaacaggtgaagcagtgtgtttgtagaatttatgtcctatttcacgctatatttgtcttttaacttccaccttctaactgttttaggggcatgtccactgtccatgcaatgtttatcacattaatgtcagtttacctagtattcttctccaacctattctctgatgagctggatggcccagtaacagttcggagttcaaacctctccaattttacactgggggtaacatatgtcactgtttatccgcattgaataataggttatgctgatatatacattttctccttttgccacatgttagctgaattaaatctgtttaggtttctctggggtacttcatcgctgaccttgctatgttatcctgggcttatccttcccttggcggaatggagtatgtaagtgagcatagttgatcattaccatttattttatttcaccatttgtttactttctaggttactgctattcagtgtttattcaattactgtgtgctctgctgttcatattattcatcacttgggttgaccattgtcaggttcttcaccacttgctgtcaattatttctttagtctatgctatttattctgaagaaggacagttgtacacatacatggttctcatctctgaaacaaccacacctggaatcaacctccgatggtatgcttcatgaaaaagatcatgcaccttttctttatacttattttacttcaatctatctgacctgttatgtaccttcttcatcaaaggtttcttgatactgttggaatgaaaagatcgaaagcctatcttgtcaatggtgttacaatgtttgttgcatggctggtaagtgaaagttgctacactgtaattggaggttagaagttaaaaatcatgcattgactgcaggtgatcggatagttatgtactattattagatgtactacatgcatgcacgaattataattgaatctgtatatagcgagattcaaccttgttatttgttgtgtgtacgtaagtatgagagggagggagatttggaatcgtgcttaatcaataatagttgcctaatcagttagacgctgtctctggtgctgtttaggaagttcttatatatctcaaatgtggaccaccatttgcttactacaggtggcaaggataattttgttcatctacttgttttaccacatatactttcacattgatcaggtgctatatccttctgatttgatatatgggtacatgtctacatgacaaaaatcactgaaattaaactgttcttgtttattgacaggttaagcagatgcgcacctttagctgcattctgatattcgctgtgcccacaatactattagtgatgaacacagtgtggtttgtcaaaatcttgagaggtctcaagaagacgctagccaagaggcagtgaagagtggtgaattgctcataggcgcatctacaaccatcctttcgtacagtcacatacaactacatatattttctacgttaagctttatagtgcaactcatagcgcaagcaaaagatcccttgtacacatgttggaaaaatctcctcaacattgccgaaaatttttgtccctgtacggttctacattgtacatatatatatatgcacgtctagttatggctgaggatgcttttatctgtgcactaatgattcatagtttcaattttcaacaactggagatactgccatagtggccatctcatagacatatagagaactccatgattctagatacaacttgaatgtgcaattcgtattgctctcactatgaacgtttttgtagctcgattctaactccagatttgtagttcattcccgtcatttcaagggagctggtaacactcatcatttccgttcttcaaatatcgtatttctgtctagtccagcgtcgccttaattggccttctaagtggtagatgccgtcgtcattgttgtagtagatggtgcggtcgatgccatcgtatctgtcctagatggtacattgttgtcgtagatggtgcggtcgatgccatcgtatctgtcctagatggtatggtcgatgccattgtatctgtagcgtgctgattattcccttttacagttacagaaacctctaaagcaggaacaatagtggagtagtatatatttatacataactattatctgaactagatattttattttaagttgattatatgtgatttagagctagtagcttgctgtaccattaaactactctaaatacgagaagcacagaagaagagtcgttgccacactttgggtaattacgaaggaaagatcgtgagttgcgactgtcacgagcacgcggttcgaacgcgcgcgggtgctgacttggcgttgacctgtgaaattctctcgcttcactcgagtctcttggcccttgctcgaggcagactcatcgagcagcccaaagccccaaacgactgcgcgcgagcgatacactggcgctgcgcctcgctgccgtaccagagagcgccgccgtcgacctgagcgccgtcgctaataccctgccgtgcatatcctaccgggactcgatccggagcgtcgccgccgtcactccggcggccgaggcctctcttccagtcggaagattccgcctccacctggtcgtcttcctcctacgcgtccgactgctccggccactcctccggcgtctccgccgccgcggccgctggcttcagggcactcacggcgcacgagctcagggaggtcgcgcgtcgcatggtcgccgacggctacgcccagcgcatggtccaagcgttcgacgacgcggcgacggtcgaggtcctcgagggggaggtggttcttcgagctcgacgtcgactgggtcctccgaatccgcgaggggcaggggttacggcagctggagaagtcggccgcctcctccccgtcgtcgtcgccgctgcaagatctggtggagagtgacagattatgtcttgtttttactatatatttttaacatctatttttgagataatagttggctgccttaggatgtaaggcactagtaattttttgagataatagttggctgccttaggatgtaaggcactagtagttttccttaggatataagccactcctaatttttaggatgtaagccactaatctataccttatggtgtaagccactggcctatatatatatatccaaccagccatagttgattgagtggagaatagaaattaaactagcctcaaaacctgtgttccttttgctaacaattggtatcagagcaaggtttatctgacttccatcgactccccatccaaaaatgtctctccactccattcgttccccctctctctcgtcccatgcctcaagcacttccagcggacgaggcagcaggcggtcggcggccgacgctgagggcgacggcgatgcgactgctgttgcgcaggaggcgcgagcggctgcgcgggaagcgcgcacgacgcatgaggaagtggaggcacggctgcaggcagccacgagggcggcacgtctcgcggcggcagaagctgaagcagcacgcaccgcggaggcggccaggcaggctgcagctgtgttgatagaaaacacgaggcctgggagatctacttaactccggtgcaggtccaaagctcgccttcgaatgtatgagcgtgccagttgatttgatcctgtaatcaacaagaaatagagacaaagaattcgtggttaaatctataaatgatagccgatcggctaggtgccgatgtcatatatgaatcgatcggcggttataaatagaaagtaaggaactaaatctattcgatcggctgtagatattaacgatatatagttcttatattaatatatacttaaatcaagtgattgggatagatcggtcaccatgccgagacagtataaatcacttagatcgaaatatatattaataacaggattatatatgtttatagcatagccgatcagatagatctagcatgtatcggctaatactccgatactactttatataaagatatcaaaacaaatataatttaccaaacaaaagcttaatatacttaaatacaataagatcttgatataaagggcggatttaacatgtcattgaagcatatagatcgaatatggttaaatcagataagatcggctgaaactccgatactaccctaatcggcaaccataggacatgctagagattgatattctaagcacgacttaatagatcaaactcaactgatgcagcattaagtatgaaaagaagaacaatatctagacaatcaagccgctgggtgtttcataaagtggtagatatcttatataatctaggacaacgtcgctatttaacctaatcggctgccttctattaacagatgttagccgattgtaggttagatgacgatattgccaaagattatgtaagatatatgataacttgacgaattatatagacaaaattagagtgtcataatgatggaagcactaatctcgagaacacaagtcgtcataacaagttttacctcttgttgaagatcgaaaccgatgtagctcaacccgaaagtaagaactcgtcgaaacaaaactaaagcaaaaaggtggcgatgcgccaaaattgtattgaacatgtgtgttaaaaattacatagggctcggggtctatttatacccgagaattacaagatatgtccatactggacacgaccgctatctctaacaaactctaagataccataagtctttgcagcagacttttgcccaaacatatatctaaggaagttacataaaacatcctaattaatagatacaattgccttctcaggactctatccatgtgcggcaatcatcttgaagcacctcaattcaacccaatgtcatacaccaaattatactgtcagaatcggctgcatcggctcacctagtccgactcagacccagccgatcctaatcgtagccgatttggaattcagccgattattgctctgttctcggatcaatctccgccttcgactccaccttgatctaatctccttttccgactgttgttgcgcgggttgcgcaggaggcgcgagcggctgtgcgggaagcgcgcgcggcgcgtgaggaagcagaggcgcggctgcaggtagccacgagggcggcacgtctcgtggcagcagaagctgaagcagcacgcaccgcggaggccgccaggcaggctgcagctgctgctgctactttgcgagctgaggaggaggaggagcgacgtgacctggagctgacagacgcggcccgcgtgcgacgcgacgcggaccgggatcgacacataggccgacgtgatcgcgacttcagcccccatcgcagaggatcagatctccaccgcggtgaggaggagcggcgcgatccatggcgcgatcctcgaatcaaccgcgctctggagacccagcgactccgggagcaggcagcggcgattgaggcacaactggacttcgaccgggagcagggtggacgagacgttggcgcacggagccctcgcaggcagcgcgcctccccttccccggaccggcgccgtggtcgccgtggacgctccggctctcctcccgttgtgcagatcgtcgtcaaggatgttggcggcgcatggcccatgctcaccaagactaactacgccgagtgggcgatggtgatgaaggtgaagttgcaggcgcgccacatgtgggacgcggttcgatacggcgacgtcgactacggggaagatcggcgggcgttggaggtgctccttgctgctgttccgacggagatccagtcctccatcgcgagcaagcggaccgccaaggacgcctaggacgccatcgcttcggtacgcattggcagcgaccgcgcccgcaggtccacgcttcagaagctgcgtcaggattgggagaacctggccttcaagccgggttaggacatcgactactttgttctccgcctcaactccttgcaacagcggttggcgcagctcggcgacaccaccatcgatgaggagagagccgtggagaagctcctttgcgtcgtccccgagaagtacacgcagctggctctgtcgatcgagacgctgctggacttcaccgagctcacgaacgaagaggtgacaggtcgcctcaaggccgtcgacaaccgcaagcagctacctccctcagagccgatcaccattggtggcaagcttttcttcaccaaggagaagtggctcgcccgccaacaagagcggaagaagggggaggccacaagctcttcggcttcgggatcgtcgagcagccgcaagcgtcgaccacgcaagtgggagaaggcgcgtagtggcgctcttggcggcgccgatggcgagcgcaagggcagccgcaacgacacctgccacaactgcgggaagaccggccactgggccaaggactgccggcaggcgaagcacggcggtcaagcacacgtcgctcaagcgcaggagggtgatgaggtggctctgtttttcgtacacggaagcatcgagccacacttcactcccacaccggacgctaccgcgcccctccacctcgacgagctgtgggcccacgtcttcctcagcaacggatcctgcgacgacaagatcgacgggtggtgcctcgacactggtgccactcaccacatgaccgggcgacgggaattcttctccaagcttgactccagtgttcaaggctccgtcaagtttgaggacgcctcagccgtggagatcaagggcgtcggctccatcctcttcaccaccaagaccggcgagcaccggctgctcaccggtgtctactacatccccgcgctgaggaactccatcatcagtttgggacaactggatgagaacggcttgctcgtggagatagaggacggggtcttgcgggtttgggatcgccatcgtcgccttctcgtcaaggtgaacaggggtgccaaccgcctctatgttctccatgtacaggtggcgcagcccgtgtgccttgcagcccgccgcgacgatgatgcatggcggtggcacgagcgctttgggcacctcaacttcgaggccttgaagcagctcagcaacaaggagatggtgcagggcatgccacgagtcgagcacgtggagcagttttgcgacacctgcgtcctcaccaagcagcggcgactcccctttccccgccaagcaagtttctgcgccaaggagaagttggagctcgtgcacggcgacctctgcggtcccgtgactccggccacacctggaggccggcgcttcttcctgctgctcgtcgacgacgtgtcctgctacatgtgggtggtcctgctcgactccaaggcagtggctgcagacgccatcaagcaccatcaagttgctgcggagaaggagtgcggccgcaagcttcgggtgctacacaccgacaacggtggcgagttcacgacggctgagttcgcagcgtactgcgccgacgagaggatccagcgccacttctccgcgccatacaccccgcagcagaacggcgttgtggagcgccgcaaccagacagtggtggccactgcccgcgccctcctcaagcaaagagggatgccggcaatctactggggggaggcggtgatgactgccgtccatctcctcaaccgctcgcccaccaaggcccttgatggcaagacgtcgtacgaggcctggcacgggcgcaagccggtggtgagccacctccgcgtctttggctgtctcgccttcgccaaggagctcaaccacgtcggcaagctcaacgaccggagctcgccgggagtcttcatcggctatgcggagggtgtcaaggcctaccgcatcctcgacccttcgacgcagcacgtccgcatttctcgggacgtcgtgttcgacgaagggcgaggttgggcttcgtacaaggcggtggacgacggctcgacttcgactctcagagacttcgtcgtcgactacgtccactttagggcagccgggggagctagcagctcatcttcaccgagctcgtccacctcggcacccggctcgccatcagctccggcgagtcctctaccacctacaccaccagcaactcctccatcaccagctacgccccgctctcctacaccggcgcccacaccaccggtggagttcgccactccgttgtccaacgacgaggatcgtgttgatgcgtaccacgacgacgagcctctgcgctaccgcaccatggacaacatcttcggtgatcagcccgtccctggactggagacgcgcgacttcgaggccgagttgcacctggcgcatgaggacggcgagccctgctccttcgcagaggcgaatggagatgtggcatggcgcactgcgatgcagcacgagatggacgcggtcgagcggaactggacgtgggtgttggcagatcttcctgccagccaccgcgccatcacccttaagtgggtctacaagctcaagaaggatgaggccggggcggtgatcaagcacaaggcacgtctagtggcgcgcggcttcgttcagcaggagggagtcgactttgacgacgccttcgcgcccgttgcgcgaatggagtctgttcgtctgctcctcgcgctggcagcccaggaaggatggcgtgtgcaccacatggatgtcaagtccgccttcctcaacggagacctgaaggaggaggtctacgtccaccagccgccgggattcgtcatccccggcaaggagaacaaggttctccgcctgcgcaaggccctctacggcttgcggcaggccctctacgccaagctggactccactctcaagcaaatggggttccagcagaactctcacgaagctgctgtctaccagcggggcaaggacggcaatgccctgttggtaggcgtctacgtcgacgacttggtgatcaccggcaccaaggaggctgaggtggaggcgtttaaggaggagatgaaggcgactttccagatgagcgatttgggccttctctctttctacctggggatcgaggtccaccaggacagctctggcatctcccttcgccaaaccgcctacgccaagtgcatcgtcgagttgggcgggctcaccggctgcaacccagcctacactcccatggaggaaaggttgaagctgagccgcgacagcacggctgaggaggtcgacgccacgcagtaccggcatattgtgggcagccttcgctacctcgtccacacgcggccagacttggcatttgctgttggctatgtcagccggttcatgcagcgaccgacgacagagcaccagcaggctgtcacgtcgagggcaccaccgactacggctttcactacccgaggtgtcccggtgcgcagcacttcatcgggtacagcgacagcgacctcgccggcgacagcgacacgagcaagagcaccagtggcacgctgttcttcctcggcaagtgcctgatcagctggcagtcggtcaagcaacaagtggtggccctgtctagttgcgaggcagagtacatcgctaccacaaccgcctcaactcaagctctctggttggctcggctgctgggtgatctcttgggcagaaacactgaagcagtggagctcaggatggacagcaagtccgctttggccttggcaaagaatcccgtcttccatgagcgcagcaagcacatccgcatcaagtatcatttcattcggagctgcttggaggaggggagcatcaaggccagctacattaacacccaggatcagctcgccgatcttctcaccaagtcccttgggcgggtcaagttccaggagtttcgcgccaggattggaatggttcaaattccccaaaaggcgccacacatgacttagggggagaatgacagattaagtcttgtttttactatatgcttttaacatctatttttggaataatagttggctgccttaggatgtaaaccactagtagttttccttaggatgtaagccactcctagtttcttaggatataagccactagcctatatatatatatatatatatatatatatatatatatatatatatatatatatatctgtgtgtgtgtgtatgtatccaaccagccatagttgattgagtggagaatagaaattaaactagccccaaaatctgtgttccttttgctaacaacgagccgacgccgtcgctcgcgcggttcggggaagcttgcgtcgccaagatggtcggtttcgtcgacgccgtcctcgccgctctcaagcttgtccacgctccgccgccggagaagctacacgccctggtcagcatgtacgggcacgccatggacgcctcgtctctcctctggtcacagtgccgccgcgtgctgatcacccaccaaaccacccaggccatcacgttcgacgccatggagaacgccctgttcaggaaggcgaccgagctgcacggcgccatatcgagcaccatggaggagaccaaggcgctcgtcgaggccgccgccgacgacgacccgacggagatcgcgcgaggtagcggagacgacgtgcacacgagcgctcgcgtcatggtggactgcgtcgcgtacgctgggaacgtacaggggatacctgtacgccatgatcgacgtacgacgccatcggctacctgaggcgtctcatcaggaggaaatccaagctgtgccagggcacgggcctgaggtacattttcctgctcaacaactcgcatttcgtggcgcagcagctcgagccgttctccaacctacggtggattcgttgccagtggcggctacatcgacggctatttcagcgcttcttgggcgcccgtgctgtcctgcctatcgtcgaagtctggcctctctccctggagcaacaagtcctcgccattgaggaaattcgagttggcgttccatgagacgtacacggctcagaagctgtggaaggtcccaagccctgagcttagaggaaggctgcgaaaaactatcaccgagagagttgtttcaggttatcgcgagtacttgttggagcatcctgagctgaagagactggttagccgcggaaacagcaacactcctgctgacctggaggagatgctggcagagctgttcgaagggtgacaagttatggtctacagtagtttgcagcttcagaattgtaaatactgctgtgttggtttcatttttgtttctattccattttatcttgtgtttcactgtcaaatctgggtgcccttgtgcaagattccgtagatatatagataattagttgatatgcacagctgcaattacacaagatttttcttttttgcatatccattacctgtgtctcacagccaaaaaaaacacttgttctccgatacatagcgttggcgataagcaacgccgtctttttcttacaaaacttgcagcttctacgatctcaataatggcagtatgcttacgagacaattagctatatatctattgaaaagattttatcattatagccatcctgaacaaaacagaatgctacaaacatattcacgagagacactgctttggagcctctaatcagctggttttcttttgccagtttcaccgcatgggtcccataaaccagctgagtgcagcccagaacagcactttctaatattcgaagaagcttcgatatctaattgttataccactgtaagactatacaggtctattgatcgatatctcttgtcccagtaacatcacgagcggaaatttgttacaaaacttctgtcatttctttgcaaccttgggaggtggcgaagatgacgatgaagatgacaagatagaaaacatgctattatcagctctgtctttgctgaatgccttgcgcacatcctcctttaactcacagaaccgcatccttttaacattttgctcatcagaagtgccattttggaggtcgagtgcatcaggactatcgggcaaatcatcctccagaaatttgtcgagcacctgcgagcagttagggaagtagcgacgtcccagctcaactgaaaacagaagaaaaaaaatatcataagaatgatcatcaagttctgaggaaagggtgctgagagtaaaacaaattaccaatcaacatttgagtaaataaaaaccccaactatttgtgctcattaggttcaaagtatgcaaaatgtggaaatcacgccagttttacaagagacaggaatgtttttaacatgaactacaacatcctcacataacatttgacaactaaataattattttccgtgttccattagcagttaaaattttagccgggaactagcaacgtgcgtgctggggtgatttttttagtgagagatggtggaagaaatggggattttgaactaccacggtatcaacaccaccaactcaaacatttaaagtacgaagatgaaggtattagcaacatgtgagaatttctgatggtaatcagtgacatctactcataagctataatagtttgcatataaagaatgtgtcatcagttccgacctgttttcatgagtgcatccacccttgaacggagccttttgttttgtgttactggtgtctcgttcagatcgacttccttcaattttccagaagtgctagctgcaggaacaatgccaaattctggtgtggtgtctgcttgtgcaatttgcattgcaacctttgcttctgcaggaaaaaataatcttgcaaatgcaactgcaagagaaaatgcaatgtgtcagcatggattctccaggtgaatgtagtatggttgaaagcaaacgtggtaaatgctaggatcacttgtttatgtagcataaatgtataatttttctccatcctgtttctgttcgagaaaggtctgaaacaagctgcaccacgaagtgctattctaccgagcatgaaaagagacttcacctctgttttcaaggtagagaagcttcatgtgaagatcgtcagccaacaaaggcgaggtgacagaatcttccactgccataggtttccttatcatctccctatctaatatatcaatacataatctgtctttgtttgactcttggccttgctccatctttgtattgtagtctttcatccttgttaacctccggcagatactcattgcactctggccatcagcagtcaattgtgatacagctgctcctttgtttaggagacacatgataatagctggctctctcctcatagcagccagatggagtgccgtgtatccacgcgaattcttcaaattcaagttggcaagtctcaagtctaacaactccgaaacaactttcgaatcacagtaagcagcagcatagtgcaatgcattggcatcatccaaggtgatctcagattcgttaagaagcaacttcacaagctcaacatcatcagaatccagtgccctgtggattcttctgacccttttctcatgtacagggtctgaaatgacggtgtcaccctcatttggctgagatttttggcgaatctcttttatctgaacagcaacttctggaggaagttccttatccaacgatacattatcaagatttgatcttgcaattctccgaatacatttttcaagcactggagtcagctctgaatgaaaagcaacttgcagaattggaagaacatcttctactagagtcttatcgacgaagttaagaagccgtcgctgtggtagaagaagaccgtattaacccagattaaacaacaggtcataaaaatataagctaaaagactttgggttattggacatgtagtggattcataaaccgttgaactatataagctgagacaaccaagctaattagtccactaaccaatctggagcacactgatacacatcaccaggaccaggactgcatcctagctcctctaatcgaacccaatatagatttagcaagtttctttcaacttaaaaaaggtataacacaatctagttagaagatctgaagtggggacttgagagcaatgtttacaagctatcaagcttatgtaacacagcctatgtgcttgaacgacttccagaatccagactcaagacatcgtgcagcttgaagttattcgcatgcaaaaattggttgaaaatatgtttacaccatcaaatacagattgcataaaaatataatcggtgacagaacagtttctagttctgcagctaccgtttttggtatcctaacaagcacaagaagagcatccttttgtatctcacctggaacagcgagatgagctcggtgatcttgaacgcccacgccgcgtacatttgctcgacgttgaacctgatcgccggcgggcacgagtcgtgcgggcacatggggtcggcgcaggacaccacgtcatccggcgccggccggagcttgcccgtgtacaggtaacccagcagcgacaggaaggcatcgcgccccacgcggcctcccggcacgagctcctccatcttgtaccgcggcctccccccagtcctctcccctcccccaccaccgccgccgccgccgccgccggcagccccatcgccgccgcggccgcgcgccgcgaagaggttgtagaagaaggtgctgcgggcggcgaggatgcagcggtggactggcacgggcgggccaccgtcggccacgtcgacgtcggcgtcgctgcagtcgaggtcggaatcgaggaggagccgctcgaggttagcgctaagccgattcaggctcaccacctccacgctactactccctcctcctcctcctcctcctccgccgccgccgccctccccggcggcaaccggcgccgcctgcgccgccaccgcccctgcccccggcggcgcaagagagaccgagcacgggctagacccgttcgagaggtacgaggacgacgacgcgatggtgatggacgacgagggctccatggctattaccaccaccgcgctacgcgccggcatctcactgctactaataccaccaccaccactactactcgtgccggatcaccatggcgggttcggggaatccaaaggctcccccactttccggcgcctcccgggccaaaccacccaattccggcgctcccccctctgctcgtctccacgcagatccgcgtcggcaaacaagctccccaaaccaaagtaccaaacactttcgaccccccgcctgtttgggaaacggatctcggagagagggggagagagagagagagagaaaaagaaatccttttctttcctcgcgagcggccggagtggagggaattatttggaaattggaagcgactgcgacctggtggtggtaggggagaagaacagtgggggtcaaacggaatcgcggggaggcagttgcgaggaaaccaggggctttggctcgcggcgagggatgagaggaggaggaggaggaaaaaaaaatgggaggaagacgacgaggacgaaggggggaaatcggagggaggaggagaccgatggatttgttctgtctgtcctctcctcggtgctattcatttctttttccttttcttctgttgggatcgagttggaaaagaattcttcatctgggaccttttaaaaatggttttttagtttctttttcatactggtggtatataatttagtgagttgtctaggaggattttgatgggtagggtcaggtgtggggaggcgaggatctttttgttgttgccgtcctctctcgtgcctttgggaaatagtatgagtaaaatacatgtgaaatataaattagagtgtgtttgaggctacgaagatgatgtcagcacacacgtaaaatacaaaaactattaacatatgagtttatattattataaacttgaaagtatttttattttatattttaaagcaatttttatacataaaatgtttttaagaaacacatcgttaagctgttttaaaaacatgttaaaaaaacataggtaaaatatgtatcttaataaaaaatatatactgtaagtaaaaaacttaaaaactagtaatttttaaaggaaaaggtatactttattttaaactcacactattcataaaagaatattattgatattgtttaagataatcaaagatgaggaagagaagggagtacaactgggtttgaaggttaaaacgaaaaaaaatactattaaagatctaatggacatctacttagaaaatagtctctgtgaaacaaatcttttaggtgcggagagagtacatacatcgctacacaaacggcaagtctatttctatttagtgtttgtgattttagtcaatctagatccaatagtagggttatttgtcaaccagtattagactcttttctatgagtatgtggtacaatagagagtctacaaaaattccattcatgtgctgtacactcacagcatcaagtaatttaaacgtgctgtaaaaagccctcaaaatgtgcaagttcagatattcctatgcacctagtattagatattttattgagcgaaaatagcttaaatttttccagtagcactactgttcagatcagtcagcatccaacacatctccttcatttctttttgccatacacatcacctcaccccccggtcaccccaccgggagtctgtacccttccttgccgtgcactgcggccgtccacatctctctctctctctctctatctctctctcgtctcgccgctatgccgtggcatcgcctctcttcacacgcctttcctgtggcgttccaccatacctctgggagctaatgatgttgggctgatccattgatcgaacaccacaaaactgactagagatctaaggcattcaccgctactagcctgcaccaccttgtctcggcattaccggtcattttcgtcgaattaaacacgatcttgttgttgaaagatcacgaacatgaggtgaccctaacaaattactagtaacacatccgttataataaaaaaaaagtacagtgtacggacggttcttgtaaggtgtgtcatccagattcttaagctctcaagatatatattcaagttccagaaattgtcctagtgtgtcatctagatctcaaatcgccacaccctcttcaagatcctacgtgacgttgatgtggcatgccacacaaatatgacgtggtgttattttgactgacaaatgggacacatttattttttttttctttttctttttttcttctctttttcccctttattctcctttctctgtgacccgagcagaagaaagtaaaaaaagaagaatgagaagaaaacggaaaagaaaaagaaaaataaaagaaggaaaaaaaataaaaggacacgtcacgtccatgtggcacaccacatcagcgccatgtaggatctaaaggggatgtgtcaatttgggacttagatgatacattttgacaagttctgagaccattttcagagtttagggacctatatgacacaaccctataagattaagaaccgctaatacactttactctaaaataaaaggtatagtaacttttggtcatacttttagaccagtaaaatcattttcttcgtgataagtatgatagcataagggcagtcccaactcatagtgtccataagcagtgtctatggtgccatgtcaataagacatcacaatagaaactacacttcacaacccatgatttgttaaagtgggccattaataaatacaccatctctcttctctaccaatcatatttattcttcatctattatgaagacaatattctctcccaatgcaaaacttgatagtgtctagtgcataggttctcgtgttgaagctgtgttttgcatgagacccagtttcttcatctcttcactctctctcttaattaatatggtaccacataagttaaaagtcctacatggcaatgtagttaatgctataagtactatcctaaatagagagttgggacttccctaattcctattagaccaaacaagtgagaaatttattggtctagatttgagtctatcctgccagaagagcggtaacaaggttgcgtttaaatgaggggttagcttatacttatccgtaagataaatcattattgaacgactacttatctattaactattacaaatttaaataataatgttatcattttaaaataattttttgtataaatagtttttttgaaaaaataaccgttcaacaatttggtagcgtgtttaggttgaataagaaagtagttcaatccaaacgttaatgttgtcatgttgatcttgtgctcgaagaaaataacagtactccatctattctaaaatataataatttgtaaccatcaatttgaacaaaagtaaaaattttaaaatatagcagcttaaaaaataaaataattatgctccttcatatttgtagttaaaattactatatattttagaatcggtgtaatagcatggattgtcaggattagttttactgttccttgtggttatcctcatagaaagcggccggacagatggttatcgcgacgtgacatgtacggtgagaggctcacgccatcacgtcgtgccctggccaagagaggcaaacccccagcgttatcctctcctactactccttccgtctcgtaatagatgacatttttgattttttatttataacgtttgaccattcattttatttaaaaaattagtgcaaatataaaaaaagataagtcatatgtaaaatacttttgataataaagcaaatgataaacaaaataaataataattctaaaattttttaaataagacgaatgatcaaacattgacaaataaaaacttaaaaagacgagtaatatgggacggaggtctccaaagcacaggtggcggggcagcgcagggcagaggccgcaggcgcgtgtgtgtactgtggataggccgtcgaaatcaccacctcctcctctcctcctcccaggctccagctcgctcggtcggcttccccgtctttgcgcatgccgagccgatatgtcccgtaggtacacgatacagaagttgccgtaacacacacaccgcgtgcaacgcaaacggcgcaggcaaaaaggaaaatccgtggtcgcgggacgcggagacgcaaccgcgatgcgccgcgatctccccaaggtttttttcttttgctcggcaactcggtgcatcttgttgcctggccggccgcagcagctgctgctgcgctgcgcgcgactgtttttttagcggaaagatggcatcggcccggtttttttagtacgtaggagtactgtattgactccctccatcccataatataataatataagggattttgagttgttgtttgtattgtttgaccactcgtcttattcaaaaaaaatttgtgtaaatataaaaaacaaaaaattgtgcttaaagtgctttggataataaagtaagtcaaaaaaataaataataattttaaatttttttaataagatgagtggttaaacagtgtaaataaaaatttaaaatctcttatattataagacggaagaagtagtaactacgggtgatggttagatcttgtgaaaattgcaggaatacgtagtttagtcgtggggtgttaataaactaatgcggtcatggcaaagttgaccaggactccccgacctttaaagtcgttaagacttggggactaatataaaacactcctgagatgggatcgacagctctcccccaccggagcatttttagcaaaatatgcttacgcttgcgaatggcgaaagcatcaacctttctttgcgtcctcaaaagagagagaacttctttgcgattaaaaaaagcagcagctattttagaacgtagtaacggaaacacgatgtactgtactgtactattttatttgattgattgattgttgactcggctatacgtggtgtgaatataactttgctaacgccatgatcccagctcagcatgctcataaatttatcacggccgatgtcagcaatgagctatatcgaaacctgaatcacaatgtaaggaagtaatctattggtctatgacgttttcacttgagcacccgggcttgttcccttcattgtccctaataaacctaagggctccttggttgctcctaattaacgtaaggactactaatttattgcaatagcctattagtaccacgatgtttatcgcaatggttgccataaaatttaattttgttgcattagttctatattacaacgaatttaagagtcctaagatattatacacaattgtactactctgttaaaatcagtactactcttattgtagattacttgtcattctaatattcatattttgtatcgaaatgcttcactctcacatttcgatacaaaatgcttcactctcacatttcaaatgagttttagaggtggcattccatctctactctgtttgtcaatgcaggcaactactgctactttaggaaacatttgggatatagttaatgagggtaaccttgttattagagacatctacatgtttaatgtgaaatttgctaaaatgattgataacattaaacgaaaggtagcaatagtcctttatttttcacttcttatctacaaaattctccctccgtctaaaaaaaagataaactctgggtttccgtgtccaacgtttgactgtccgtcttatatgaaattttttttataattagtattttcattgttgttagatgataaaacatgattaatactttatgcgtgacttgtctttttaattttttttcataatttttttaaataagacggacggttaaatgttggacacggaagcctagagtttgtcttttttttgagacggagggagtataattgctaaagggtctatgcgttttgctattgtagcaatagtcctttatttcacttcggatgactctatttggatccggatcaaatgcagtagtagtatggactgtaacttaagcagctgtagctgctacgttggatctaaatccaacggtaaggattaggccggttgctgtagcaaaagtaccacgacataaaatattgttcagggtactatagcacgagtacggtagcagttgatctgtactgttgatcacaaaaataaatagctgaaaatggatgcagtcctaaggtgcagtcgcaattacgactgcaccgatctcaatccactctatatcgtattctggctttgtactatgtcattggagaggcaggagatgtgaagttgtgaaccattccaattatattctacaaatatatcctccataaaacaataatctgctgacaataggaggcaattattggtctaatcagtagtagtactggtcagatgctgtatactgcgatgatcatatcacaaaatagtttcgcatgacagtatggcacgagtcgtcgagaacgaggtagtacggcgaaaacatgatggcgccactgcccactggtcgatgcccgtacaagagcaaagccttttttcacgtacgagtattaaacctgccattgggccattaaaacacgtcgacatccgccagctatgtaacgtgatgggcgtggcaaatccgtgttccaaacgggcggatgttggcacctgctagacattcaatctcaggtcaggtggtcctgagagacacgtgcattacggagtactacaaggttgctacagtgttattattttttgggtgctagtagtgccccattggtacaagagcaattatatttcactcaatttctcttcttcacgaagagaagagaggccggtcctggaggagcttctagctgcagtttctctcggaattgctgcagttcctcttataatcagaagctccctaaatagtctagctttcaatgattctgagaagctatatttgtaaaatcctgaaaataacctaaaaaccagaagttgtgaaacccaacttttccagattatcaggagctcagctgcttatccagcttcccaacaggcccgcagcgtctctgggtgcgactgctatctcaaaccagaacgggaaaatttaggcgcacggcataacatcactgtggttacacatggcatggagaatttaggcgcatgtactactagtactactgtactactccagtactataaaagaaccataggtcgaagaagggaaacacaccacttcttcacgtacatcatcagagcaaaacaaaagtttcagactaccaacctactactcctgtatggctgtatgagggacatcagaattcagactcccgttgagcctgtatgggtcactcttccaacgagtacaatttggtggttagacaccagtggactgtggcatggcatggcgtcgccttgccatcagattacaaggcacgctcaagttgggaagcagagctgaacagaatagcaacgtgcaccgaacaaaggaaggctgcaagtcaccagcaaaacagcgtttctggattatgatttcagctcaaggcatcacgttgccatcgtatggcccttcaacaaaggaaggctgcaagtcctatttaactcccggccaagacagcaatcctttatttctgccacaaaagcctttcatccaatattccagcatagccgaaggatctgcaaaacgcggccgctagtccagagtcactgtgcaccgttgcgctgtcttttgaaagtccgtgctgctgaactcccaggtccagaattattacgttgaggatggcgagactgatcaaatctaccgacggaggtcctcgatgaccgaatatgccctgaagctccatctggatgattaaaggacttctgaaaatgaggcgcattaagaggtttatccgataacaaagacatgaggaaaccgccaggtggaatataaccgactctacgaccctgagagaatctgcttgattcagctgaactttggtttgaaccctgacttgtagcaacatcatcagatgtaatcatagcaggcaagccatcgtatgataggatgcacgcaatagcatacatagttgctccaagatcaggtgggaggacatcctgtggatgtttgacctgagaaaaataattccattttttttcagaaataattggactataaaggtactaagaatgatgcagaaagcagtatgatgatctattgatccagatccattatctgattgagacaactcagaatgaacaacggaaggcaatgcagtctatctacatgccttatagatttttcatgtatgcttattatccagatttctgcactggagaaaaatcaacacaatatatttaaaggaaaactcgggggtcagagtgggacagtgggagtgtgcagactgaaatgtaaaacaaaagtttgctaatatgctggcaaccatgcatggcatcttagaaaacattggatgaaagagagaatacaaaaggaacaagttgtattgcattaatcaagcttaaattagatgatgcaagatataaaaatcttactttgaaaagaatagctgatgctaggcgctccctaaggcagtatatttgagcaacatcaagagctgtagcatcaaaccgaagccatcgatcaataacaactgaaacagagttatcaggagaagacattatctctttatgttgtcccaaagtgactttctcagtttcatcctcactagaatccccatcctcttcatcactatcatcgtcctcaggtggagcaacaaccatttccgtagcaagaataattaaaggataggacccaacaaccgaagagttttttatgtacattccaccatcgcctcgagtgatctcatcatatatcactaatgggttcccagaagtcttacggaaagacaagttaaagttgcaagaatgtggatgcagtcgaactttggcaccacttgctgtttcaatgactgctcttctagtatttttgcgagggggaagcaatctccctaccattggataagcaccggccataaggacagcacgaatgatacctacagaatttagaagtcagttaagtacaatagaacaattaaaactttgatgcaataaagcataatttgttaggaactaaggaagattgatgaagttcgggtgacaactgattttactacataattttactaagaataaaaatagaatccagcaaatactctaaaaataattttactacaaagaaaaggcaaggacgatttgctcgtgaattagaagtaagaagaaaattaaaaagattgaacggggaaaggatggaaaactctacaatacagtgaatgatatatgtaacttagtagctactaactttagagtgatatatgt

SEQ ID NO: 7418 - DNA, 30356 bp, Oryza sativa
cccccccccccccccccccacgccacgctcccccgcctcgtttcccccgcgcggccgcgccagaaaggggagaaacgcttcacgcgcgcggcgcaccctagcttgggccacgatgccatccgctaacgtgcgcggggcgcagcctagcgccgaccgcaggttaagtacgctggtgcgccacctactgccttcctccgcacgaacagcaaccaccaccagcacctcctcctccgccgccgacgccgactcctccctccaagctttccccaccatggcgtcgtcgtccgtcttcgctggcctcgcgcaggcgccggaggaccccatcctcggggtaagatccccctctcgtctcccaatctcactcccgctccccatcgctgtcttcaccggtttcggccgtgatcgcgcggttttttgggttcgctcgacctgatcggtgctcccgttggtgttgtggtaggtgacggtcgcgtacaacaaggatcccagccccgtgaaggtcaatctcggcgtcggcgcctaccggaccgaggtaaggtgttttgggggaatttctattgattttttgctccttcgtattttggattggattggtggtggatttgacttcgattttgtggtctgatcggagtaggaagggaagcccctggtgctgaatgtggtcaggcgcgctgagcagatgctgatcaacaacccgtaagtctgatttgaaaaccagatgatccgcatgatttcggacctgggaattttttttaggctggctgagtgtacagattccgtgttcaacttgcctctagatctaacctgtagataatacggtatactccacctagcttgcaggttatgtactttttttgcgaacgcttgcaggttatgtactaataatatattagtatttggcaccattcttgctttgaatcgtccggctgacttattttattctacgaaaataattgttgacctttggtcttttagtgacctttcctgctctacctacctgtttttataatatttcaggtcatttttttgctttgcttttgttatatactagcgtgtaggattgattgatgttgttgcagcgctgggtatccaactgggtttgccttatcagtgccacactgccactagtttgtttggcccattattaccacttagatatatatttttagtgaggggcacagtatgttaatttacgagtactgcaggtctgcagctttgtgtgtgtacacagtatacatttttttttatgtatagacaatttcttggatgggtttacaggaagaaaaaaccattgactattttttacagcaaacttatgatgatattcccagttgtattttacctgtgattatttgctttgactaggtcacgtgttaaggagtatttgccgatcactggactggccgatttcaataagctgagtgctaagcttatttttggtgctgacaggtgcgttcctgctctcaagaatatatatggtcatatggtttcctcatctgttacctttgaccaattgtaacaaacagtaaaattatctcactaagataacttcttcagatcctttgctacttttggcttattcttgtattaggtaattcacaaaactgattatactatttattggaacagtcctgccattcaagagaatagggtggctacagttcagtgcttgtcaggaactggttctttaagggtgggaggtgaatttcttgcaaggcattatcatgaagtaaggaatctgccttggctccttcatagatactgatatggttctacattacaatgcaaagtatgatcgctaaattataaacgtgttctccagcgcactatatacatcccacagccaacctgggggaatcaccccaaagtgttcactttagctggcctgactgttaggagttaccgctactatgatcctgcaacccgtggactggatttccaaggtaccaatttcaattttccatggaggaacttgttcttatgaagaagattaattgcaagattgtttgcacctgtctgacttgatcaaggatgtgttttcgtgttacagggctgttagaagatctcggttcagctccttcaggtgcaattgtactgcttcatgcttgtgcccacaaccctactggagtagacccaactttggaccagtgggaacagatcaggcagttgatgagatcaaaagcattgctgccattctttgatagcgcttatcaggtaaattattggcatccttaatacttatacttctagttcttaggaagcatgacattggttaatacttatacttctagttcttatacttaatacttatactaatttttctttctgtagccgtaaattccattggtttttgtccatacgacattttatttcaaaatagactttgacttcattattgtgcctgctatgctttatttgttcagggatttgcaagtggaagtcttgaccaagatgctcaatcagtgcgcatgtttgttgctgatggtggtgaattgctcatggctcagagctacgctaagaacatgggattgtatggagagcgtgtcggtgctttaagcatagtaagatatcttcactctaatatttgtcaagttcagctttgtggcttgcccatactttgttcgtagtcttgaccgaggttgctgtcatcttcatgctgttcatagtagcaactgatgtacctgtcatgcatggaaatttgtgtgtctattttatttcatctcacactggctattttactactagtaagagatataatcactatgagccatgatggctacaattcaagtattataattgtttttttgtcttgtctccaaaaaatattggagatgtttaatgaggttgagagtctttcaaggtgggaagttctaaacgaaagtaggacagtgaatttttattctttccagctccaaatatctctttcaattttgtcaatcacatgccaccgatgctttaattgttgaaattaaattttgattctaagttgatgccgacccagataataatatcctatttagttgcatagaaaaactgaacggaatgtaactttgtatttcaggtttgtggaagtgctgatgtagctgtcagggttgaaagtcaacttaagcttgtaattaggcctatgtattcaaaccctcctattcatggtgcatctatcgtggctaccatacttaaggacaggtaacattgatgtcataataattctagtcaaccatagaaagtgagctatatgttgagaaaggcatgcctagaggcagattcagggaataaaagtgtgtgctaagttctttttgattatatttttactagtgcaatgttcaatgaatggactgtggagctgaagggcatggctgataggattattagcatgaggcaacagctttttgatgctctgaaaacgagaggtaatagtttctgtcaactcctctatatcgtccttgctggaagtacataactaatgctatgtacaaagaaatttgatcattggccttttagtctttacgtttatttcaagttctgttttgacagcaattttgactaattctgtttatgtttagtctttacgtttatttgatctggaggcgttatttcccttttttctgtgaatgctacaattgaattttgactaatgtttcttactgtcaaagcagtaatgttgttttaaactagattttctttggctatgagaaaattttatattctatttttttcgagttgattaatcaagctcctgagacaagttccctgaattccaaatagtgcactaaaccaatagtatatttttaaagcatttatatgattctacttggcttgcacttataaccttaatgatagaaggacattgttttacatggaaaagctgcaatgcgtatttggctcgttgatctgggttttatgattgctcaatatttttgttttaaaaaggagtttttcttccctttttctgaatccattctctatggctaaaagtgaggtacattgtcagaaatattaatcattgttgacatgataacatcatgcagaaactcctggagactggagtcacatcattaagcagatcggaatgttcactttcactgggctcaacagtgatcaagtggctttcatgaggcaggaataccacatttacatgacatctgatgggtaattgtctaatttagctattgtgcaacactcgcaattatgtttgtatgatctaagtctgcagttatacaaactatataatttttagttctataacagtagatgatctatcttactgtttctatggtagtttcctttgctaaatgttcctttttagctcatctttacaagccaaatatttctcttgcaggaggatcagtatggctggtttgagcgggaggaccattccgcatcttgcagatgcaatccatgccgcagtcacaaaactgaagtgaatgatggtagcatagcagctccctccaagaataacatcttaaaaccatccgcagcagtgttctgaggattcagacagtgatgtttgctggctgagcacatcctggaagtttccttgtaatagactcgtgtgacttgcttttgggagcagttttgtaccagtggattcagaaaaagtggtgatttcgaatcacctaataagctccatcggtgatgcttttaccatatgcagcgttatataatcttagaattctaggaagctagtgcttgttttatgcgaacaaatgcgtaccttccgttcccttccattggcggacagggtatacgacatacgctgatacagagcatcagtgccattcagatgcattttttttttcgcggagttggtcacatgtggatttggtggaacctggtctgtgatgcacaagtaactcagtattgattactcctatttaagtcgggttatgtagggcacgccatgttctgccctttaatatgaaatgaaacatgcgttttgccctatatcaatatacacagggcaaagctcttgcctttgtttaaaaaaaggggaaaaataaagaaagaatgagggggtgtttagtttcagggctgtaaagctgtaaagttttgacgtgtcacatttaggtattatataggatatcgaaaggggtgttcgggtactaataaaagaactgttttaacgtgtcacattaggtattatatagggtgtcgaatgtggtgttcgggtactaataaaagaactaattacaatatccgtcagtaaaccgtgagacgaatttattaagcctaattaatctatcattagcacatgtttacggtagcaccacattgtcaagtcatggagcgattaagcttaaaagatttatctcgcagagtagttgcaacctgttcaaacctttgatgtgacatggtgtaaaattttaaggtgagatctaaacaggccatgaatgaaacatgcgttttgctgtggccacacttccagtcttctataccataccgttcattgttgaagactctggatctttactattaagaggaaactaaagagctactcccttcgtcccataatataagatattttagagggatgtgacacatactaatgctataaatctggacagacgagtaataagctaccactttcgtttagagggcctgcaaaagtgcaaattacttcgttaaagaaaaagagagatgcacatgtccactcgcgacggcctagaaactacaatgttaataataaagaaaagttaaagaaccaaatcaccttcacttccacatccagaagttaatcgtcttgatcagatcatggtggctccatatatcatgtagattaatagatataattgtatataaaaatatttctagaaatgggttcaaatatataactaaaacaggttatataagtaaacatttttgcgaggatatatagcatgtactcaaacttcagttcaaacagccttacaattgcgtaggaaatttaactagttttagttttaaactctgatgaatctctacatatttttaaacccgagcgtcgcaacagaaattatagagtttctaacatattaaatcaattaataaccgaataagtctaagtaatactatggttttttcttattgaacaggtaggtgaatcaaaaatttggtggagccaatagtaaaataggggagtaatttttgaaatgtgggttaatattatagatttgtggagcccaaatgttagtggcaagggtggtgtgggaatggataccatagctactaaaacttttaactatatattgagcaaatgtggtagtcctaacttttaatcaatatatctattatcccctactctatggctgataaaccacaaaaaatattgaagaaaacaacaaaataaattattagtaaaactgaacaaacttgtcttaggaatcttcctagataaaattcaaaccgaagaaatacccagagtaagacaaagccaagtttcgaggaacttttaacagctggagaggtactcccagaatctctagctctaaaggttgcgttcgaatgtggtgttggttagctatatgtgaaatgaggcaaatcatcattatcgcatgagtaattaaatattataaacttgaaaaataatttgtttttataagaatatatatagaaaacttttatagaaaaaatatattgtttagcagtttgagaatgcatgctccaaaaaaagaacgatgaagtagctaagtcaagtatttgattcaaatgaagcctaagtatctacttatagaaacttagtacccacaaactgaatagactctcaccatatacccagtgccgtcaggaggatgttgaattggggtatatttgttcaactctatgctgattaattttttcttgttctgtccctattaactcataaataaatgagttcctcttgaaaatatgtccccttaaaatgagtggatactagcaaatgtttgttccaactttttatggcgtgatttgattaatagcggaaagagattccacattccagcatattttaaatttttttatcggatccctggaaaaggttcccggcccaataccaacccgtttacactcctaagtcctactaagtcctaataaccgagtggtttcagatctcgtttacatggaaagttggttcctcctccagccaccagctcgatcctttcttcctcgttctcgcgatctgacctccccatctctcctcactcgatttcccggcggctagcgacgcgggaggaggcgcccggccggccggcgagcacgtgctgatagcggccgaggaggcgttgcggctggacgaagagcgccgcgtgcagcgaagcggcagtccggcgagcaggaggtggatctggacggcgtcgtcttcgcctgagccagcctcaccacgcgtcggcctcccgaggcggggagttcatccgcgcgaacggccccggtagcggggcgaggcgttccgaatctggcggcatcctcggaggcacacggcaacatctcggtctgcttgttcttcacgctgcgccacaagctcaactgcaatggccgccgccgcggcgtcaagctcgtcgccggagttctcgtagtagccgaggtgccttgctccttccatttcctccatctccgtcctgtcgttctccactgctctagctactagctagcaggatatactccacgaatcgcagaaatggtattcaatgccttgtaatcgttcagaaaactaaaaaaatattccgcaatcgcccacttcaaccccaaatcccctgttttccaatccccttcaccttttcgcttacaatccctataccgaactccatgctattttctgctccacccatgttgattggcacggtaaagcgcacagctcatatcaactttttttttttgttttctttcttgccggcatctcagatcaacatatcaacgtcctgaactgttctatttgtctgcaagtacctgccgagatgttatggttatttttccttggacagtatgatgcgcttttcaatttctcattcagtttttcttttcctgtttctccgattttcactcttcctgattttctatttaaacggtaggaaggtagctgtccttgcctgaaatagaaatgtttagtactgctcaccttttggcagtttctgcatcatgaaggtcattgaaatctggcatttaagttgtaatgctcatgcgtcgtgttgatcagtaaaaagtgttgctattctcaaagttctagtttgagtttatgaaaatttattctagaagttcaaattatggagggaatcttttgtttcttctgcagatactgattttcacggggatgcattaagctacggtctaacttgtgggagctggatactgctgaaaaggggaccaaatggagcttcagcaggaaagctcggatgcggggactttgttctcggcgccatcaaggaacctatcatcctcttcatcagcatttgtttctgctaaccaatcccctttcttcacgccacgatgtctatctgcccgtgtctcagatcacgcacatcctgagaacaatagttccttgagtggtactgtgctgaaaatcagtgatattctttccagcgacactctgttaaagcgggagcaattaccatcagccactgtggggttattgccatcggatgcttctcctcctcctagtatttgcacttcaagcaattttgacactccagcaattgtctataacaatcctagcttcatttccaccttcagtgacccatgtcaaggcagttcatcagcaactagcactggtgtccgttcaactcagaaggagaagcataagagacagtggggattatatcggaaatcttcatcctctcaacctacgacatcagctacctctgtcaacagacttcggagctttgatgtgtacataggatttcatggccgtaaggcttcactactgaggttcactaattggcttcgtgcagagcttgagatccatggaatcagctgctttgcttctgacaggtctagatgccggagttctcacagccatgatactattgagaggattatgaatgcttccacatatggagttgtcatccttacaagaaaatcatttggcaatccttataccatcgaggagctgaggaacttctttggcaagaaaaatctgatccctatattctttgacttgggtgctgctgattgccttgccagagatattattgagaagagaggagaactgtgggagagacatggcggcgagctttggatgttatatggtggaatggaacaggaatggagggaatcagttgatgctctttctcgggtgtcagatgtgcaattagaagcaaatgatggcaattggagacattgcatacttcaaactatcattgttttggccacaaaattgggcaggagaagtgtggttgatcgggtgaataggtggagaggaagggtggagaaggaggaattccctttccctcgtaatgctgattttgttggtaggaaaaaagagctctcagagttggaactcattttatttggagatgtcagcggagatggggaaagagagtattttgagatcaagacaaagcagagaagaaagggcctcgtaattggacggtctgttaacaattatgagcaagtaaatactgatgatggtaaaggaaaggagccggttttgtggaaggaaaccaaggaaaacattgagatgcagagactggggagtccaccacgacatggaaggccatcgagaacaaagaatgatggcaggtatgggaggaaaagaagatgtaggaagatactctacggaaagggtattgcttgcatttcaggggaatctggaattggcaagacagacttggttttggagtatgcatacaggttctcccagagatataagatggtcttatgggtcagaggggaaagcaggtacattcgacaaaactacttagctttgcggacttttctggaagtagatttaagtgttgatagtcacttgcatgagaaaggaagtgaccgatgctttgaagagcaggaagaggaagccattgccaaaatacggcaagagctgatgcgggacataccgtttttagtaatcattgataatcttgagagtgagaaagactggtgggataagagagtcataacagaccttcttccacattttggtggagagacccacttcatcataacaacacgccttccacgtgtgatgaacttggagccaatgaagctttcttatttgtctggtgccgaggcaatgtctttgatgaagggaggcgtcaaggattatccactggtggaaattgatgcactaaaggccattgaagaaaagcttggaagactcactcttggccttggtattgtgggatctatactctcagagcttccaatcactccgagcaggcttcttgatacgttgagtcggacactgcccataagagattgttcttggaatgagagagatgctatcagtttgaaaaatcatgaaatccttgtccggctcctggatgtctgcctatcaatatttgaccatgccgatggtcctaggagtctggcaacccggatggttcaagtgtgtggttggtttgcaccttctgcggtcccaatacatatgttggcgttggctgcacataaagtcccaaagaagcatcggaggggtccaaggtggaggaagtggtggcgaacgctgacttgtggcttggctacatctaggatgaagagatctgaagctgaagcagctgcaatgctgatgaggtttggaattgccagatgcagcacaaagcctgaatatgtacagttccatgatctgatcaggctatatgctcgaaagcgaggaggcacacgaatggcacaagctgtggtccaatcgatctacctccgaggctcaattaaacattcttctgaacatctgtgggctgcctgcttcatgttttttggatttggttctgatcctttcctggtagaaccgaggccatcagagttgattttctttgtgaagcagatcgtcgtgccacttgcaatcaacacattcatcacatattcccgatgtaatgcagcactggagctgctgcgtctatgcactgaggcattggagcgggcagctgactcaatgctttctcatgctggcaaatggagagaaacaccattgtcctgtttcaggccaactcagtcagaagcccaatacacctacctttggcaggagctggctcttctgaaagcatctgtattggaaacacgggccaagctgatgcttcgaggtggacagtatgacactggagatgacctaataaggaaggccatattcatcctgacttccatttgtggcgagcaccatcctaacacggtttctgctcgagaaaccctcagtaaactcacaaggcttcttacaaatgttcagcttagttgattcatatagcttaggacttcaccaatatattcttttcagtgtggcttttcataaacactgtacaaaatgccccagatcatcaaataacaaaagaaaatttgtctacacaatttgcacaggtttgcttctttggttaaagcactctcttgttactttcacctttgtgatgtgatcctagtcttaacacgcacaaggtttcaggcatcttcctctggtgttgatcttagtaattaataactggcaaacatatacatttctctccttttcatttctcatcttattggtcattttattttgggatgtcttccccctggctcaactgttctttttattagtcattctattaaaagtatcagctcaggtagttctgaagtgacctagtcagatgcctgaattgtatatctcaattgtgtcaagatgaataaaaagaggaatattctatcaggcaaaagaaactagtcgtctccagcagccactgatccctacagttttagtctctagctagaggtgatttcttctatcatataattagagatgtttcacgatgttggatgggagtcttgcattatggtaactgccagatgaaagttggtgaacaattatttatttctgtcagctccaaagatcatagtacaaattaacaaccatgtgatgctgatacttcgatgttgaagtaaggtaatgttctacattgattcccattcaatttaattgtttgtagcgatttatttttgataaaaagatacgaggtaataggcatttgcattgagaaactaaaactgcaattttgtgcttattaaggtctgtggaagtgttgtatagctgttattggggttgaaactcaactcaagcttgtaactattctaattcttatatacacaaactctcctattcatggtgcctctcatgcctatcatagttaaggacaagcaacactcatattacagttctggttgaaatgcatgcttattggttattgcagattcacgaaatattaaagaaaaacagtgcttagttcttgctgttgattatgtctactagtgaggcattcaacgaatggaccgtggagctgtagtcatagcttttggagaatggaagtataagttctggtctcttcttgcagccttgcacagaaccatatttgtggacaccaagatctgaggcaacagctatacgcagaaaaccatggttgaagtttcaaccaactctatttcgttctttatggcaatttaattaaagttatatgtaaacttggtaaggcttgatcattgcccttttagtctatgcttttttctcaagatcttttattacaactttgagttgcttgccccattttctagaatttatacaactgctgtgaactaatggttcttcagcaactgggttgacagattttacatcaatttttttgaacgggaaaactcagagcagttctggcctattgatatgttattttatgattattaattctaccttttctattttttttccagtgctttttaatcctgccgccaatgttctgaacattaccttgttagcttcatgaagaaacacctggaattggagccacactattaagcaaattggaatgtttactttcactggactcagcagtgatcaaacgacctccatgaggcaggaatgcctcatctacatggcatctaatgggtaagtcgatctacttcaggaattttatgttgctatcataaaaaccattgggcgtgtcaagtttacggttgcacagtatataatataaagcgacctgagtgaaatatgtcagcggtccttaaaacttgtaagcaggtgccttttagatccacaaacttgtataaagcaaatctaggtccctgaatttgcttaagtatgctgtctcgatccaaaatcactatatacctttctagtgctgatgtggatgttgaggtgacacactatgcatgtgatgtggcacataaataagaaaaaagaataaaaatggtgagacgggagaggtgcgtaaggcgttaggtacatcagtgccacatagtctcctagtcctagaaggacacatggcaggcagctctggacttatatgctattggagtactgtaataagtgggatttggatctgtcttttacaagttcgtgaacctaaataattatctatttacaagtttaaagactactggtgtattttactctataatataacactctccgttccataatacttcctccatttctaaatatttgacaccgttgactttttagcacatgttttaccgttcgtcttatctaaaaacttttatgaaatatgtaaaactatatgtatacataaaaatatatttaacaatgaaccaaatgataggaaaataattaataattacttaattttttttgaataagacgaacggtcaaacatatttaaaaaagtcaacggcgtcaaatatttagaaacggagggagtacttggtaattttgacttggcattgttttagcttgaccactaatattttatagataaacctacaagagtattgaaaaatagaacatattattgaagtatgatcacagtaaatatgaacatataaatcccgttcatcgtagttaaacaatttgaaagatatcaatgctcaaactagagcaagtgccaatcaaaattgccaaatactccctccatttcaaaatatttgacaccgttgacttttaagcacatgtttgaccgttcgtcttattcaaaaacttttatgaaatatgtaaaattatatgcctacataaaaatatatttaacaatgaatcaaatgataggaaaagaatgaataagacgaacggttaaacatgtgctaaaaagtcaacggcgcgaaacatttcgaaacggaggtagtattatgaattggtgtttgtgttcgttctgtgttcttgccctcggattacgatttctgttgcatccaggaaatgttatatcttaagtttttcggttgttgacacatctggggattgtccttttcttgcacacctgcatgaacgtcagtagatgtctctgtcgtatacattggtcaacccctcaaccccttgaaatggtacagaagattctcagctctacaaacccagaagccgaaaacggcgggctactcaagcgagagcccagtttgatcaaaatatatatgtacactatgtgataatacatgcaaaatatcgtgccactttttaatggcgacctggtgggcttctatgcgccccgaacaggttgtccatgtacgtctgcttcaggttcgtcatgatgttgggcagcttcatcagccttccgtcctcctgtgcggccggctcaggcgccgtcggcgagggcctatcggcgtcaccgttccagtcatccatgaagtcgagcagcgtcctgccgttgggtgaccctgtcattttgcagggggcatccacctcgccagcctgctggtggtggtgctccgcggcgtcgttggccatagccggcgccggcggcgcctccttcttggccttctccctggcgtggtcgtcggcgttgaggacgtcctctatccgggacatgacgttgaaggccaagctctccagcaccctggagtagctctccaggatggcgaacccgacgtcctggcagcccaaaggcgaaaagtgcgtgtgtcatcaagctggacactaccccgacattggtcggacggctcacactggagtaaaatcgtgtgtgatcttaccctgttttcctgtatcttggcgatgtcgagggtggactgggggatgccggggtaccggtgcttgatgatgagcaggagcgtctgcgcgcgctcctcgaactgctccctcttctcctggctgacggccgatccccacgccgacttgccgtccttgttgtgcaccttcctgttccagatgatcaccgacgcctcgatccggtccttgaggtccaggatcttgtgctccgacgtaaggtccaccgtcgacaggaacacgtccgggtcgaactccacgtcggtgatgatccggtacagcgcgtcgccgaggctcgccctcccgttctgcagccacccacattcttgccattgtcaacagatgtcttcttgcacggtggatggatggatggatcgtgtgagctgccagttctcaccttggggagggattcgaggtaggattccgggatggccatctccatgaggcagttggcgttgatggccatggccgccttgagcacctggttcaccagctccttctggtgctggagccaccctctggacgccggcgagagcccgccaggcgggaccttcacgatcgggatccaccatttctcgtctgatctctgctcgtcgctatccgagcacgagtcgcgcttcacgtaccagaactcgttccgatccttgaagttgtccaggtaatcctgccacgcaacgcaatgggggaatatcacgctgttcgtctcggtagctttgcgagttctagcgatggtgagatcgatgtatgtcgcgcttttaccaggagcatcgtgtcgatcttgcgcaacgccggtatgttcgcctggagatctctccgctgctgcgtgcccatcacctgagacgagcagagagagaaagatagcaggttacttgatggagctgcacacctgtgacttgtgtgagctgtgatctatcctgagctacaagcggctgccgctgctgcatggctgacctccatctcaacgccgttgtccaagacttgtttcttcgcgacgaactcgacgatgtgatcggcgacggatagaagccagccgacctctttcttccacctccccttcctgtccggcgccatgggctccagcttccgttgctcaccaaacacagaagctgatgacaaaagaagttgctctcaccactgctacatttcttgcgtgtgcccccccaagatagagatggaatttgggcaggcagtcaccttacctgcaagattggtgatggcgttggacacggccagcgccgacggcacgcccttcccggaccccgacatgtcctccccgagcagcagcttggcgaacttctccttcatcagctccatctctgcacgcaagcgtctagcgtcgcttcaaaaccaaagccgttctgtccatgcgcggcggcgggccgtgttcgatcatggcgacgacttaccggaaggtcctccgccgccgtgttcgccggtgtccttggcgagccgcgacttgggcgccgcgctgtccttgtcgagcacggcgccaatcttgagcgtgccgccgccgccgagatcctcatcggccggcgtgccccggccctcctcgctcaccatactctgcgaccgtcgcaccgagcttcgtctctctagcagcgacccaccgccgctcgctgccatcaaccgatcaactccaccgtggccagcttctcggcaaccaaccaaacagcaacaacaacaacggcaacaaagaaatggatccggtgacacgacacgtcgaaaagactggaaatcccaccatgatactacccaaagtgtatatacctgtaaaggacgcagctttctgcggcctcgagcgacgtgtgcagaagcaaacgatgatgatccaggattggcgctgcagaacacccacgcagagagagccacgagaaggaacaaaaaggggagggttgaaatgattaatcccgaggtgatgatgattgttgtttgtcccggtaatccaagaaccgggtggttcgatcgatcgtccgcattgtcgcggtaagaagaagccccggggaagagggggagcataattagggagcggcacatgctttattattagaaagtgccttgcctgccatagcgccattcttagccaccctgctttcctgggagctacctagctggaggaagaagacgaacacaacacatggagaattcgtcggggtcaatttactgaacaaagtttgttgtcctacttaaatagttaaatacttcaagcatgttcggtagacttatgttccacctcttatagaactgaagtcaactaaacagttttagcttcatccttttattacgtgaaatttgtcacgacacatgaagacctgagagatctgaataaatccagtgcaggtcctatcaatcgggttcaggacgtgtcaattcgtttaatcatgcaactaacaagataaatagacagatcgtatcggatcaaggagctgatcagccaatgggctgatgtgaagtcgagtgaccagccaatatcgataaggtttagatcaacggttatgggttcgatatagattcaaatatcagataaacaatgggattcttgctatcatcggctagaactaaacttcacataattatcaataaaccattctttgtcaaatacaatcttgatagatcggatcgaaccgagacaatataagattgaagttaataaagagagatttaactagtgagtatacgagtttgagtataagccaatacatcacttagaaatagtagcaagataactcatcacctagaactccgatgaaacgttgcataaaaacctatcggtttactagaatcagacttactagcaataatctaatagatcggagctgaccgaaacagtataagattgaagataataagaaaaccctatttagccgatagatctacaaaaccgtgatggatatattgaatcaatctaaaacaacaatgtgattggagaaatattaacttaattagaatatcggacctaactgagaaagatctaactaagccaatacgactctaaacaacggtacagttaaaaataggatcgatatatcagataggcaactgtcgaggggtgaccctctctagcgggaggctgtgaggcccccctttgagagttcggccgggggcagcgggtgagattcgaggatttggtgagcgaaactgtgtgtgatcttgatctcggaggctcctccaagacgatgagacaaaagaggtttatacaggttcgggccgctatgaagcataataccctactcctgtgtgtatgattcttctgtgcttagaaagtccatgaatccctggtatgtaagctagggttagacaagctttggctcagggatcctcagtccgatcccccttccttgctaggcattgtcctccttttatactctaaggggataccacatgtgctgcgagtgctacctagggagaagggaaaatattctctaaattaattacatgtcttgtgccttagcccagaatctatctgcacgtcggttgctgcgcggggcccatcaaatcatgcagggcgcccttgtcattcgccatttaatggatgaggacttccgggttctcgttcacaccagaaaacgggaacccgggtcagttcagagtggttggaccagctctgatcggggtaagaggctgtgaagcccctcatcattatgatgggacgggacggagcacgccgctcatcgcctgacacactggcagggcaggggtacacagtcgccgtcacatcggtcattcaaccggtcacagaccggtcagatgcgcagcacgttgcattacatgtggcatggcacggttgcatagaccgctttaaatgcagttaggtgggcgttaggcgcgcccacctaaccctgtacacgtgggctgatatgtggagggggtcggggcagctcgaccccaagcgagggcggcctcctccctctagcttggaggtggcagccgccacgccaccccgggctcgacccccctcgggggaagccacgtgggtttggaggtggcccaaccccaagctgggagggggcagccgccgcaacaccccgggctcgacccccctcggggagagccacgtgagtttgagggcggcctcctccctctagctgggagggggtagccgccgcgccaccccgggctcgacccccctcggggggagccacgtgggtttgggggcggcccgacccaaagctgggagggggcagccgccgcaacaccccgggctcgacccccctcggggagagccacgtgggtttgagggcggcctcctccctctagctgggagggggtagccaccgctccacctcgggcttgatcccctctcgcggggagccacgtgggttgggggagttgcccgaccccaagctgggagggggcagccgctgcaacaccccaggctcgacccccctcggggagagccacgtgggtttgagggcggcctcctccctctagctgggagggggtaaccaccgctccaccccgggcttgatcccctctcgcggggagccacgtgggttggggggttgcccgaccccaagctaggagggggcagccgccgcaacaccccgggctcgacccccctcggggagagccacgtgggtttgagggcggcctcctccctctagctgggagggggttgccaccgctccaccccgggtttgatcccccctcgtggggagccacgtgggtttgagggtggcctcctccctctagacgtgatacccctgggcccatatcaccgacagcaacgcttgcttcaacttgaatataatattgaacttaactgggaagttctagccacaacgatacaaagcttgacaaaacttacttttcgctggagatcaaacttaaccgattcagccctgctcgaaagtaagaactcgccggaataaaaggcggcgatgcgctgaaggtaattgtattgatatgtgaagatgtcttacaaagatctcaggtgtacatatttataccctcggattgatacaagttctaattgaatacgatactaagacttcctaataaatgaaactgtcttgtcatggtcttcacaatttctctttaaattcagcttgatctggataaactttcttctaccaattggcttattttctttaaccgagtccactggtgaatcataccaaaatttaacgttaacgtctttatagtggagctggatagaatgatctgaagatgaggtggaattgttgagacgcttcacaactctactccgctccagacttggttactggatttagacctctgggttgatatcgctctcattatgtatcatgaaatctgttgcgaggtttggggttgctagtgtgtatagaacgtacaaaaaattatttagacgaacatgtgcagaaaccgaccttagctcagttggtagagcggaggactgtagtatgtgcagattaatccttaggtcgctggttcgaatccggcaggtcggaattatttttttttctttttttttctttttagtccttccaagtgaaacctaagttcccctcttctctgttgtcttcaatttgagatgtgttattattattatttttcctgagacctttatttttcctattctttttggaggaggagaacaatgacttcgatgagagttacgatttgaactcgtcctagcgcatgttgctaaaaaaagctttaaagacgcgaatttgattccagcaactccagcaattcgtataccgattctgaataaactcgagccctgttgctctcgatccaattatgtactacaagggaaaccaagtcattctagaaaaacattacacaacaccaagtggaatcgcatgtttgaccagcaattccaatcttttgcacaccctacttccaattttctactgtgctatcgtgcgagtacaattcacgctccatgtatcgtgccagccgacgccgcctcgtcgtcgtcatcaaaaaccgggagagtaaacttgtagcgcccgctggttattctgattgattattccgaatcagatgcatgttagcttctcgactcgtggatgtcgctttcagctcatctgctacgatgctgcgcctttgaagacgaggaacctgagcgcccccagcttgaagtagatgaagcttcccttgctgtgcgtgaagtagcagccgaagctggcgcccaccacgcactgccatcccggcccgtggatcatgtcaaactcctgcgcatatgcagcaaagccattcaatccaagtgttgccaggggtgaaattcaggttgattgatctacggtctcagatttcagtcttttcagatgaatgcagaaaactgaaaacaagaactttgctcttggattgaccaattaaagtagctaaggattggtgcgaatggtagtgattaccgaccttcttgatgtgagcggcgatgctccggcagtcgaggacgtcgaagcggtcgagggccttgtacgccgccgacatcgcctgcagctgcatcttcaccggcatgtcggtgtcctccaccatcgccttcccttccaacatggtggtcgtctcttgtgactccttcctgcccagccttctctgttgcaatgctcgaaatgaatgcacaaagatgagagcaaaatgctgcgtctctcgtccctttttataggacggatggatgcgtgaatgcgtccatgtcgacgtgacgtgcgaacgacccagcctggacgagttcccggaatccggatggatcgggcactagaggcacagattcaattgctgggtgctcccgtccggttgtgaaactggaaacagtgggtgtttccgtgttggatatttttccgctaccagttttttttttccatctcgtttttctcattctttttatcgtagtggggctctttgtttttttggatgagctggtcgtgtggatttcggtgtctgggtttaatatggagaacatggtatgtgattggaacttcaaatggggaactcagcagataggagaagttcgataagttaattgcttgctttttggttcctatcgtcctatccgtgttgagttctccacgtaagcgtgactgcgtgagcgtggagaagtcttccggctgatctgatctgggaagtagtattaaatagatatatgtgcttggcttaatcgtaacatgtgataattatgcgtggtaggatcctgatccatggggtacagatatgtgcaggattatttttattcatttatagttgatcttgcagttcgaattgatccatttaatcctacctggcaggagttaagtttgagcaaagattgtagtgctggtctaactgccttatcagggcatctatagtcaacctgcaatgcgtgaattgttatcttatacggataagggcaccacgctgtctttttttacttttactagctgaatacccacacattgcaacagaagtttaaaaaagaaaatcttatcatacacattttagatactctaaacaaattatctctataattttctctaatcatctaagctgcttttgccatcacttttatatgagaatttggaaggcacgtacaccctgacaacaagaacgaccccccttgtcagggagttgatggtggtggtcggtggtagattcaccgctcatcaccaccattagagcttttttaaaattgtatatattatttatattataaaatatgtagcttttttatactttaatttacacctatagttttgtgctaaatttgatatttaatttatagttttacgacataccaccttaaatagttttttgtcaaaaacttaaaaagtaagatcaaactatccctaattttacgaaaattactttttttttcttacctccgattttcctgagatccgacaggcaggccgccgtgatctcacaggactcacagcgcgtcccaaggctacaacggctgagacgatccgccaaccaacgattaatttccggcagcccaggagcggaggagccctgcccagccgctagcctgacgacacgccgaaaaccgatggctgccccggcgggacctcatgtccaggaggcagaaaccgcccgatgccaccactctcctgtccaactgggcccaacgcgtcgcgcccgcagatctatgggccgcccccacccacaccgtatcgaagaggtgcagcgccagcctgccgccgctggcgcaacaccacacgggcacgcgccgcacagcgaaagccggattctccaccacgacgtcccccacaaccgcgcaccagccttccggtgcgcttctcgtggtcaggactagtcaggcaccgcgctctctctgtgccgggcgctcgctacagggagagtgtagcggaggcgtgcgcgttccactgttcaaggacggacggcttcgttccctctccctttcacaaggtcggctctcttttgatcgaggaagcagatcatttctgcaacgggacagagtgcgcggctactttcacctcaccagcataagcacaacaaaatcaacgaatgaaataatggccaactagaagaacatctacattgcctctgctcagcattctgagttctttctgacacagacacaaacgattcgatcgcgcatcagcgacgaaatccccgtttccctcaaacttctccccgtgctggttttaagacggagggaagaagcggttgaggttgaagggcaggctgtagaactcctcgctcctggcgtcccccttgaacgaccggaacggtacccaccatggcatcccccggtccttggccgcgtttttcacctccagcgtgttgtccaggaagacggccacgatcagtccgaccgtcggaggcgatgagaagatagtgttgatgtagtcgttgaactgcattatacagcacacaaaagttagtacctgtaattcctaactacgcttcagaagaatctccactgcaactagtattattgtaagtagaaataatcttaaccgttggatttatgagttttactaccagtgaaaaaaaacattttagtagaaataatcttaaccgttgatgtccccattgaattaaaaaagataaacgatctaaatatattttactgacagttgtaaaacatctcatttatctaatatcaagttgtcaacatgttactgttgaatttagaaacgcagaacaatttgctacataggtgagccatgaggaaggtgataaagagggacaaacccatccagcttttgtgtgcgcagggccacgctgagcggccatgctgtaccggaaaaagtattcgggcacagataggccaagaaagatggagacaccgacgataaagaggttgcgcatggagttcatgttagtaaactgcaagaaggagagccccactgccgctgaaagtcaaacaaagcaaatgtgtgagacaagaacaaaaacagtggcgtatttactcgcatcagatggcgcagggtaaccaaccaactagtccaaacaagacgcagtacacggccgcaaagatggtaaatgggatggaagcaaacaatgctccaaattttcctgcgccagatggaaaaaggagaattcaggaaaactgagctaacattgggcatgatctgcacacagttaaattactgtcctatcaacaaattactcacctagcatggagaagaagatcatgaagccggcagagatctgtataactcgtcggctcccgatcctcgttgatcctaacaacccgacattctccctgcattgatcttaacgttatcaagctggaagtaactctttgataaaaaaaaattctgaagttcactcacactgacacggtggagccagtacccgttccaaatagcccatcaagaaggataccaattccctgttgtttatggagtatcaacttaattacagctctgaacaacattcaggagtaaaaaacaagaaacaataggatgacttaaatatccacctgccacccaatgcctctactgaggatatgtgctggaggtggagtagcacttgcaagccgagccgcagctttgtaagaagccgtggactgtccaagacaggctttgagttaagttcaaggctgccacgcaaagaaatggctcctgaagacgagttatgaggggcattacctctactagcgataccagaacagcagataccataccaaaggattgaccggcactgaaagttggtgcgccccattgtagtggaaaagggatcttaatcctggagcaagtccctattgttagcacacacacactaactgaagaataaaattatccaaaaggatcaactgaagaactatctttcagtaggacaactaaacttttctgtgggacccatttgtcactgtttgcgagtcctgtgacccatccaatgcaaaatgtacaaggctgttgaggccccaaaggttgagcttaggcctttagtcttttcttttttatctattgatcataactttaaagtcacgatcaagtctcacttctaggtgactgaacacctatacaatcaactaaatctggttaaactaagaaactttgacatagagcatgtagtgcaaagaagagcttagcaaccaaagtcccatactaaggatagcataaagcacattaacaccgtaaccattttagtttacttggcacattaaagatatcacaaattcgatgggaaaataagcagagacaaaccatggcgcggaagagatgagattggcacggtcagtgcggcagttgatctgagtgacctcagggctatgcttatacgcgccacctgcagtgaggatttgagcataggcccaaaccaacgcgatgcagatgaacagggagaacctctccagtattggaatatctcttatctgtacattcttcagatactgaaaaacataattgacaatgcacgagttagactcaacttcaaatatggtcactagcaaaagaattcgatcattggagttgcttgccaaacctgagaaagcacgacaaacagaattaacattggaagtccaacctcaacgcatctcccaacctgacagtaaaatcaaacaacaatgcaatgcaatgaacaatctttcctgtctgaaaaaaaatatactgcattgtatgttctgcttgcgtgtcgaaaatgtgaggcgtcaaatgaacagctcgtaccacagggaatcctctttcgaaaaggccaaacccgagcaatgcaaccactggcgccatccccaacgggctgaagaatctgaaaggcaaaagcagcaacaccgcatgagaccatgacccatcagtatgggagcgtaggcactgtcgaaactgaatctgacatgcacacgcacgtaaccagcagcatccatccatgtgttgttctaacgtagtactaggaggagttgaagggcaaacctggagaaaatgccccacagctggctgtagccgaggatgatctgaatgctggaggacacgatgagtgccccctgtatcgccctcatggtctgaaggaacctctgctcagagagagagagagagagagagatgaacagcagatgattgtgatcagacacgcctaatctaaaacagtagaggcgattggacggatggatggacagaaagaagagcgtccgcctgctctgcttacctcgtggtcgtcgggtatggcggcgagcgatgagtcctgtatgatggccattatcgggaccacgaacgcgtaggatccgccgatcaccgtgggcaggcgcgtcccgaacagcgactgcagcagcgtgttgatgccggtgacgaacagcagcgtctgcaccaccctcaccctgtccccctgcgacagcagaaagcagaaaagtgagttctcaaaccatgggtggtggcgaatggattgggggaaatcaacaagagtgcggccgcggcggcgctcacgtcgctcccgcccatcatgggcaccagcaccgccgggatcatcaccgccgtgcccagcgccaggatgtagtgctggaatcccagtatgatcgcctcccctgaaacagcaaaaatccaagacgtggattcagaatgcgaaatcccgagcaggaaaaaatgcaatgcagccgccgccgcttcggctctcacgcaccccagggagggttggagtcgatgcagtactcgaacccctgcagctgctccatgggcgggtagctgatctcttccggcttcacctcagccatcgtcgccgcaccaccaccctcttctttgcccgtcaggatcccgccgccgagcaatgaaaacacacgggaacaggaaaacacacgggttcctcgcttatgtaggcgccgctgcgtgctctctccttggcctctctctcgagaaggcttctggagccagccaggtgggggcttattcagcgtacgcgctccggcacggcacacggcagcgtcccccttccgcagggggggagatcaggacgaaatctgttggagaaaaagccgcgagagaggatggctcgtctgcgtgagagagggaggcagcgcaaagagcaaattcgcactctcgccggcgcggctactgttcactctcacactcgttcgtcagccttggtcctcacactcgctcactggggccgtttgtcgtcgtggtgctttcttcttctctcccttttgcttctccattttttcccccttttatccgtgtttcgagtgcttcttccctccttccgggaaactgaactggccgttggcttttttggtgtgaccgaattgcccctccgccactcaccagtttccccttcgtgcattaactactccctacgactagccgttcttttttttttttcctaatcctgcgagtaaaacacgctgctgtttcttcgttttgttttagtttaccgaagatgctacactttcttactctaataatcctaggacaaattgcaaatctggaacatctttctttcacctgattttttagtagaagtccaaaaatatgttcatctccacccacttgacctgtttagttaaaaaaaactttcccacaaacatcatattaaatttttgaatacatgtatgaagtattaaatatagataaaaataaaaactaattgcacaatttgcatttaaatcgcgagacgaatcttttgagcctaatgagtccctgattagccataagtgctacagtaacctgcatgtgctaatgacgtattaattagactcagaagattcgtctcgcggtttccagacgagttatgaaattagttttttctttcgtaacctaaaaccccttccaacatccggtcaaatgtttaatgtgacactttccgtttcaccaacttaaacgggcccttacttggacgctgattacacactacagtgaacgttttctaccgtaccgtaaacccgatgtgacatgacagagtccttcggaccaagggcaacatcctttcgtgatcattgaggcggcaaaggcaaatggcaaagactcaccagaaccaccagaagaccattgcgggttttgcattgcgagtagtgcaggtagcggtcggaacatgttgctggtttccgatttaacggacgggacgaatgcccaattagatacccacaccaccacctgacagtctggtccaagtacaggggatgtttgtagttttccgcttctgaaaaatggttgcctcgtcagcctgcctgccctgcctcgtgccccgcttgactcgcagtcgccataggcaacagattattgaggagagcgcaagagttgagaacttgagaagtggggggtggggggcaaggaaagttaccgttgggtgccgttctgttctgcctgcgtctgcgtgcgaggcgatgattgcatcggacggtgagagagagagagagggaagggggggggggggggggcgaggaccggcggctccggctgggccccgcgagccagtccgtaggaaagcgatcagagatgatgcccctgcgcgacccctgcacggactccgacgcggtgcatcgcgacgctgctgctgctgctcctactagctgcttgtgctacccaccggtggtactggtacgtgctactacttgcctgcagtggcaatgcggcatgggcgcacggccaccggagcgaagccgagagagggctactgctcccaatcagcgggtaatttactccattttattgcagtaactctcgcctctgctggggccgggccaacgggctccgccatcgctgcgacgatgcgtcgtcactctcctcctgccagatctctacggatggcgtgctgtggactctggtgaattcatggtcatggacatgcatgtcaggttggttagcagtggtaattaatggtagggcgacggttgccgttcccttccggccggttggtgtgttcgccccttgtctgcggtgttactactgccagttcgtagcgtggtggggccgtggggatggtgctgctgcggttattgcggtgttgatcaccgatagaccgtttgggtcgcaaagaggattactactagcgttaaactgttaaaaacggccgtaatgcgccgtgaaaactgatctcttggttggttggttgggctattcagtaaactgtactggtatattggtgtactgtaccatactgtttggagtagatccacagcactgttgatagcagggccgcccatccgtgccgtccagagtccagaccgcacggcttcggtcctgaaaggacaagcatggaagttggaaggctggctagcctagtagcactggtatattatgatgagagcaattttaacaggtacggagtacttcgcagaaaccagatactagtagtagtgtagtaggagtatttaatacagcaccttgaataccgacgggaaagcggaaatttattgagtttaaatccgcccaaaatcaagaaaatgtcctaaacatggcaagatgaggttagtatgtcacccttgagaaatgccaatacgcccaaaaagcagcttatagtaaaaatagcaacacatagggaacacattgtgtaagcatgttttttggccaattcttgaaggttttttttttcacattataaggctatgtaattgaaaacctccaaatagtacatccttaactcaaaagaaaaggagagaagcactacgatcttctgtctgacttatgatcgcttgttttcttttcttcagcttctttcctcttttgttgcctgaaagtaaaatgatcaatgttacgaacaacagagaggggtgctggaatttatcaagataaaagctgctcaaacaactaacataaaacctatgtataacaaatcttcatatagttatcctgttgttttaatggttaaaagtaagatgtttaagttacacagagtaactgacgcatcaaccatacattttatgcactgtaattgatattaccactgcatcataacagtatgaaaaacatatggatgtagttctctgagacaaaatattcatagggaaaacaatggcacagctatgaacagttca

SEQ ID NO: 7419 - DNA, 19721 bp, Oryza sativa
ggcgtcatctattaaaaaacggaggtagtattatggaacatctaaaaaagtggttgtgccttatattatggaatggatggagtatcttagtataaagttggtatccattaactcctaaagctcaacacgtaaccatgtcacatcatcacctactaacaataggatttgtgcctaaataaactatttttatacattattcgtaatctatatccatattaatataaaaaaatatttatttattttatgcatataaatctcaacataggttatgtcaacatttatgtataaaagtaggtttattttacgatgaatgtactacttagctagccagctcgattcacctgcaaaccaaataaaattaaaaaggaagagaacagaaaattaatttttatgttgatttatgtagttatatttagttagcaaatatcaaatagatcccctacattgaataaaaaaaattcttatgctctgcttttacattaaaatatttattaaactgaccttccatttatattcatatcgtactatcccaaaatgttggcctttatatttttttttctcatgctaatactcaaaattttaaaaatattaattaaaatcaccgtatattttatatgtttttcacacgatattattcttcaatattgttaatatagagttatagttgtgcgaatgctcgaatataggaaatgctgttatgcttgtaactacaagacatttttctttcttgtttggcaacgagcatttcgttgtggattctctgatgtaaacgaacaaactatctgtttcacattaacctggacatggaaaaaaatgtgttgcaagccacatttttaccacaacctaacgaacataatctgccatttttgtaggcgcatgcaggagcaaaagcatcagggccgcttatggcggagatgattatagatcttttggaaggaaatctgagtaatctacaacactttacaggcacgacacctctgttctgagttctgagtgagccttttaatttcggaattgtaattttgtcaacttgggtcccagagataccttttactttgatagttattgcacgttcccccccccccttttttcttattcgtaccgagggataggtatctaaccaaattacgctggaattttatgatcaaagcacattcgatcaagtgaggaacatgtcattaaaagaattttgtttggtattcgctcacatgagttccgggcgtaataatattttgttgattgctgcaatctcgtgcggcgtaacaaggtgaactctacaactcgggaatttttagttttatctggaattgtgaatactcctatgtagttatggacttgtgagtaagcaaagtgttggcaaaaagaatttttttaaaaaatcctcacccctcgccaagcctcacaatgtggataaatttgatgttggaaactcggagtatttatggtggatagagtatttatcgtggaaagaagcatcgtgtggtagaggccatagagcctcgctcccggctagcactgccagaacgaatacaagtggacgctcgcccgaccaaccagaagcagagcccgtgcagattgtggcggcgatgcggcctcgtgcttttgctcccccttgcctgccgggcagtggcccgctgcctggcctggcggtccccgggcgcggcgacctcttcccggctgccggcagcgtcgtcggcaggagggccgctcccgctcccgccggccggggcgccgtcgctcgcgcagtggacgggccgtccgccgctgcggccgttgccgccgcggcggcgtccgccgcggcggacgtcccgcccccgcagatcacgtggcagatcgtcgtcggcgctgtaggtgcgtccatgttgtcgtacgcttcggttcggcttcgcttcctcatcacttcccacaaattgtgatgtgcttgatcatggtatggtattgaccgggttttgtgcagctggagtgactcccttcgtcgtcgccggggtcgagttcggcaagagaattgtgagtgttggtttactgtttccttgctcgctagtcgctagctgcatgaaatctgctgagtagaattgcaccctccagactccagtcctctttgctgcccctctaaactgaacgcaaaaatactactccctccgttccaaaatatagcaacttttagttagatgggacatagaggcatgtccagattcgttagtactaagatttatcccatccaaccaaaagttgctatattttgggacggagggagtacttatcatgaaagtgagggttatgcaatagtgacaaatatttgggaacggatggagcagctagttgttagtactaatgttcattaaacagttcttattgacagtttgacactgaaatacgagtgtgaagaggatagtgcttatcgatcagacattcagagtttcagaccattccttaccaagttttactgtccttcacttgattattgtcttctcctgtatttcagattgcacagaagaaatgtgaaatctgtggaggctctgggcttgtgatgaagaaggattactacgttcgctgccaagggtgtggtacgtactgaatcctctgtttcagtatgtttgcagcagcaatttttcaggacttgaactgtgtggtgtgctgacagtatgataactgacaatgtgtgtcgccgtgtttcattgacaggcggttttcttccgtggcagtcatggagaagattcttcaccggctgaaaatcgttaatttgaatcgtgttgattaacactagcactgcagtttgagttggacaaggaggatatggcatgaccagaccaggtcaatattgtgtttatagttgttgttgttggaaatatagtcattattcggtatattttaatccaagaaattgaaactatgatcatggcataagcagtgtagggtgatcttaacataaccagtagcatactatgcgcatcatgaatgtcagaaacaggaacataccagtaatgcgataacatgctagaggcatcatgtagaacaggaacaagaacatagcgcacacagtatagcgctaacaatgggaacaggagtagcgctaacagcagtagaaggagaagattataccccgagaatggccctccgctggatggtgaggcagaattgcctccgttgttgtagtcgttcacggcacctcctcctggcgcaccagctccggatccagctcctgtcggcgtcggcggcggcgcagctcctgtcggcggcggcgcaccaccgccgccattgttagaataattgggctaggcccaacttataatattaaatctcaaaggcccataataaatgttgaggataataataccacctctggatttaagcgagaaatatctcaacctaaatagggagttattagaggctccctgttgaccagttgaggtgggggtcggaatgccacacgcgcgcgcgcgcgccgggccgtgggcgtggccgaggcgtggcgtggctggcggcgggcgggtgtcacgtcgctatccttttgcagccactaacccacgttcccacgattccctccgcaacaacgcgtccacgttctttctcctgatagataaggaggccgcgagtccgatccgagttcctcgcttatttcccggtgttagtttctccttctccgcgcctgagtgctctcgcttccccgcttctgatctcttgcgcgcacgagagattggaagaagcagtgcctcacaaaccacaccttcgcctgagatctgcaccgggtaggcgggtgatcaggtttttggggagtgcctcctgcacgactgctcatcgccatgtctggagttgctgccgccgctattggcggaggtggtgcgccgccgccgacaggagctgcgccgccgccgacgccgacaggagctggatccggagctggtgcgccaggaggaggtgccgtgaacgactacaacaacggaggcaattctgcctcaccatccagcggagggccattctcggggtataatcttctccttctactgctgttagcgctactcctgttcccattgttagcgctatactgtgtgcgctatgttcttgttcctgttctacatgatgcctctagcatgttatcgcattactggtatgttcctgtttctgacattcatgatgcgcatagtatgctactggttatgttaagatctatgccatgatcatagtttcaattccttggattaaaatatgccgaataatgactatatttccaacaatccaaaaacctgataggtcattttcggtagttggctttgctgctgcactgaaaccacatgcttttgatggttcaaactataagagatggaaagcacgtgcactattgtggttgacagcgatgcagtgcttctatgtttcacggggtaaacgaagtgaaccacctctttctcctgaggaagaggctaagttcgaggcttcggattgcctgttccgtggagcattgatcagtgtactcactgacaacatagtggacgtgtacatgcacatgccttctgggaaggacatgtgggatgcacttgaggccaagttcggagtttctgacgccggtagtgagctgtatgtcatggagcagttctatgactacaagatggtcgatgaccgttctgtagtagaacaagctcatgagattcagatgctggctaaggaacttgagaacaacaactgtgagttgccggacaagtttgtggcgggtggcattattgccaaactaccaccttcttggtcggactttgccacttctctaaagcacaagagacaagagttcagtgttcctgatctcattggctctttgggtgttgaggagaaggtgagggcaaaggacgtccggggcaaaaaggttgagggaggttctagtgccaatatggtacagaagaagaaccctcatgcatcccacaacaacaagaaagtcaagcctgatgtcaaacccaaggctgcaaccaattttaagaagaaaggcaagggaaaggcaaagggagactgctttgtgtgtggcaagtctgggcattgggccaaggactgtcctgagcgcaaagacatgaagtctgccaacatgatcattagcgagggcggaggaacatcggggtacggtaaaatattacctacagttctctctgtttttcattcacctgattggtgggtggatactggtgctaatattcatgtatgtgctgacatttctctgttttcttcttatcaggtcgggagaggttcctccttgttgatgggaaacgggtcgcttgcggctgttcatggtgttggtacggtcgatctgaagtttactttgggaaagaccgtgcagctgaagaacgtgcagcatgtcccttcaataaagaagaatctagttagcggctctctattgtgtagagaaggttttagacttgtgtttgagtccaataaatgtgtcgtatctaaatatgggacttttgttggaaaaggttatgacagcggaggcttgttccgcttttctttgaatgacatgtgtaataatcataacgctgtgaaccatattagcgagaatgatgagtctaatgtgtggcattcgcgactctgtcatgtgaatttcggttgtatgatgcgcttagctaacatgagtttaattccaaaattcactttggtcaaaggttccaagtgccatacttgtgttcaatcgaaacaacctcgcaagcctcacaaggcatctgaggcgaggaatttggcacctctggaacttgttcattccgatttgtgcgaaatgaacggcgtgttgactaaagggggaaagaaatatttcatgacactgatagatgattgcactagattttgctatgtgtatctattgaaaacaaaggatgaggcattgcattactttaaaatctataaagctgaggtagaaaaccaacttgaaaggaaaatcaaacggttgaggtctgatagaggtggggagtatttttccaatgagtttgcatccttttgcgaagagtttggaattattcatgagatgacgcctccctattcaccccaatcaaatggggtggccgaaagaaagaaccgtactctaactgagatggtgaatgccatgttagacactgcggggctttccaaggaatggtggggtgaggcagttctgactgcgtgtcatgtcctgaataaaattccaatgaagcacaaggaagtaacaccattcgaggaatgggaaaggaagaaattaaatctctcatacctacgaacatggggctgtttggccaaggtaaatgtacctatagtcaaaaagcggaaacttggaccaaaaactgttgattgtgtgtttcttggttatgctatccacagtgtgggttatagattcttaatagtaaactctggagtacccgacatgcatgctggtacaatttttgagtccagagatgctactttctttgagaatgaatttcctatgaaatatacacctagcacttctagtaaagaaactgtcatgccccatgagcactttgcaccgatagaacacaatgatcaaacgcctgaggaaaatcctgaggaggacaacattgtagatactcgcaagagtaagagacaaagggttgcaaaatcctttggagatgactacattgtatacctcgtggatgacaccccaagaaccatagaagaggcatattcatctcctgacgctgactactggaaggaagcagtacgcagtgaaatggactcgattatgtctaatggtacttgggaagtcgttgagcgtccatatggatgtaagcccgtaggatgcaaatgggttttcaagaaaaagcttaggcctgatggtacaatcgaaaagtataaggcaaggcttgtggccaagggttatacccaaaaggaaggcgaggatttcttcgacacatattcaccagttgctcgcttgactacgattcgagtactacttgctctggcagcctctcatggtcttctcgtccatcagatggacgttaagacaactttcctaaacggagagctggaggaggagatctatatggatcaaccagacgggtatgtactagaaggtcaggagggaatggtgtgtaaactattgaaatccttgtatggcctcaagcaagcacctaagcaatggcatgagaagtttgacaccacgcttacatctgcaggctttgttgtgaacgaagctgacaaatgtgtatactatcgctatggtgggggagaaggggtgatcttatgcttgtatgtcgatgacatactgatctttgggaccagccttaatgtgattgaggaggtcaaagactatctgtccaagagttttgaaatgaaggatttgggagaggctgatgttattcttaacatcaaactacaaagaggagatgagggtgggattacacttgtgcaatcccactatgtggacaaggttttgagtcgctttggatatagtgactgtaagccagctcctactccttatgatcccagcgtgctattaaggtaaaaccgaagaatagcaagggatcaactgagatactctcaaatcattggttcattgatgtacttggctagcgcaacgaggcctgacatctcatttgctgtaagcaagctgagccggtttgtctcaaatccgggagatgatcattggcaggctctggaaagagtaatgcgctatctaaagggcactatgagctatggaattcactataccgggtatccaaaagtactagaagggtatagtgactcaaactggatatctgatgctgatgagataaaagccacaagtggatatgcgttcacacttggaggtggcgctgtttcctggaagtcttgcaagcagaccatcttaacgaggtcaacaatggaagcagaacttacagcactagatactgcgacagttgaggctgagtggcttcgtgaactcctgatggatttgccagtggttgaaaaaccagtgccagctatcctaatgaactgcgataatcaaacagtgattattaaagtgaacagttcaaaggacaacatgaagtcatctagacacatcaagagaagactgaaatctgtcagaaagcagaaaaactccggagtgatagcattggactatgtccaaacggctagaaatctggcagatcagtttaccaaggggctaccacgtaatgtgatagacagtgcatcgagggaaatgggcttgatacccacctaaggttgcataatagtggaaacctgtccattgtgatcggagatcccgtgaatttggatggtgaaacaaattattgtgtgactgagagaagagactcttgaaaggggctcattttcatgatgtgcttctcttctttcctgcatggtaggatggcttatgtcttaatgtgatccgagtggcttttccaagcagagatgttgacctgcagaacatctcagaaggaacacacctatatgagttcgactgctagtcacagtctatgaggtttgggcaatctctagatactcatgaaaggcctggagtttgacttatatgctccaaacagaggggatgcgaacggcagcccagtaccagtcaaggttctgagtgaaacctgatcacacaaaacttacaattcaaggcatagtccattgttcagttgtggtctgatgtagctcatttcctaggtggaagttcaacttaacagtctccacaaaaactctgatatatcaaacaggcacagccttgagaacatttcttatgagccttgaaatttggtggggattgttagaataattgggctaggcccaacttataatattaaatctcaaaggcccataataaatgttgaggataataataccacctctggatttaagcgagaaatatctcaacctaaatagggagttattagaggctccctgttgaccagttgaggtgggggtcggaatgccacacgcgcgcgcgcgcgcgccgggccgtgggcgtgggcgaggcgtggctggctggcggcgggcgtgcgtgcgtgcgtcacgtcgctatccttttgcagccactaacccacgttcccacgattccctccgcaacaacgcgtccacgttctttctcctgatagataaggaggccgcgagtccgatccgagttcctcgcttctttcccggtgttagtttctccttctccgcgcctgagttgctctcgcttccccgcttctgatctcttgcgcgcacgagagattggaagaagcagtgcctccgaaaccacaccttcgcctgagatctgcaccgggtaggcgggtgatcaggtttttggggagtgcctcctgcacgactgctcattgccatgtctggagttgctgccgccgctattggcggaggtggtgcgccgccgccgacaggagctgcgccgccgccgacgccgacaggagctggatccggagctggtgcgccaggaggaggtgccgtgaacgactacaacaacggaggcaattctgcctcaccatccagcggagggccattctcggggtataatcttctccttctactgctgttagcgctactcctgttcccattgttagcgctatactgtatgcgctatgttcttgttcctgttctacatgatgcctctagcatgttatcgcattactggtatgttcctgtttctgacattcatgatgcgcatagtatgctactggttatgttaagatcaccctacactgcttatgccatgatcatagtttcaattccttggattaaaatataccgaataatgactatatttccaacagttgtctataacatatctccactacaaatggccaaataggttcatcgagatgtatcacaatagtacactgtaatcatggtcatggttcttctgtctataccatgcatatgacgcagcatatgaccatcctctgagagtctatcagcccaaaatctcatgggacgtgcgttcacgacaactacttgtggtcttctggagctgtaaacaagaattatctagccatcaagctaaactataaccttccaaaagcggcatacacgtttcgttcgtcatgtatgcaagatctacttcgtgatgcctcagtttattcgttcgtcaatgcaaagcgttttgatcaccgaacaaacccatgtctgcgatatgagcaaactgagtctggcctcgaatctaaatactcctacataggtttcatactttcatcgcaaggactataataactggagtagttaggtttatgtttagttcaacttgtctttcagcccagaagatcacatatcgtctccacgtgtgcgtctggtttgactcgaggaccacgatacaagatgttaattgttaaatgggtcacttcctcatctctctaggctaatgtaaaatggtatgaggctgacaccaaaatccaactaaatcatcggatgatctcacagagtcccgtaatgagccttttctgattaaaaattgtaagttggtgttaccaacacaacaacacttatcaatttatcattttgagtgtgagattgtaataattggttgtaactctttaaaaaaaaaggccgggacgccccatttcattatcagaaaaagaaccatggtgtgttctgcggcttctgccatctactcatggcaagatctacttcctgatgcccaaactgctggtcgcgcccctgacatcaatcgtcgcaccatccattcgatcggtttagatccggcgcgcgccggacgcgcggttctcttcggttccaggcagccggcgcgcccatcccgacttggcgtgattgccgcggatgcagtttagttggttccgtcgcgtaacctcccttatctcctcgcttcccattcctgggctctgactcggacgcccttttgtccccacccgccgatccgccgccgcgagcccgcgaccgcgagacgagacgaaaccaactcgtccccctcttgatcccccgtctcgcttcgctcggcggccgcgccacctccaaatctccaagctccccgactcggcgactcccacacgccatgcccatcgcgcccgcggcttgcagccatcaaacccccccgcgctctttcgcctcctgagcccgtccgctcgcccgtggccatggacgcgatcagcagcgaggcgccggtgggggtgttcgcgatcggcccgtccacggcgctgggccgcgcgttggcgctgcgggtgctgctctgcggctccctggggcggctgcgccaccgcctcgccgcggcgctgcgggccgcgctccccgtggcggcgggctggctgcacccgcgggacaacacccgcgggatcctgctcgccgtctgcgccgtcgcgctcctgctgcgggtgcgggggcggggcggcgggcgcgccggggtccgggcgcgggtgcagtccgcgtaccggcgcaagttctggcggaacatgatgcgcgccgcgctcacctacgaggagtgggcgcacgccgcgcggatgctggaccgcgagaccccgcgccgcgccaccgacgccgacctctacgacgaggagctcgtgcgcaacaagctccgcgagctcaggcaccgccgccaggagggctcgctcagggacatcgtcttctgcatgcgcgccgacctgctcaggaatctcggcaacatgtgcaactccgagctccacaaggggaggctgcaggtaactgctctaatcttaacctgtattacgcccgcaaatttgatgcaattagatggttgttaggagttaggatagctaattctcagaacttcagcaatgcttctactttccctttgttacaactgaagtaaagtaattccattacactaaatctgcgaagtggatccacttccattacacacaccaagatagtcttggaaatttttttcactttgttcggatgatttgtttgtgttatgtcagtacggcaacaaattatacgaagtactcatattcatagtgatagcctgataggatccccttttgatgtccccattggagcatctactcaaatgtctattcttatatatcactatgtcatattgccaggtgccgaaactcataaaggagtacattgaggaagtatctactcagctgaaaatggtatgtaattctgattcagacgacttgcctctcgaagagaaacttgcatttatgcatgagacaagacatgccttcggtagaacagccttgctgctaagcgggggtgcttctctaggttgtttccatgtgggtgttgtgaaaacattggtagaacataagcttctgccaaggataatttcaggatctagcgttggttctataatgtgctccatagtagcaacaaggtcatggccagagctggagagctttttcgaggagtggcattccttgaagttctttgaccagatgggcgggatctttcccgtagttaaaaggattttgactcatggagctgttcatgacattagacatttgcagacgcttttgagaaatcttaccagcaatttgacattccaagaggcctatgacatgacgggccggattcttgttgtcactgtgtgttctccaaggaagcatgagccacctcgatgcctgaactatttgacatcacctcatgttctcatctggagtgcagtaactgcttcctgtgcttttcctggtctttttgaggcccaagagttgatggcaaaagacagatttggagaaacagttccttttcatgctcctttcctgttgggcttggaagaaagagttggtgctacaactcggcgttggagagatgggagcttggaaagtgatttgccaatgaagcaattgaaggaattattcaatgtgaatcatttcatagtaagccaagccaatcctcacatagctccactgttgagactcaaggaaattatcagggcttatggaggcagttttgctgccaaggtgcgtgtcaaaaacattccatattgcattctttatttttgattgtttatttacttgagctgtctgtgatataacttgatatcgatttcatggtgggaaggatttttattttcacttggattgctacatgatataactttcagtatttcaggcatgtttgtggcttagtagcctagtgtagaactatgctcagcaaggtttagttcactgcagatattagttgaattttatgtctgatgaataattcaatatactaaaactgctatgggcaagcaggggaggagacaagcctagggaaattagggtttgaactctaggcttgtctccttaatctcttcgaaatccatttaaaaagtgaaaaaactatgtaaaagtttgaaatttaacaaatcagattagttgagccctaggcttatgaatttccttgctttgcctctatgggcaagcatgtatttaagtgctttgttgtatgatctcatagattcttcaatactatctgtatgtagttggctgaacttgctgagatggaagttaagcataggtgcaaccaaattctcgaacttggatttcctttaggaggaatagccaagttgtttgctcaagattgggaaggtgatgtcacagttgttatgccagccacgcttgctcaggtctttaatatttcccattcctttctttcacaaatatccttggcattaactggtaaacttacaaatgaattctttcttgttatcatcagtattccaagatcatacagaatccatcttacgctgagcttcagaaggctgcaaatcagggtaggcgatgcacctgggagaagttatcagccattagggcaaattgtgctattgagctggtactagatgaatgtgttgccctgttgaaccatatgcgtaggctaaagagaagcgcggaaagagcagcagcttcacaaggacatggtcctacaatcagactctgcccatctagaaggattccatcatggaatctcatagcaagagaaaattcatctggttcccttgaagaagaattccttatatctcctcgtacaaaccatcatgcagatggaggaattgctggaccatctaacaaaaaccatcatgtccaacaaaatgtacatgatggcagtgacagtgaatctgagagtatagacttaaactcatggacaagaagtggtggccctcttatgaggacagcctcagccaacaaattcgtcagttttgttcagaatcttgagattgacacagagttcagaacaatttcatcgagggaagacagaactgatgttgtaacaccaaatgctaatttcttggtttctcaggcaattggtagagaatctgttgacaacagtgcaatgcctattactcctgataggagcttgggcaattcaggttatgatcctcatgatagtaatgtccctagatctccatttggttgttcaacaagtatcatggtttctgaaggcgacttactgcaacccgaaaagattgaaaatggtattctgtttaatgttgtgaaaagggatactcttctaacacctacaggtggagttgagcttcagggaacatcgcaggaaccagacgtggaaacaattcagacagagtgccttgatgatgcttcggatgacgacgatgtgggattaaatgctggtgatgaagcagcaattgaccctagagcaaacatgagcagccaaaatacacaacaccaggggtcttcactagaaaatataaatctgtcctcttcagtagattgtgaagctgaaacaattactagtaaatcaaagggttcatctctttttgatattggtatggagattcgtccaacaatcttgagcacggaaagtagtatgtacgagaggtcttctgcaaaaataggactgaggacagtgcatgcagaatttatcagcaatccaggtgctgggaagggagaagttgactcaggggctgctaataaagaattttcctatttttctcaaacagcagatactgttatattttcagaaagctgtgaaactgggcaacatcatgaagtgaatgtagaagctttaacctcataccctgtttcagttctggaagatgataggtctggtggcttcaatttgagtgaaataatggctacaactttcattgccgaagctgatgctccaatatctagaagagatgaagttgagcagcataacggatctccagtggaaacattcctggacacagaaacggtacaagctgggccttgcagttctactttggagggcaacaacaccaacaattccgaggaaatgcaagttgtttgcacctcaggaaccaattagaagtcaagacaagaagggaagttttggatttatcatatgaaaaaacaacttcagtgctcgttgtaaatcatatgcagatgtgcgccatgttctgttgtcgatttaaattcgcacattacggaatatcttgttatgtattgtaggttagtgaactagggaaagaggtcgctgaacttgatgaaattcctcgtaaataggaaaagaatgtcaatggttttgttgaagctgctgcttgacaaaagcaaaacaaattccacttctgcgcagtactcgctcaccttatcactagggtgatgatcagttcgtacaattgtggaagattaagcatcatcagggtgatgattagttggtacattgtactagagggagtaggagtactaggtttagagatacaaaaactaattagttgacccgggacttcaggtgttgccgaatgtcaccgttgcgtggtcgtttcttggagacgtcgtagacggacacgatgatgctggcggtggcgggcggatgagcaaccctgggcacgacgaacgcgtagcagtcggccggcaacgacccaccgtcgagggccgtgctcctcaccgggaactccgacgacgaccgccaccccgtggcgcggcagtggaacgcgacgtggcactcgaacttgggcttcgccttcgcgccggcatggggatccaggaggagcacggcgccggcgaggccggcgggtccggccggcgcgacgtcgaccaggaacaggtggccgccgtccacgtcgcggaggacccgcttgccctcctggacctgcaggtcgaacgccctggcgcgcctgaactcggtggcgggcggccagccgtggccgccggtgaagtgcgcgggcagcgacgaggtcgcgccggcgaagccgcacccgggctccgggcagaagcacggcgcgtgcgggcacccgtcctcgtggctgtcgctgtcgtggtaggccgtcttggcgtcgcacccgtagccggcgttgcggcaaggcaccaggatggacctcaggatttgctccacggcgaagcagcggttgtacgcggtgtccatggcgcagacgtggcacctgttcttgtccgggagcttgccatggcaggacgaacaaatgacatgcccaactccacactaccaaaaaaaaaaaaaagaggacccgaaaaacaggttaatcaagatcaatacatggtgaatgttgctcatacatccatggtagaaagacagaaaaggaaccaattttacaatattagagacaaggatgattgagtacctgcaagactggaggcttgaggggatgacagcagacggtgcagtcgagtacctccagatcgacggtggcattggtggcgacggagctcctctgcccggcgctctgctccatcgctattcgctccctctcttcttcttgattgcaaatttgctgcgcaacggctaaaaactcaaaactttctttgcaaccttttcatttcgtcaggctaggtgcagtaggagtgtggtagtactaaaactggtaagcctgacggatttgacgtttgacagaagccaacggcttttgctcggagggagctgcattttgatttttgaaaacgcctttcatttacctttttttaaagtacattggaacacatgtactaggttaaatcaatattttcacttaacactatactccctccgtaaaaaaaaaaccaacctaagaagctaaacggagcctaagaagtatgggatgagatataatctagtacaacaaatctggaaagaagtctgaccaaattttgttgtgacggagggaatacatctttacataagtctccagtttggactccgggtgatcaaaataagcgaatatgtgagagaacttcatatgatttacacacgtataattataaaaggcaaaacattttatgttttcttccttcttttcggtgtgagcggtaattaactagttttaccttttcttaagtaaattttacattgggccatatgttttgatcaagattttgttataaactagggttaaatcaatattttcacttaacaatatacatctttacataagttttcagtttggactagggtctaagggtaatcgaaacaagggaatatgtgagagaacttcatatgatttgcatacggataattataaaaggcaaaacattttatgctttcttcttcttttcagtgtgagtggtaattaactagttttattttatatttttatttaaattcaaaaataactagttttattttctattttatttttgttcatttgcccctacgtatagatcattttgtgccacttttaaacatgttcacatcattattttagtgtgatttgctaaaaaaaagttgttttgtgatttgcaaatatttttttaaagatatttatcttaatactatggcactatggatgatgatttaaactagcttttctctgacaacttcctttgatgtgctcatcccaagtccaaagtgccaactagtgcaaagatatgtaatgttaagtgaaaaggttgatttggccatttcccattgtgaaactttgttaaaaatgtatggtgcaatgtgaaatttacttcttggtttaggactttttccttcccagtgtcttattgccactttgtccaccaaaggttggaagtgaatcatgtgaagcaatttatcctactagtgttcacccgagaagagaacagaaggtgcgtcccttgttgccttggcacgtaatttagcctctgctaaccaatgacctagagcaaaggtataaaacaaaaggcgatacaatggcattgccttacttactactaggtgcaactaatttgaattcaaatatgcgtagcggtttctacctgttcgagattattgactggattattgttgcgggctatctactttattctgggataaattaaatatttttaatctaaacttataaatggcttagaataagtggtctaagcaatgcattagaagaaagtttttttttaaaaaaaacatattctcaaaggtgtggaacaaataatccacatcaaaaatccagtgaagtagaaatgaacatgttttataccacttatttctctgtcgtccaaacacccaaagataataatacccttgctataggaaatcaatgtgtattttgtctagaagtccaattcttctaagctaaatggatgattgattatctaaatttatgatgatattccaagatataaagtatgaattaactattaccaagttgaaaagttgtttctaaaaaaagtattataagaaacttatagatagaaaacttttgcaaaaaatgcaccgttggggagcttgggaagcgtgctcatgataatcaataatccaaggaataagatcgatcgtgtgtttattggcttatcagctgcaaccaaaatttgaatgtttgaaacttagttttagattttagagttaattttcggatttattcatcatagtttattttgtagtattgacttttaaactggtaataacccataaattgttttggattacttcattcttttttggagtaaaatatgggtactacaatacatgatgtaaactacgcatagtgagtcaacttatgtgattggtttgtgcatgctcaaatccaaaattttggatacgtgttgttgcttttgacatgctgaactcttgtgccacaagcagtcaaagccacagtttttgtggtgctcaaaagactcgccaaacttttaatggaagtccaactagtgatttgagtgcctagccaacttttaatgtatataatagataagtgatatttttttatatgatctacaaacaagctaacacgtttcaatatttgaaaggtttcaaagttgtttgcatctcaagactttaaccgcgttcatagaagtgatggaaaatattcctcacatgttcattatgacatatatgcaagtcactctatctcttacactcctttttatgctcctttttatggatcacaaattaatatttcttgaaggcacatggttatatatgtatcgattgttaattagataaatggaacttgtgtactcataatatttaatatagctatttagacgggaaacaaaattattattgttcttattccaaccatccaatattacatagctacaataagcatgcagtcttttatttcttgtaatttatttggaaaccatccctagcaatccaagcctatactataatgatgcagtcatgatatcttggaagttactgtaggcatgactaggagtgaacacgcctgactccactctcctgttgtgcttgagtctcctagcttcttctcttgagatacgatatgcatttgccaaaacattgttaggaagtgcacggaagatggaattctttcccacgatttggctaacaatggaattagggttggttttgaatgcaatatataagcatccttctctttgtgcttttttcacaactacatggtgttgtggtataattagcagctgcccaggacgaacctctccatcaaacactgtctttccattgttgttgacaacttgaacccggcatgaccttgagtaatatagacaatgctatgagcattgatgttccaaaaaggtgaaaggagcgcgttctacaacaaaggg

SEQ ID NO: 7420 - DNA, 45881 bp, Oryza sativa
accggtgtgacacaactgaataagttagaagacttaaacgagtgatctgcaagtttagggaccgggatgacacggttgaacaagtttgaggactaaacggtcgatttgcgagtttatggaccgggatgacacagtggtacaagtttagggaccagtgatagactttattcttttattttttttttgataaactggcagacgcatcatattttgcttggacttccgacttcttacatggacggatgcatatgcagagtacttctccggcaggctaaaaattgtcgctcgatctatgtacgcaaagcacgacgatgaagtagtcgctactggcatcgctgtctcgtggaaaatgtcagttgttttgtctacagatcgttacgcattaactcatggccactagcagtcaaacgaccctctcaaaaatgggctgacagaggcaaggggaccccctgggttaactttgtcacgttgcttctgcaacagtagtccacggtaccaccaccaccaccacgccaaaatttcttcgcattggaagcagaaatatcttcgctttccaggcttagctacgttttttcgtcgatcccctttgaaaaaccgatccgaacgtgtctgtctagtgtataccctcgagaccttgagtttcccgtttttacggagcacggtacagtggcgaggactacgaccgtgcaccagaaggaaaaagaaaaaggaaaaaaaaaactccgtccgtatcgtgtcatcagatgtgctgtcagcttcgtgcgcccttgacccatctgtagttaagcgtgtgccgcagctttcatgctttcattcaagcagcatgaatgaatgcactgcatgcagcaggcagcaacaacatcaaagaaaaagaccgcgcgcgatgacgtcgaaacgcacaggagatgcatgtgttgatgattggtactggagacggctgaactcttctcgtctggccaccggccgcggcccggcccgcgacacatgcatgcagtcagccacggtcacacacacacctgatcgacctgccgcctgccgtctgcccgtctgccgcgcgctgcttctctctccgtccgatggcgcgtgcagtgcgtcccattgccccctcgttaattttttttttcccgctcgtctcgcgcgcgctacaaacgcgaacggtcccacggcggcgcgcgtacaggcgtggttaattcgcgcatgcatgatttgtaccacagtttgacggttagcctttgcccatactcgctctatcccaaaacggcacaacctaatttaatcttaagacaattattttattcggattaggtgtactagaatagatcacatcttattttagattaggtaattttttttaagacgaagcgagtataattttctctcagatcgaggatcgagctgctccttttgctgctatgttagtactttgggttagagactactccctccgtcccagaaaataaacatttttagagttggacacaattattaagaaagtatgtagaagtgaatggtggagggttgtgattggttaaatagtggtggtaggtgggaaaagtgaatggtgaagatttgtgattggttgggaagagaatgttggtggagaagttgttatattttgggataaatcttgagggctaaaagttattatattttgggacagatagagtagctagagggttcacggtcgatctgattgtctccctccgtcccataaaaaaccaatctagtactggatgtgacatatcctaatactataaatctggacatacctctgtctagatttgttgtactataatgtgtcacatctagtcctagattcgttttttcggaacggagagagtacgtagttaaagggggaagaaaggcgttaggctgatatgtatatatgtatatgtatgccatgctctaagaagacgcatgggtaggtgtgcttttgtttcagaagtactccctccgtctaaagaaaccaacctcgtactacgacgtgattaggatgcgtcacattctaatactaaggttgtatttttttttttgcggaggaagtatatggttcgactaatttctgtgataaggtagatttatgagtgcgatctgatcaggcgcaatggtgcacacacagttgttgcatacacatatatgtgtacgatggatatgccatgtggtgctgatggcgattcgtgtctcgatcgatctgtgccagggcctgcattgtgccggccggccggctgcagcgacgaccatgcgatgcagggcagaataagcgcctttggagcatgcaacctaactccagcttgcaaaaagggcgtggcgacaaaccgctagcggagatcgaacatgcaacatgaatgatcatgcgcgggggccatttcattgtttgatcgtgcgtgcatgcgcgcggttgcgcttggaccggccggccgagcgcctcctccacccatcgatcgctttctctgcagattggaagcagactttatattaatttgtccctccagggacatcacatcgttttatatatggcgttcaaaaataataataaaaataaaatatttatcaagatatatcaatatatgatatatcttttcgcaaacatacgagttaaattttgacttatacaattcaaaacaaaaataatatgaccgtgaattacacgttctattcgtagtcaaatttattatttttatttctacttatataagttgaatttgaattttttatatttatgaagtgacatataacatattaatttatcctactatatttttttcaattttttttataacctaaaaatggcccaaccatcatcacgctcatcagctcatgcattgtcgctcgataggtgcagttgggagacagtagtagagattcaggggaattgaaacaacatttacaaacaaattaagtgcaaactctaaataatgagatctgctttaattaacgaactactccagtatttaaccgtatgacgtcatacagtcgactgtgctagcgatattttgctagcggtgcttccatatttagccatatgactttgtgcatagttagggcaacgctctaaacagttaatggaggtatgtattattcatgccacgttttcaaaattgcgctttttgggtcaaacaaaattcctacatccacatttgttatatttataatatttaggacctgttttagatccctggcaagttttatcaccatgtcacatcgaatatttaaacacatgcttgaagtattaaatatagacaaaaaaaactagttacacagattgcgtgtaaattacgagacgaatcttttaagcataattgcttcataatttgacaatatggtgctacagtaaatatttgctaatgagggattaattaggcttaataaattcgtctcgcagtttacatgcggattctgtaatttgttttgttattaggctacgtttaatactacaaatgtatgtccgtatatccgatatgacacggcaaaaattttcacccctggatccaaacacagccttaatctaatttacccgtatatgagtaactttcatccagtcataattaataaatcaattcccagttagaagaagttggtagaatagtcgatcttagggtaaatttaagataagctgaatctatcgtcatttctttactcatttggcattctaagattataacttaacaaacaactgtttgagataacctagctaattacttcctccgttttataatgtaagtctttctaacattgtttacattcaatatatatgtgtgtctaaattcattaacatccatatgaatgtggacaatgttagaaagtcttacattatgaaacagagggagtatatgatttcaaacggtaatgctacataacgttatctcattccaaggcatggaatgagatgctcttatgctctttcctccgcaaatgcgagggaggggcacgccttgccgctgcatggttcaaccagcgaaaccgcctaccgccaacactattgcctcttgctcctcttcctcctccgcagatcctcgccaccgtccccatctccgcatgcgcagtcgcctccctatgtccgcctagcaccgccaaacaacgagtaatacacaatgtgacgatgagcctgagcggcatcctctagagtctagacattacggagcaggacaccaaaatgccttgctacagttagagagcttaatttgccaatgacttgatgtcctcctcctcttccacttgaaagaagtttgcgatggacatggtagccatgagcctcctggattgattttgatttgagtcgatgtatttgctacatcctcttgcttctagaatcaatatacttttcctagattccgagacaactgtatgggtacgtacttgtcattgttgcaaaactgggctaagtatgcaaggtggctatatcttgattcatcatggggtagtgctctcttgagaatttacacctgattccgagtttccgacatgtattaggcttgatacacctaggtatcgatcggcctgttaccggatgatatcatttttgtactgatgggtatcacttggtacaaagagggggtatcagatcgatctggtaccggattggcgagtagtactattcaagatgctctagcagtcccctgattcaattatgcagttagcttgtggaaacactaccaaactctcctcttttaaacatgatcgatgaagattcacacgcattattatttttgaacagtattagagcatctgaagctctgaacatgtatggttcatcttcatccgtagcaaatgcatgcacaggagttcagctacttccttatttacaccgttcctagctgtttgaagctgcaaatccggggctggcctgtatagtactacacatatacaccacttggtgtccattaatgtcgaagcatgcgtggcccatttgtctccgaccatgcatgcatgggtactaaccgtgctagcagaggtagattaatggaaaggccagtatatatagcagagtgtgcgtacacatgatcagacagaatgaatgcgtggtcggtctcgacgctgcgtgtagttcctttcaaagttaaaaatttaggttgaaattggtatgatgtactgagactgaaaagttgtgtataacatgttgatgtgatggaaaaagttggaagttttgatctaaagacagccggagcttaatttgcatgctcttcgctgtcacactactacacgtacgacctcgctgaacaaccttagaactgcatgtgatgaatatctagcgagccatcatgccagtactgtgtaccgtagcctgaatatatgcatgcatgcatgcctgacgagctgagtgatcgatcgatggcagcacgttgctgacagcaagcatgcatagacgagatgcatgcatgtgtgatcgatcgaggcgctagctgccgcggtgatagcgtgcatacatgcatgcagtagtgcagagtgcatgatcgaggtactcactccgtttcaaaggccaatatgaacattttcaggatttaaactttattaccacataatagcattttctaacacctaagacattaattccaatatacaaggtgatataatcgagggaaaccaagcaaatcaaaatttaaaatttaaccattaagatgactaatatagtacattttaagctttacctacgctaaacaatatagaggtgtttatatttagaaacggagggagtataagcatttataggatatatataaattttgtaaatactattaagtatttttgaaacattaatttcaatgcacgggattctaagcattttttaactaacaaaatacaagtgttcttaggggtgtttatgagggaacttaggcaattcaattttctttaacgaatcagcacagaccgtgccaatttcattaaatatagagggagtaaaaatttatgtacacgaagtgaaaaaaatatgagttgtacaaagatatgctagggcatcatcaatgattaaggtcgctaaaggaataaggtgggaaccaatagtcttttcttgatcttgagctaggacccactgataaaaaaaactctattcagtagaaataaaagagcatcatacatgttgcaaaggcgtgaactatttttttttattttttatgatctaaccttaagcttaagattgcccatagcaatattccttgctttgctactctcctaataatgcataaaggtagaacaaaaatactactttattccttaaggttactttgcatccagtattagcctgcaacattatagatgccctatgactcttgctttatggtattagctgcgctagccgatctttacaccaacgagcacccaagttttcccttcttccttgattttggctagaagcgatagcataaacaacctcttttgctaaaaaaattctcttgtttcactctttccagatttttagcaaccttatcatgtttgtctttaaatttgttcaacgcggtgactgaatattttcctttatccttaatttttggcaacctaatgatgctttatgttttgaaacgttgggagtagtagctactccctctgatcccataaaaaaccaaactaatatcggatgtgacacattctaatactacgaacttaaatatacatatgttcagatttatcgtactataatatgtcacatccgattctagattcgttttttataggacagatggagtacgtagcatgcaggatgcagccaagagaacccatccgtggccatcgctagatctatccattaatccatgcatggatcgatcgatcgatgtgcagaggctgcagacatgcgtacgatggcagaaggacacccaaattaattaagctcgcgcgcgcgatcgatcgacgatcgatcgctatagctactagctatgtggatgagagcagaaatcgataattaattatgacaattactactgggccggcgacgaacagacacagagaaccacgcatatctgcagctcgatcgatcacactgatctgcatctgcatcgatcgcgatcaatcgatcgatcggcggacggcgtactgccacctgctgctgatcgaactgctgatatatgcgaggccattgcgcctacgtacgcgacggcatctcatgcgtcgtcttggctggcctcagctcaaatggggcgggagctactgtcttggcctcaggccctcagctgaaatggggcgggagctactgctagctgtgagggtagtagcttgattgctgctacggatagttcagatgatattgagactggcagccatgcatgctgctgctctgctccctgcatgcatgcccaagggctgcatacccctgcatgcctggccggcctgtatacatcgatctatccatatactacatgcatttccatttcagcttggtttccaggggcagcaggcaggagagggaggctgctggctgctgctgcagctagcgccactgcactgcacacacaaacttaaaggtggcctttcattcattgcccctcgctagtggccgctgtccccaacactgctcctctgcctgcctccatcctccccccccccccccaccacacacacccaaccacaggaccacctcttcgatctctctccctcctttttcagctgcaccagctgcaactctctcctctctctctctctcaccgagctgcattgccgcagtggtcactgctcagatcagagcggtgaagcatgcaattactggctgactagctagctgctgaaacgagctcaaaaggaaagagctgagctgagccgggcgcgcgggcgaggcagcatatgcatgcatgttttgtatgatgggcaatgaaacactgcaggggcaggcactagctacttgcttgactgtgcctgctcacaggcagctagctgtgcgagcctgcatgtcttctagtgtgcctcagcgaggaacagagatatggatattactcgtaaagagattggtcctagaaacagatcgatctgcatgcatgcctttcaaaccccaaaacaattgtttgcttgggttgcaaccatatggtggaaagctgtcatatatgctagtattgctcatgtatgtttttctcacatttgcagcaggatatcgcaggtgtttccatggccaatttctgtgtgtttcctacagcaattatggacttacagcaggtgtacatgtgcgtgacccagttcttttttaattccatcaccaccgccctcttcttatattcattcatccattaattcctgtgcttgctatccattggggaccttcagttagtttgggccctctgaatgagttgtcccaaggaacaatctataatgatgttctgatgactgccactgcatgttgtggtgtgtgtttgtcgccttgatgtgtctgtgcatgctagtagtagtagtatattgcaataaaccttttgcacacaagaaaggggagaatgctctgaggcgagacatggatgatactcctaccgaggaggatcatattcataggttttgtgcggtgcagtgcgtgctagcgcctgctgcaagcaggcatgtatcaagattcaagatatggcatgcaagatgctttgcacttttttactgtatctgggatgatactatatactcgtactatgcatgatcgattctcgcatcgcatgcatgcatgagcatgactttgccaatgggatgtcagtgatatatgcatggctagctcatcgcttctgggtattatgttgcagtgatgcagccttgcttgcacggcccaatgcaacggaaagatcagaatatactctctccatcctaaaagaatttctatcctggctatgaatctgaacacacaatatgtctaggtttctaagttaagattgattttttattggatatatcattgatctcctttcacatactcctacctactcctgaacaggcacaattaaaaatggtgagaaagaaagggcaagatcgcaagaggaaatgtcaattaactaaataaataaatatataatcatcagtgtcatattgtgtgtgtatgtgtgtaagaggaagataagggggagccgtggaggcacaggtgagaactgagaactatgctcgatctttgagaacgtgagaaacattgcaaatgatacactgctgattctgatgggtatcatcgtcactgggtggtagctactattcatatggccaccgtataaagcagctagctagggaacattgttctgatttatgacatgcaccagctagctagctagactgatatttactccatccatatatgttttcttcatccatcctaagatataaagctgctccctctatccgtgaatataagagattatactttttttttaagaattaaggaagtaagaaaatgacatgtgatgagataaaatgtgatgtgtgaaagaataaagtagtactctctccgtcctttaatataaaatcccttatattatgggacggagggagtataaaaattagtaggtgggagaataaattagtataaaagtagatggtagatgaataaattagtacaaaagttggagaacatgatgctgtcttggaattctaaaaccccttatattttggaacaaatttgataaaaaaatctcttatattcatgtatggagggagtatacctctgcagctcaatatacatatatatttcgtaagtacatataacatctctctaaaagtgttatatataaaagtttgatttattttaaataaagcaataataatattgtacgcttattgaggatacattcaaaattcatccttttgtgtcgaaatgacttcaattatatttactcctccgcttcatattatttattgttttagctttgtcctaagtcaaatattcctaagtactttagctatatattaattttagatattcatatagtttataatatatgaattatttatgtaatgaaagtatttatcatggtgaacctaaaacaatactaaattttataaatgttaaagtatataattttctaaaaaaaggtcaaagttagtaatatttggcatatataacaaagctaaaaacaacaaataatttgaaacggatggcataaagtattttaaaggcaaattattgggtaattaaaaatagtttgacttaacataacgggagagatattaattagtaattaggatagcttgagccagcattatgtatttgatactgctaattagctagagcaatgaacaatcaaaatcaaacaactgaactgacctattgctgacagttttctgtgagcatgagaagatgatactaatcccaaatccttttccttttcatagaaatgatcttatctgattatttctcccttttttgggtccaaatttatgtctttactgaggataaaagtaggtgtggtcctgctagctactagttgatgctcaaaagatggatggtccctagactaaactagcctcctagatttcgatgttgaaagatttgtaaaggtactgtattttagtgggaagaagaatattattcaacaatctaacaaaattcaaaatcaagtatacatactacctgccactaaatgttgatttttttagagaagggtatttatacccagcctctaaatccaaccggatatatgcagcctttttaatttagaaacttagccctcaaataatccaatctaaaatttgcttctacgaaaatttgaactcagcatcttgaagtgctacttagttcactgcaaccactagattacgtgccctttcacaccaaatgttttgatatataacatctaaggatcttcctttttgcaaacaactctcatcagctttcaagaccatactaattcaaagaaaaacaattaaaattccagctgatatagctatactcatggaacactaaaaactctttaattagttcaacctaattaattcaccagacgaagttagtgtaatccgaggaatagaaggtgttctatgaaattaagaagcatatctaggcattggcatccttgtatcttgctaatctaaccccatgttaatgctagtagcactttgatttgttgtccactgcacacagggggtgctagttgattaattaggtcaagcgtagtttatttcatcgtttgtttgatggcttatatatcaaccgcaacaaaatttaaattttaaaaattatttttaagttgatttaagttttttttactatagtttattttccagcgttgtctttaaattgttaattaggaaagttataaagagttttccctcaaaataatagttataaagagttttctcttaaaaaatagttataaatagttttatctataaactattttttattgcctagtcatagatcgagcaaacgatgcatgagaggtttagccaggtcaagtgtacatatgtaaatttaggaaagcatgtatatgcccgtatatacactccgctaacatatggcattgagcttaatgagcttatcagctcgccaggtcagctccgatcctctgctggccaaattgccaatatacgatctatacgatcgatcgatcagggagagtgaagtgagccgggggagcaacaagggagagagcatatggtggtaaaaggacagtgacgcgacagcgacgacgctgatcatttattcctcagtgtaaatacccaccacaaagcttcacaggtcgtcttccacatccttctctccgacgacgctacctagctaagctgctgctctgtagctggcaggctagggtttacgctagctgatcggagctaccaccaacgccggtggttggtagctcggcggcggcgggatcttcttcttgctcgggttaattggcgagctatatatatatctagctcatcggcgggaaggggaaatctcggctgacttgaagggatcggaggaggccatatatatgcatggctgagttcttgtaagtgtttctctctctgaatacatctggagccggtttgggtgtttgatttgttaattcttggcgattattctatggatttggggatcacaaaattatgtgtgtgtgtgccttttgagagtttttaatctccccagctttccgtggtccttgattaggattttatgctgtggatctgagcccagatttgttaattcttcttcaattattttctgtgagactgtacaattccctcttggatttctttcgtacctgagttccatttctttttccatggaaggtttcttctctgaacctgcagtactgggtcgccaaccaaataatctttgtttcaattgcaccggatcgcctctctctgatccttttgcttccggaacgacctggttgatcgatctgtcaatttaattatccattttgcccactgctcttcatttttttcctttttttttcctgaatatagtgttcagttctaggaatccccaactgagtaaattaatcctctgtcaagcctccaaaaaatttcacctttttcgctcgccacacaaatttcctccctcgatcgattggtttcaaagagcacaatttaaaagctaatgactgctacagttaaagactgggtgcatgctgcaggccctgcaggattagctagctagcaaaagctattcgtctcggcataaaggctagcactcaatacaaaccccccgacccagccttctcctgttcctcattcccatgggcaaatagtgatcctttgtacgatccaattcatagctcttcttcccaccggcgagacgaatcatgcatggctgctcgattcaatcatggaatcatatcattcccacacatagtgccactgctgatggctcgcatgcagctcacccagctagagctgcaagcgcagcagggaagagccggtctttcgatctcgatctcgctactagctactacctaggtagatcgattgataggagtagagatatagctagctgttgctcgcaaatacgcagcgaataaagctggctcgctttccccattccccaatggaacagtgacacaagcagagagagagagagagagagagagagagataatccgtcgagatcgggtggtagacccttccgtgcacaggagagatttatttaccccgggttaattactagtagtgctggttgattatggcgcgaaatttatgctaatcagtctgcatgcgatgttactcctaattaattaggtgttgttgtgtgtgtaatgattgggtagctagctagctaggtggatcgaggactgacgatgggaggatgagctcgaggaggcgttgataaggatgatactaggaagcaaccaagcggccgccgccgcggctgcggcagctgcggcggaggaggaggcggcggagctagcgaggaagcacacggcggcggtggcgacgtcgcggcaatggtcggcgcagacggagtcgcggatcgtgcgcgtgtcgcgggtgttcggcggcaaggaccggcacagcaaggtgaagacggtgaaggggctgcgcgaccggcgggtgcggctgtcggtgccgacggcgatccagctgtacgacctgcaggaccggctggggctcaaccagcccagcaaggtggtggactggctgctcaacgcggcgcgccacgagatcgacaagctgccgccgctgcagttcccgccgcaggaccacctctgcatgggacaccaccaccacctgccgtcggccatgccgctgatgcaccaccacggccaccaccaccacgccgacgacgataagtaccacgtcgcggcggcggcggccgcgctggccgcggagaaggaggcggcggcggccggcggcggaggaggaggagggggagacgacgtcgacggcgggggcggcggcggagcggcgcacatagtggggaggttccccgccggtggctaccaccggttcatggggctgaacaacccgctggggatggtcaacagcgccgccggcgccgccatgccgttccactacgccggtgagtcatggaataatggcagcgtgcaagacagcggcgccggctcgccgcaggtggccgccgccgcggctcaccacacctcgccgttcccttcactgctttccttggctccagggccgcatcatcagctggtgttctactcctccgaggccgagcagttcacagtagacaaccttggctcgcagggcttgtccctgagctcggcgagagctttccatgatcagacaggaagctaagcaagctcgatctacacagtacacacactggaacaacactcttcgatcgtcgacaaggtaaggatcgatgagctctaccaaaagaacaaatctaagctagctagtgcaagtgtgtgcattgctttgatctatgtattaatttctttcaagggaacaattaagcttgtgggttaagatttaagaaggaagatactgccagctagctggctgctaatttcttttgctctgaaactagggcaagaaatatgcagggctttgctgcatatgcctgtgtgcaatacggatttgttacttctttttatatgcaaagaagtaattgatgtattggcttgtgtaataattaataagttctgaattttgaacctttcagttctgcctagccttaattttctttattttttcaaaagggaaacttctttgtgtgtgtattcagttttctgacgccgttgctgcatcccaagcttcctggctgtacacaaaacattgggcaatgaatatctggttgacacactgcatactgaggaagtatgtccctttttccagttcattctgcgaaatataaatacactccctgcaaaatactaatttccttccaggtatatgtagactgaaccctgaagtatacattatttatattctaaatgtgaaacaaagaaacttacagtggatatttcttaatgttggaaaaaaaatgctggtttcttatgtgaaggaagcatatatatacacatgattatttttcttaactgtcccaataaattaaaatggtatttttaaattatttcagaaacatggaaatagtatagtgtgctttgatgtttaaccctatgcttgaatgtttttcgaggaattaaaacttataaagggctacaactcacacaaagtaaacaatttttcacctcatgcatatatgagcttgggtaatagtcaatccatgtgattccacaaggctattaattgcagtcataatatacataatgcaatgaaatatctatatatgggttaatggatatgtatgaataatacatacatgcgtcgtcattgtattaatttgagatctctaccagtacaattaatcttacgtgtacacatcttgttattttgaacgacacatgaggtcacatatatatagctagatatataccgtgccaaagtaacaagataaggttctatctgcaggttaatgtttattaacacccaaacatctttacaactcctacctagctaagtttaactagagaaggaacctctttacaactcttaccctagctagttcagtttagagtttaggccgcttagggacatggtccacatgaatatatagagttatgtaaaatagtaggcattcttccatgaaacacattgatagtacatgcctacaattatgaaaacggcaagcagctcactgaagcatgataggaagataaacataatctagctaagcatcatcttattgttgtacgtacgtgcaagtgtagcattatattgcctagtcacaaataaattaagaacttaatttagaagctagtagcaaagtaaattcgaagaggatgctgaagtacccaggaaaaagtatattgaggctaggaaaggatcagcacaacgttgcaattaattgtgaaattgtaaaaatgcagcaaaatgattttcgatccatttattaattaggtcaaagatacgtataaccgtaccaactgatcaaattgatgatcagattgacatgtgaaaaaggaggatcaataaattatactcctagtatatgtattggggcatatatgttttcacttgattgataagccggctaatcctatatagcttaagaaatcatcaattactatgttttctcatacgtattattgtcaaattaatatatatgtcaattaagttcccaaattaactttctcagtcaaattgatctgctcctcactaattaatttgccaatttgttatgaaaaaaatgcatatgctttacacttttcatttagtatataacatgattaaaggcagattttaccgaaataataaattaaactaggtacaggaaatcatatgactgacttgagttgatataaattcaaataaggaaatattggtcatgtttatttcttaaaatacggacatgtttaagcaaagattgtgcttatcacatggaagatggaacttccttcaagaaaaaaataattaaacttaattaatggtagagctgaaaatgcttttgaagttttatgcggcttgatcgatcccatagaaaaaaaagaaaacaatatgattgtatatatatatataccattctttcattactctatatactatatctggtttcaaataattgtcactttgagtcttcgatcatcaataaatttaatttaatagttagattatgatgtacaaaagtttcatgaatatatttaggatgcaacacactttgttcatatggaatacttctaagcatttaaaaattttcttaacaaaagatgaatggtcaaagtttgaaaatgaatacaatgacaagtatttgaatactcatgaagtatatactccctccgtctcaaaataagcgcaaccataaattttcgcgtacaattttgatcgtccgtcttatttgaaatttacgattagtatttttattgatattatattataaaacatgaacaatactttatacgtgacttatgtttttagtttttttttcaaaaaaattttaaataagacggacgattaaagttgggcacggaaactcatgattgcgcttattttgggacggaaggagtatatgggaaatatatacattcttcatttcatatgaatagatatgtgcacttctggaaagtcaaaatgacctcagatccacaccagttctacaaatataaatatttatatatagtagaaaagatgcccgtgcgttgcaacaggggaaggttttttcatcttattattgttatacagtttagttaaggtaaaattactgtgcggattcgcttggatatatatattttttagaaaatcatgagctacagttaggatcgtctcaagttagcatgtgagtttttttaatgagatttcttatacgacgaattctgtatttccaaaagcgaacgaatttaaaaactgactcaaatacggatatgtatttttaaaaggaaacttaaaaaccaactcatacacagatgacgtaccaaaatactggtaaaaacattttaaatttttataatagtagagaagagttatacgtacttgtttttcggacaatccggttttcagagccagctagtacaaagtatttcagaagtcaagacctgtcctcagatgactacactcattatatattttgttcgtgcatgcagaatgcatttaattctagacgattgttggcgaaagaaagacaaactgagcagctcaaacactgttcacaccatacactcctacctgttgggactagctagctagttagatggtcacagctcacaaaacataatggtaaagtagcgatgtaaagagagcagtattaccgaccagctcgctagcacattcaactcgaccctgtactgatctgtcctctatctctctctctctggtagatctctgacccgtaaacatcatcctgcgtcacccccaccagcaacgggatgcccaaagaaaacaacaaaataagacacggtggacacactttgttggcgcagacccaccaactaacgcacagccagctagctgctagcttagcacaaacctaattaagctagaggctagtatagacaacatgcatgcatcaacataatatgcatatcacttttgtaaatggtaacatgcctagatagctagcttacctagctagctaaaagtaccaatcgtgtaaaaggaagatcatcagcagaaaggcatgcacagttacacgcaagaaattatctgttaatctaatcacgggtactgtatatgcatgacaattactacacaaccacctaacattcttaactaagaattatccgcagcagcagaagcagtggtaatatcctactccctccgtgtttaccattcgtcttattcaaaaaatttaagtaattattttttttttcatatcatttgatttattgttaaatatactttcatgtttacatatagttttgcatatttcacaattttttttgataagacgaacagtcaaacatgtgctaaaaagttaacggtgtcaaacattttgaaacggagggagtaattaactagtactatggatattccacaacgatctggagtagttgttttagacatatataggctgctccagtctatatagggcccatttggaatgtaatgtattatatatacaagaatttggatgcatgtcatgcatggctagtttaatcatacaagaattaaacatgaagaatcgtttaggcactgaaatttgcagaaattcttaaagaaaaagtctgcacaatttatcttagacacacacacacacacacagagatcagaaagatcagaatgctctgaaacatctcaaaggaaatgaaaatatgaggtctcagcatatgtttgaagtcatccaaaatatggaggaaggaaagggattccatggtaattttcaatctaaaaaaatccgataattcaaaaaggttctacaggaaatattctatatagtttaagcctatgaaaaaaactacacatgcatctcttaacaagtcctaagttttagaaatataatgttcctcattgttggattactactgtgtaataatgtaaagttttctaagaaaagcttctacacaccattcattaaattgagtgggtaatacacaaagacctagctaaccacaaaatttaacagtatggtgtacgttaagaagcaatggcaaccaacagaccacaaataaattaaaggagaagagaacaaaccgaacaagtgaacaacagctataagatctcgaggcacacatcaaagatctccatactgaccatatatatgtagccaaaaatggaggcaatgaacaactcccactgtactccaaattaacaccggagcagatcaacattctcgacaactttggaggattgattggtacgaccagtaaattatggtgaagacaccctctcatgctttaagataatcggtcccatatttgccaagcaaccttggtgaaaatcataattaagacgtactatcaactcgcactgaagttcttctttgaaaattctgtcttacatgttgagccaccaatatccatgaatggagaatcaccgtgcggcataagaaaatcattcctgagacaagaaagctagccactgagatactagaatacattgacaatgtgtatgtattagattaatattattcaagcaaacttaattaacccaacatgacagttattcttcttgttgtcagtcaccaccaatatttgaccgatcactaattggtaattaagtgagattattaattagcagaccaaacagcagctaagacctgcgtatcagcggttcattctgcgtgccatcatcctacccatttgaccaagaggaaagcgagcactgcgtacgtgggggtcactatctcatcttgcgtgccggatcgatcgattgagagcaatatatcagggctaggtagatctttttccctccacgtacgcacctttgccaaagctgaacccaaatcccaaagcgacctttcttttgtgcactgatctaacaagctatagctactcgatcatctgcacgtatatgtgcttctctgcttatttggggaaaaaagacgctgttcccctgccttagcagcggctactactagctagtagagccgaaaacatttcctgacaaaaacccttccaaacaactcctgctgtctaccgtggacaagaccctgcagggtcaaagacaagctaagagtaattaggactttgtttcaaaaagaaagccagggttttgaagatactacttcgtaattactaggacttgagccttaggagttaggctttagctccataatcctatttacatgctataaaaaatactatacaataattcaaaacataaattaagaagtagctaccaagggcacattagctctgctctaggttcagctctacacccctgaataaaacatgaatatctgcaaagacattgcccagctgagaaaagacagccttttggttgatttgtatatgtacacatgtatatacagaggcatatatacacacacacacaaccatgtcttatctttgaatggcatacctaaaacaaaaggacaagcatcttaagtttgcaaaaattttgtctccgtgaccaccaatcatctagcctagcagttccccaagaaaaaaagaaaaatcaagctgctatagctagcaagcagcaagcgaagggaagtgaccagtgagtggggttgatgagtagtaaaagaccagcagtggggctggctctgtggctggcctggcctggccggggggctggtctttggaggcgagctgagctaggccccctacggttaaagcgctctctctctctctctctctctctctctctctctctctctctctctctctctctctctctctctctctctctgcgtgcactgtgtctgcatagccctgtagctagggtttgcatgcatgcagcaagcagttagctaagcagatgtacccttcgtatcttttgccacggagagacatggaccaatatataccctttcacatgaatggtcccctgaggctaccacgattcctccccacatttttcctatcaaactcatcttcctttcatctttagtttcatccgtttgttaactttgagtatagctaactagcttagcaacaaaccggtaattagctagactagctgttctcatgctggaaaagtaacctagcctacgcatctagtaattatgtaattatatgcatgcacacacatgaaccgattttgatcaacaatgtagccaactagctagagcaatagattgcacgctggctatccttaggtgtgaatatatggtgtatggcagttaaggttgattattattaagggagatgatgatgaactgtgtagtgtgggctgtggcaaatggatgtgtcttgcatggtacgtgacagacgagcaaattggacacacgagcaatgatactctcgtaagattatgctttggagagcagtataggggagtggcctaccaaatgcatagcctgtaccatgcattatcctcatttcgttgatcactctttcgtttatctcttctgtagcatgactaattctatagtaggtacgtgcgctagccgctaggtacagatcgaaccgtgagtttcttaactagaaatggggagaaaagaaaatcagctaccttaactagctgctaccaacctaaattctgtaagcagatgcatgcatttcattaattaacagaatgcgatcgatgcatgcaaagggcggttgctcctcgcggtattttagtcgtcaaactgattctccccatgatctattgcatattttgagctatttttcaaaaaaaaaatcacaaaagcttaattaagtggaacacaaaaggcgaacatattgcaactgcgttaattcgttttttattaagaaggaaaaatcacttgaatgtcttctgaaggccgtcgtacgtccatatcgcgaaaaatcagtgtgttaaccgacggtcctgacgaattctacctgtgaaggaaaaaaaacggttccaatataatgtagtgattgcacgtgtacgtataactactgcagcatacagcagacccattgcatatgtacaattaacctggcgctacagtatgcacgggtattacttcctccatcccacaatataaacatttttagagttaaacatggttattaagaaaagtaggtacaattgaatagaggagagttgtaattcgataagtggaggtatgtggaaaatttgaatggtggagggttgtgattggttgagaagacaatgttagtgtaaaaattgttatatgttgggacaaattttagaggctataagttattatattttgggacggagggagtacctgacggaggattaattggaccttgttcctttgcagctgacgcatgtgtgtacaatcaacctgtcgccggcccttaagaggctggtacatctgtgtttgcagtggacttcgagctgggcctgcagcctgatgggccgacttataggctcatcaagagaacatgcatcgatggttccatccatgccaggcgaggcgactggcaaatggtaatactgatgcgtgacacagccggccgcacagcacaggtgtaccgcgtgtagcatcgcattatcattgcaggatagagcagtagtggcgagctaaaccctctccaacgcagtcggaccataataaaccaactgtgccatctgcttggagccttcgatcccgacctcccgttccctggcaacttctgagcttaattactacagtaccatctgtccagctaattatagcacccgcttgcacgcgagcagagacatttctgcatcacacatgttagtatgctattgacaaattgtgatgaccagccatgaaaatgcccttgcaatccaccacagggataaatgttattatgttaaggatggtttcctgccaatcagtcaacaatatctagtacgatgctaccgagatattctccaggaagtttttaagcattcctacatcagagacttggacgagtcgcatggtccatgagtaactcgtcaaatgacatgttgcaactatcagcccaccagatggagtacatgatcagatccaacccttcctgattcgagcccatgcaagagcagctattagggcaccacctaaatgagaagtacctgatacctgaccttgcctctaaaaaataaacagatatcagcctctgtacaactttttttggggaaaaggaagtatatatataaaaagcataaattagataaatgtaatcatcaagaagaaagatataaaacatagaatttcaactagccaggaaaggctagtacattctagaaacagaaacatcacatggaaaaatcagtaaaatattcctagccaccctaaatgtgaatatcaactttttaaaaaatatcaggttaatttaagaccagagctactgcaggcaggaacttcacagagtaagcgattcacaaaaatcccaaaattgaaataaaaatgaaagtagcagtgtccaacagctatactgtaatgcatctgctgaaccagcacactaccacagtcaaaactcatggaaaagcaacagggtagcaccaaaaaaccaaaaggagcacttattacattagcaaatccacatgaaaagaagtcacattttaagttactgcataccttcaccctcagcaaatcagcaccgatcaaaatagccccctgaaaagtcaaagagtttttgttttacatcatagcaaccatgcttaacagaaagttttgaagaaaaaaagcttctcaccataattgcagctggaataggaatgaagaagtaaagatagactagtttctttggatacaaaaagatgtcaagaaggataattgcattagcagcagcacttgcaccctgattcacatgaatataataggttatgttttgggtgtaacaagtaataacttagtactagtacaggtagagatggcaacgggtaatccccgctggggaatacaacccatccctatccctgcgggccacaaatttccccaccctcgtaaactgcaatcaggaacaattttcccatcccaccccacgcggggaattaatcctcatggagggcccgtttaaaacaacatatacatctcaaatcgaaatgtaattaacaaataatatccacactttatataaatatactagcatatatccactaatccacgtgacaacaacacaagatcttcatccactaattatggctcgattggacctttaggcctacataatttgcaatggacttggatccctatcccgatttttaatcgggtatcctcacgaaggacagggatgggcaacagaagatcatccccgcccatgctagacccaagggggcataagtttttccacatttaatttcccgtggagaatcagttgcaaccatccccgtcccctgtggaagaattccctgtgggggaacagggaacgaggctccactgacatctctgagtacagtagcaaataggatatccctttgttggctatatatacattaaattaaactatcatagcgattcaaatttgcagtactgctttttaattaattatttgggtgtataagatgaacacataataggtaggtgggaaaaaatcgctgccatcagactactgatgtgattatgtcataataatgcttgttttctgaataccagcgcgaaataaagtgaactgcaagaacaagaaatcaataaatcacatacaagcgcaggagttcttgaattgtcccatccgccataaaactgcaaaataaatattacatattagattagggagattattgcaaaatcataaatattgaacccttttcatgcaggatatgtcccacacgagtgccaataccaagaggctggttggcatctagtagctagcagcgaactaccaggtactagcattttcacaggttagcttttcttaactagaaatcacgttgacataggattttgtttcagaattggatgacataggacatcctggtccaggattagaaatcctggttccctgatgcataagaattcacatcatatccaggcttacctgtcttcgtggagctaggaaggctttctctagcaagaagaatgcagatccagcaagtgctcctgctacgtacaacttcagtagaaaagcaggaccaaacatgttggaaatctgattcacaaaggaaaaaaaaagcaattcagcacatgcaatataagtaataaatggccaatagaaaatcagagtacaatatatatactagtcccttcatttggagaacgaatcttaactacactaaacatgataaatagaaatactaaaattagaagggaatagttatatgctattgattttgtttttataaaatggataaaccgtatctagtacattcaaaccatggtagacattgaattcccatggcaaatcattgcaggatctctctacctagctggctatttcatcagacctgaaaaacagcctcacatcttctcctgcatggtgccttcatcagtcatcaatacgtacaactctgattggctcggttgaataactagcacaggaaatgtcaataacctctctgtgtgtctctggactgatggaggggggcttggcaatgaagtattataactcttcattacatgtgacctttgcaagaaactaatgaaacaaagaattgttttacaaacatcaagccaattttaattttttttactagagaaaaaatataatcaaaatttgattggtcaaattcaataatgtcaaaataaagaaaaattgctagatcaaattcaatactccactaccaaatatattactctttcttaattttacacggtcaagttcacccagcatgaatcatgccaacaagttgatggtaattcagacttgcttgaaatattcaacaaaagatgctggaattcagatgagcatatattatagcaacaagatcatgtcttggatcaagtgttagataatgtttttagtctacactcaacttatgattctttgactgatttgataattcaaaacagctataattcaggtgtttcagaaagcaaactagtaatagtaatgatttccactatattgacaagtcaccatatccattcctttgtttctatttaggatttgagaatgcataaagttgcacataggtgcatagaaggacaaactaatcctttttacttgtcgtttaggacatcaacatagtcaccaatgcacttgtttgatcattgttttttttaatcatatatttataaagattatcgaagataactacatgaaaatcatgaaaatctgctgatgtcatttgcacacattaaatcttaatattttgatattaaaatgttatctatttgataatggagggagtacagacttctgcattgtaataacaagagagaatggtgagcagctgaacatcttacacttgatccgaagaagtagagaccgatcatattgctgatgaggtgaccactctctgcgtggctgaaggcattcgtgagcaacgtgtgtaacctcccgcttttgaagttatcaagagaaatctgctcatcaaacaataatcaagccacacttaatcaaccacttctgaaacaaaagcagaagctcttcgactgatcactaaccataaaatgcctcctcatgaagctaggatcagccaggtgccatagcatgaacacgcccacattggcgcccacgagcatcaacactgccccatcggcggacggcaaccacttcgtccttcattgaacatcaaaaccaacccaaaaaaaaatcactaaaccaccacgaaaatcccccatttcaaaccatacgaaccgaaacctcaccaggacacgccgctaaggaacatggacgaggaggggaaccaccccgaggacctgcgccgctgcagcgagaagagctcgagcgagcccgcctcgcgcgcggccatcagccaccgcgccgcggcggcccgggcggctgccgccgccgccgcggccgccgccgcgctcaccggcaggagcgagccagtgctgcgccatagggggaggcgggagggcgaggcggccgcgggactggatggggcgtggaggaatcggtggggggggtttggttggggtttaggtctcggggcggcgcggaggcgtagggcttgctgcgcgaggagcgactggaactgcaggaacctcctccccgtcgccattcccgcctagctccccgccgcctactcttcgctccgccgccgtctcctccgcctcgggctttcgcggcggcgcggccggtggctttgcgctctccggttgatcagctccaatttctcaacttccggcttcgggaaggacacggaagggggaatcgctgggcctactgcttgggccgcggcccatcaaacgtccacgaccgctttccccgcacgtaggccgttgatttctcgatcgaacggctgctgctgtcgcgattgcgtagccgacgcagcgagaaggttttaagggtaggcggcgccgcggcggaggggggctcagctcgaggaggacgacggaaaccttcccggcggcgcgcgagtctcgcggggggaggagagcgatgtcgaagcggcagggtcccccgaagcatcagaaccgctacgcgtggaagcccaacctcgggcagaagatcaacgagaccgtgagtcctcgagccgcctccctctccttctttatcctctttttttcaaggcctgagtctcacggctggaatcctcgccgctgcaggagcccggcggcaggttccgtcctttgtcggagatcaccggcgtctgccagcgctgcaaggaccaaatcgactggaagagaaggtcgggagtccccttctgtagtcgtcgttaatcttagctcgtaattttagcttcttggcctctcggtccgatctgtttgtctcttcttggcagatacgggaagtacaagcctatcgttgagccggcaaaatggtaccttctcttgccctttttcgtaattatcgcactcactcgattgatggaactatggaggagtgggcagtgatggatgctgatagttctcgtttggtttttgcagtcagaagtgtgggaaacggaacgtccgacaggcgtatcacaacgtctgcacgggtgaatttcggctactccaccatgtcgtcttttgctatgatggtgttgatgttgttactgatttctctgttgcatatgctcaatgcagcttgctccaaggaccttgggatttgcgcgaagtgctgcacttgtgttaaagcgcttgtcggaaggtgatccctgcttgtttactatgttgtggtactagtattagcataaccaaatgatatcctaactttgaaacttaggtggctaacaattttctaccattttctagggatcttagtgaacaggagagtgagcgcaaggaactagaggaggtttggttgtgctatatttgaatggagattgttgtgaacgttttcttttgtgctgactattaaattattttgtaggccataagaggtgctagggagagggagaggcgcacacttcttcgccttgtgagtacttactatggcatgtttttaatgatatatctttatctgattaggtatagcgaatgtttgtcttcaagggatgcctaatcacaatatatgtttcccatgatatctgaaggcagcactgcaagaaattagaacaaagattttgtcataattgtattgtttgatttatcatttgaaaataatccccagttcaccacagtatttcgcatatacccttgaatttttcccttttatgtgtttctttggatgcatcgttattttggacaacttaaattatggagatctctaaattatgtgtattctagtattaaggtgccactgcctttgtttcgatgtccaagttgaatgaattaatattatgcaccttctcttcttgtgctattcatggtttttgttgttccaatatgtagcattaaatgtgaatagaactttgattgttttaaattcttgtacacaattgtttgctctggcatcagtggttcgtttaactgtaaggattctttacaggtctttatctggagttctattatattgctatacattaaatctgagcatgtgaatataaatggctggtccatgttctaaagtttcacctgtcttgaaacattttgacctgtaattactaattagtagtatcagttaagattgttttataccccgctccctgtagaatgtaaatatgatctgttaatttagcttttcaggtatggaaaaagaaaaacatagcatgcttgcttagaatggttgcaatatcaagatccatagtacatgagatgtactattattattattcagctttggaacatcaattcttaaacaaactggttgccaaacttttgacttgaaattgtcgagatgaaagtgcattaagattccaaattatcatggtaccttattggaactgaagccttagcttattattctaattttcattttggtaaccaaatggaaatcatttttttagaattgctggtccatttagttattcacgtgaactagtaattccatgcatatttattaacatcaacattttgttgcagatgaacaaaggtggcggggagagcggaccgtcggttccaaagattgctgacagaagtcgtgaaggggacattttccctgctgcatcccttgacgaatatgctgaacaagctagacagcaagatgattcagatgaagaagaggccagggattttgtagaagattaattttagaactcagaaaccttttcttttgcaaaaggatttatatagccttatgtggtgatttacattacatggtgggtaatcccacccactgcggaaaacaagtgtattagttttggcagatatatttccgtctatcagatgtttatcagtgtgtgctcccattccgtctgtgcttgttcaaactgaagaattggaaagtagcatatattgcggtttttccggtttacatgtcttttccccataatgcagcttatcggtgtgtccggaactccggatcagcttttttttattattattccgaggaaaagctcttctattattctcttttttaccaacttattgcgtgcatgatgcccttgaagatgttctctgttctgttcttccctccatgtcaagcgaggttgttttcttcatgtttacggttttatttagcgggctgccaaatttttcgtatacattgaaacgttaaaaagtatactattgttactaaggctgtgtttagttcacgctgaagtttggaagtttggttgaaattggtacaatgtgatagaaaagttgtgtgtgtatgaaaggttgatgtgatggaaggttgaaagtttggaaaaaaaaactttggaactaaacagggcctaagagcacccgctatggtaaagtagggtgctctctataaaacatgtacatctcagcaatagactagattaatagtaaatcacctcaatagtatgtctacataggtatctatagctctctcatgcattgcctcgtttttctctatagactatctctaatctagtagatagctttgctctctctcttcatttaatatcttccaagtaggaaaatatgctgacattgatctcttatagatagcttatagataaccattgtgggtgccctaagagcatgtccaatagcaggctataagccagctgcaaacatattttaaggagataaataaagagaaagaagagcagcaagctacagatttgtattttaaggagataaataaggagagagaagagcagcgagctacagatttgtagctagctgtagcacggactctaagacgcaatgtgtgtttgacaggtgggaccaggtattaatagtgtagtatgtaactattgtatggatgagctattagattggttatagatgaattgtagctactacttagctatactattaagcttgctctaacaggggcttccttcttgtagctcgggttcattaacccaaaaatcttgcccacgtttgctactgtcatgtcagagcatggccaggacatcaaaaccttccataacaaaacacgcaaaaacagtaaacaagtgtctcggcaattcggcatcgtccgccgcccggtgccgttgtgtgcattcgtctcccatgatcccatatcccgtcggcgtcgagacatggaccagactccctccgccagtgccgcacctgttcctcctccccctctttcaaacaaaagaaaacaaacgagatctcatccgaacagtagaacccaccacgtaacgttactctcatctcgtgccaaatcaaagcaaggcaggcaagcaagaggccgttcgagctgcggggacgatatgcaacggccggcccagtcgagatcgggagggccggagggggagtggtgcggccggcgggtgccctgcacgtgagcgacgcagccgcctgcgcccgtcacgcgcgctcccgcacgttcccgacgttgtgccctctgcctgcggccgcgtgtctcgccaaatgggccccgacaaatccaagccgctgatacacaccaatcgctttccccgaaatgccctccccaaagttggaaccctttttggttgccggcacactgcccgcaccaccggtggttggcacgggttggatatggaccagctgtgactattccggcgatcgagtggtgttcttgattataaaccctttgtgtttcaagaaccttttctttttagtttataaacccttagtacatgactgaagttttatgatgctaagcgatatttgttaaaaataaatgatgctaagcgatatgactccactagtatacgagtgttgatttaatgttaaatattatagttaacacttaagatcttaacaagaaagaaagggattgtttagtaggcggacaacggcggctatggctatgccgtcgttgtgtgcgtgcatggcactgttgatgtcgagtatagtgcagtcacaaatctagcagccgaacaaacaaaaatgataaatatgcatccgtgcattatgacagaatattttaaaaaattataacacatctaaaaacctaaaactatttaattaccaaactattcacgtgatgagatgaaaagtgctgagcagtcaactatatcgataatagactataagttttgcatggattattgccccataagcagcgatggcccatcaccgtccaaaaagaagtttttaaagtagtgatataggtttctagttagagaaaacaacaaaggtaatggtcacatcgttaaagatttcataacgatatctttattttttcggcaatagatataacggttacaaagtcatttaataaacattttagcggtaacatggttcacgtcatcttattttgcacttcaatttagcgcacaaataatacacgtggatcaaattacttggcaaccaggggcagcataaacaaagctgactccagagtgagggcattttggtaaactccggacagaaaggcaggcggagtcatccacagtccgcaccattcccccggcgctgcaagcaaaaacatgcccaaaagagcacacaaccttggctggaggcggcggcaggccgaatctccttatcagtccgggataaccccaagctctctctccccctccatccctttccccactcaccagtagccaccaccacatctcgcaaggccaaaagccctagccaccgtagtagtagctagtagctatagcaaggtagagagagcgctctagatctctctctcgcggggcgctgggcagatcgacctggcgatggcgaccaaggggaataagctcggggaggtaatgtgggagcaccggctgcaggcggcggccgtggtggcgctggtggcggccacggtggtgtcgatctccgccatcgggcccaggctcggcgccgtggtctccttcttctggccgctgctcgtctccacggggttcttcctcgtggccgtggccgtcctgctccggatctcgccgcccccctccagcaccatcgacgagtccggcaaggagctcatcgacttcgtcgccgggtgccgcccggagcaccaccccccggaggcggcggaggccgccgtggacgtgcctccggagccggagatctagaaaatcgagggtggcgggcgtggcgcgggcggccggcggaatcagcggcgcctcgtcgccgggcggcggtggggttgtgtggggtaatcgccagcatgggcccacctggaagtgcgtgccacccccggtgtacggtgcggccgtgggctctgtgttagcgtaggattccgcctccgttgtggtccggggtgtacaataccattctcaataaaaacatggcataaattcgtcctagtactactcggtatcgacttccattatgatcgcgtcttgctttgagttgatgcaacgcaggttcgctgtaacgccatgaagatgaaggcgagagtcttaagcagttaagctatacttacgctcgaagaatatgcgagtctgccaatcctcctcgagcctcaaaattctcctcttcatcccgctttagaaagctagattcactcatcgagagctgaaagcaaaagaaatggtgcaattgtaaatctcatttcgcatcattgatgttccgtgagaaaagctataaagacggaaaagagaaatggattgatagtagcgtggtagcaggatgccctttcggcgtaatcggagaccgacactctttcggtgttaaggagttgctaaaccggtcactcagccgtccagttttgctcgtacgcgacgccggttcggacggtcacggacgcgcgtttctcccatcgttgtcgccgtagtaggaccccgtcttactaattctcatctgttatcgagcggacgcaggcctgatggtcactgtcacgaggctgaacttgatacggtttttataaaggaagacgaggccgtcatgctatattctctggtgcataggtcaatgcgtctgacgtggccaccgcgtggtctggtcgggtgcttccatggtgctgacgtaatggtctctttgagctttggattccatggtgacatttcttggcacaaatgaatttagttggggcatttcttttcttgaatatgtttttttttcttgaacaggttgaagcaggttttactagctacgtagttatatgctaatgagccaattctattgattaactgacatcgagaggacgataggagaagaaggtgaccggacaccgaaaaatgcacaaacatttttgtctcgaatggatttgaatatggtcatgatggatgtgaagttctgtagttagtaaatactccatctgttctaaaaaaatgaatctagaactgtccagattcatcatatcctagtacgatatttgatttttcttttggaacagaagaagtatgtattttccaataacttgaaagacacacatgcacacacgtcatcacgcacgcacatcacagtcacacatcctcgcaaacacgctaacacacgctcaaacagaagaggctaacggcgtaactgcgacatcaataataaattctaattgataaagctacaacttgtgcacaatatctatggacgttaggatttaaaaccttagcagacaagattatgcacctatgacatcactaacacatcatcgatggttcctagttagaaaactatcaataacatagcaaacatatttttgacaatgttatcctactaaattttggtgttacttatggtgcttcacagctagccaaatgctacctaaatttccaagaccaccaaatgtattttacacagtgatatcttacaaaaaatgataattttgaaaatgtccaccactaaatatagtactgcaattattaaatgttctgaaccagatttaccgaaacacgtactacttgttgtagcagtgaggactaggtgtcatacctcctattcgaccaagacacgacttcaggccttgatgggcatattcctgagtttcaaagcaggtgacaaaaaaagagttcaagttgctatggacggaaacatgttaattgggcaaatagtattcaagcttgttatagaaaggcaagcggtgcgtggaggatggagaagaagcttggcggctacgttacccagcaagaatattctcttacaagttccctagggtttctagtcctttggattatccatgtaacttcgcatgtaactaccatggctatataagccgatctaattatatagcaacacgatttatactttactgaaatagcgatcatgagtgtcatttgactcatatcaagctcatctcgttacaaggataggcgagggaaacacttcctcatctatccccattatgttcatgacgttgggtcacaacttagggaagactacgcgtcggatgtatggagaattaaaaaaaatcggacataccccagtacctaccattgttgcatgcaccgaacgaatctgccctatcgatttcatcggtgcttattcctacatgattactctcttcaccactctctctcctctatgaccactttatcaacaacctataaacaatttttcctcttaaattctttatctgatctaccatctgattacgtcgttatacttatagcaattaaatctttacaataagatgtcacatgaatatattttgattatatatatatatatatatatatatatatatatgttccaactagtgaaatttgatgtttcatgcgagggaagcaaatgtttcacatgaaattcgagtttgttgcagattttaagttttctttgttgcgatatttatttaattttaatgttgcacatggtgttgtttggatggtttaataactattttcttatgtttcacttattcatttgaaatgttgcacatggtattcttgggatatttcaacaaatgttttgtaatgtttcaacaattataagtcgatgtcatgtataatgtaaaaatattttagttaggatttaacaatattattttccttatttatttgttcttctacatgtgtaggaacatgtatacgtaaatatctagatcgttcaattctctcggccaaatagtgtcgatacgtgcaacacagtaaaatgcttgttgaaacattttgctcatatgcatgaaacatcaaatataaacaattgaaacatatacatactttttattagaatatagtcaaacgagatgtcattgtaaagatttaatcataagaaacataattgtataataaaattatagattagataaattgtttagaagaaaaatcattttaaacaaggaggtgggagagataaaaagctaatagttggttacatcatatccattgcatgctgcagctcatcacatcacatccttccatgctttgttgcatgctgccattatctccaccataaataatccattttcgtgctacgttttgcttgctccgacggaatgttcgattttttgtcgggcgtcggatgtctgataagaagcattttcgtcacaactcacaacacaacctaaaaaaaatagcagtccaaaagtgtaccataatttagaaaggaataagtccattttgcctccctcatctcttgcgcttgcgtgaataacatccctcaaccggaaaaccgggtataatgcctccttcttctctgaaaaccagagcaaatcacctccctcggcggtttcggaggtggttttgtcctacgtggcgggttgacttccatatggcatcgacgtggcgcttacgtggcactaaaataaaaacaaatgtaaataggacccacatgttagtgagtaaaacaataaaaataaaatattgggcccacatgtcagttacctttccccttcctctttatcctcacggcaagcgagatggagagagctagctcggcggcagcaggacggcgggtgctcggtggagcggcggggcggcgggagcttggcggagcagcggggcggtgggagctcggtggagcagcgggagagtcggggcggcgggaggtcggtaggagctcggtggagcggcgggagaggcggggcggcgggagctcggcggagtggcggaatggcggggcggcgggaacgacagggcggcggaagctcggcggaatggcggggcgacgagagcggcaggagtgacggggcggcgggagctcgctgcctcccctcccacgcccctcctccgccacctcatccctatcctcgcctcttcggcctcgccgccgcctcttcttctccttccccggcatcctggcgaagatggacgccgacggatacgcaaagttggcatggtaggatgcagcacaggggtcgtcgaccacgcgtcgctagtccgacgtggacggagccagaacgccgccaccatgaccttcccgcgcttcggcgtcctccatccaacattcggcactcttctcgctgcgccggcagcgactggtagtgtcgccatccaatcttgcgttggggcagcaggcaacaattggccgatgacgtgtgatcatcgtaggcgcgtcctcttcgtgtcacggcgatcctcgtcgccgtagtagccgtaagcagcaccacaacagccgtaaggcacgccgtagtacatgtaaggatcagctccgaatggcacgccgacgccgaagaaggggtcgacgtagcctggcgccgggccgaacgggaagccatagctgccgtggtgatcgccgtcgacggcgagggctccatattctgtggagtggtcacccgccaccgtctcccacgcctttcttggtccgaggacacctgatgagatcgtggcgcttttcttggaagacacgttactgcggctcacctgcgaagcggccaggctctgcggcgccgcctctgtcgcgttgctgctggcggagctccttggcttctcggttccacttgaaacgctcgctgtgccgctggtggtggcgagaacgttggcgatggtggtgcggagcgttgggttggggatcaggtcgtcgacgcacgcctgcgccccgcacgcgcacttggacttggcggcgatgtggtcccggatgcaccagtcgcagaagctgtcgaagcagcacttgctcgccagcaccgcgtcggccatcacgtttcggcaaatcttgcagtagagttccgatgagatgacgccgctagatcccccggacggcgtcctccattcggcactcatctcgcagctgccacgggggatggaaaagataatagaggaagaggagataagttgctgacaagtgggacccacaagttgactcagctgccatgtaggacaaaaccgtctccgaaaccgccgagggaggtgatttgctctggttttcagagaagaaggaggcgttatacccagttttccggttgagggatgttattcacacaagcgcaagacatgagagaggcaaaatggacttattccatttagaaatacaaaatttggtagggttggcttaggcaaccaaccaacccaagccaaccaaagaagccctcaaatctttgtctcggcccataatggccagcgtttatggctcacttctaatgggctgtggcccacctgaaacagaagagtatcgtgtaggcgtatatgcccactcgttaaaaagtggccactctctgacaagtgggccacatcggaacactcttgactcccctccaggcctccacggctccacctccttccgctttcgcctatccgccgtctcccccctcccccttcctcggctcctcgccatctcgcgctcggccgcctctctccctgcttaaaccctctattcgtcttctccaagcaaaaccaaaacccgagcccacccaccgaggtcctctccccctcctctcgctgggccaccacgccatggacggcgtcgcgaggtcgcgcctcctcgtcccgctcctccccaggatctccgcccgctccttctccgccgcctcccccgcgtcagagccagcggcggctgcggcggccgtcgccgcctccgacgcggccgccgccacggactactcgtcctccgcgggcgatccctcgtccgcgccgcccccgccggcccgcaagccgctgggcctgctcaagggcggcgtcctcgcggttgtcgccgccgcgttcggcgccacaggctacgtcagctatggtgcgatctctgatccctaaaactcctagatgcctctcggccctgctacttcgcattgcagtgtttctactaccattctcaattttaaagtgggaggggttcggtttggtgctgtgcgtatgattcgtgctcgtgtttttgtcttgtgtagcttattctctggatgaaattgatcagaggacgcgggagttccggaagaactcgaagcagcccatccgtgatgacctgtccggtttcgaggtaatatggtagcatgtcaatatgtcatgtttgggtgtgtgataacttgtcgctagctggttagtagcgtgactgcataagtaagcagtgatgcccttggaaatatgaccgcataattctgatttcctgtgtaaaaaaacttggtttcatggggtgaatatttgtacacagctatagggtagttgagatttgggcatctgaaactaaaagttattctagtacgacacaatatgttctattgtagacctgcattctgagagtatggataaaagctaaatttctgaattgggttaaagaatttggatttcagccatgtctaatagacgatttgcttcctctctgcagaagtttcaggctatggcttattcagcagctatgaaaggttctgaccacatgactccttcattatcttaccatattacctcgggattatagagtttcaacatgtcatgcatacctttcttcatccacatcaggagcaatttaccattacatgttattttttctttgtaaaatacttgtttgcagccaaccttagggaaatttaccctgcttcacagtgaataactaagccttgtcactctctgaaatataattttgtatgcactaaagtaatggtagtcagaaagatctactttactgtatgcatggtgctgttgttaagctgacaataaattccaaatatgtaacccaaacttcacaactggaaaaaaaaactaggggtactataatctcgtgtaaaatagctagggaatacccactttgtgtaacaatcagttagctagagcaactgtgatctaaccattatactatttacatgcgctgcacctagttgctacggagggcatgtgtctttggtacaaagctgtttgttaaatatctagtaaattgatgcattgtctagagcgctctatggctctagacaaacatacaccacagggaagaagcatggtatgagtgccctagatagcaggggttcgtcatttaaccctttcatgtactataaattgttatcctcctgtttgcatggcataattattgttgttccttttctttgcgtctcaattcttaaacacatatgttttgttttgcagttcctgttgctgctattgagttctatttggataccaggagccaaatagaagatcaaattcgggtcagtaaaaaatattaaatcttttgttctccattatccatgttggctattgtgaacagacgtgcagatcatgctaatactcatttttattaaagggctttagtgaaccatcatcagataaacttcttccggatctacttcctcaagagcagcatgtcttcaccctagttctggatctgaatgagactcttgtatactcagattggaaggtgaacatttatgttttctacgaagttacttatcttggtatttgatatgtagtccttatgtagtatacaatatgacccaatcctaacagttacgcaaactcttaacgctctggcttccccgtctctccacaaatttgcacttgaactttaccatctgtgctgtatggcataactcgaaagtgctcatgctgattttgttttggatctctgattctctggttttaccagaactgttttgttacacggatttgagaacctaatgccttattaaatttcgtttgggacacataataaatatgttatgtgatccaaacaaagttttaggttgttagcctctaaaatcttttttttacaagatctagtcttggactcttggtacaaccagagatccaaacaggccctaagtatcgtaatccccattcagattgatctaaaaagggatggttatttaaaatggttttacttatttgcttgttcgattggaagcttgtgatcatttttcttcagttcactcatctatcaattgtatctctgttctcctatatcaactttgatctaaatttaaacttcctaagaaacaatatataccgtctttttgtgctctctctctagagaagggtaatcactttctgtatgtctactgcaaaattgccaaactattgtggaagtccttatgttttctagttaagttttcaagcatgcatatcatatagtataaaatgtttatgacccttgggaggctgcttgacccataatttcttttatgtatgtatagcgtgagcgaggatggagaacttttaagaggccaggagtggatgcctttttggaacatcttggaaaattctatgaaattgttgtgtactctgatcagctgagtatggtaggtttaccagaatttcctcaacaatttggttgtttctgaaaaatatataaacccagatgaactttttttacatggacagtatgttgatcctgttattgaaagactggatccaaagggctgtgttcagcacaggttatcaagagttgcaactaaatatgaaaatggaaaacactatcgggtatggtagtcttatgctcttatcatctgttctcttagttgtattatacactggttgaaacagtttcatatatttatcctttaagcacccttttggtaagctaagttgcacactagcttgttctatgtttttttggatagtattgtgattattgagtaactaactgtatgctacgcatatgtatgcatgagatggattagaatgtgttttatgttcttcaaataactggcaggagtgaaaattgatgttatgacaaagttgtttctgtccatgcattaagcatataccactttgtccactttgctctctgggatctggctttcatgaccgagagaacacatcatgttttatcttgtatagtttcctcttatacagtaaaaatgtctacaaatcatatcaatccaacatgatgggtttatattgtattgtaaataattctggttttttttcgtactcctattaaaattttccttccaatgttcattgaatgtaataaaatctttgaattggagtagtcatttcttatctgcatcttggccaaggcctttgcccttctcctgtgaagtaagaagaccagtgcggtgagcttccctaaatgcttcggtgcagtggaaccttgatagccgtggcatgcgtattaattttatggtgggtcattcaaataactacttaaaggggtgttatatttttatggattacagaacaaaacaattgcttattttcgaacattactgtagaagtaaagaacaaacataaggataaagagaggctttatcatcattagtcgaaagactggacagtacatagcagcaaaacaattgcttgcaatttatttatttagttattctttatccgcaagccgacctaagaggattctgccgcattataaacgtcttggtagctcttgtattggattggagtgaatgcaccgaactcatctcctctattatgcttgagcctctgagcctcttctcttgagatgcgatatgcatttgctagaacatcatttgggagagcacggaagatggaactctttcctgcaatgtggcttaccatagagttaggattggtcttgaatgcaatgtaagcacatccttctctttgtgccttctttacaactgcatagtgttgtggtataataagcagctgtccgcggcgaagctcgccgttgaacactgtctttccattgttgttgacaacttgaacccgggcacggccttgagtaatatacacgacgctgtgagcgttgatgttccaaaatggtgaaaggagtgcattctgcaatagaaaaggtgcacatcattagcatattgtgtgcattaaagcttttaccaagaaaaaaatgtgctgttcattttacctggtatagatttactttgactgcactcatctgtacaagactaagaatggggaaattctgggtgttgagatttgtaacccttccagctcttggattgtatgtatcagcacggttaggattatcgatgttttgccttaccctcagggtgcaaaaggtctcatccaaaccgttagagcagccacttccatattgactttgctgatattgtccttcttgataacgctctcttgattgcacttgtccttgttcctgctcctgcaatgatgcatatggctgcagcaaactgagcccgtgttcgacacggacaatttctcctctttggtcattttgacattggagctgccttgccacttggctgcttacgccaagagcctcgctaagtagttcagtgctaaagccactaaatatgttctgtgaccgctcctcaacctcacgcctgtatgcttgagggtttctcttatttccagctaacaagaaatcctaacagttgattaaaaggctaaatcatcatctaagataagtggaataaaaatatcaaaatagtagtaaaaatgtttagctttggaaaagttctgcttaattaccctttgcctagggtcaagttgattagcaccgttgttgagatcagtgacatatatggcaacaactggcacttcaccatcattgtagcaccaatgagctacaccagcaggcaatgcaattacatctccttgtctgaaacggtggatcttttgatgttcatccttgaacttttgactttggctttgactttcggtcaattgggcttggcctgattgttggaactgttgttggtaggactcaggacagcctgggaaagttggccctgttatacctctccctgaaagtatggcatgcatgttaattacaagcaatataaacatggaagctgatcattaattcattatgcacttaaattgttgcacgaaccttggatgatatatactagagatgcaccattagtgtaatggggtagtagaaggcctctaggttcaataactcgacggacaacagatactccggtacattgaaattgctcattagagacatcgaagaactcagttgtgccagcttgagacctcacactccgaattggctcaaatgcttgcaacctatcgaacctgcattctcttggacttccacgacgagaactctgccattgactagtgctctggcctaatagctgctgggctagagagccattgcacaagaggaacaagcaaactgtgaagaaaactatggggcgatttatggatgccatgttgttgtagtactaatgaacttgaatggttttgtgagaaacaatgctaaatcattgtgcatttatagtgagataaagtctcatgcatttgaatgttaagatagagtttgttaatgtccagacatgaagtgactcatgatatatgaagtgtggtacacggaaggtggatggataatgatggatgtgtaattgacacatcatttgtattgttctctctttctttcttttgcaatatgacatggatgatgttaaagattatatccatgcatgcttttgctttttgttgctgtgccatagctttctatttctttttgaacatggttgttggtgatcatgacttatatcttgaagctctgttctagcaatactttaatatttagtgaagagtttttagggtggtcacatgttgacacgatcaacaccgagacctgtgagtttttggattgttgcatgatatatgggccacagtaggcatgtgaattttttttgagtcatggcttgtcttataagctctcctcttttcgcaacatgacatatagctctgtagttttatgtacacatccttttgctttatcttgcttgactctctggtttgtcatgtgttacacccaattgtcatcagttatgacttatgtatgggaagttctaacactttagcttaagatacttacctagatgactagaaatgaataggttgacagaggcatgaaatgatgcatgacttgctatgtcatagattatatcttcttttgcattatgtcgtggagaatgccaactttgcacattaaacgcttgcatgtttcattgcttaagggtttcttatcctgggtgataacattcaaggctcattgagaacacactgctcataaaaatgttctttttttatttcgtggtcccataatgctcacacattactcataatattgtttcattttctaacaccatcttctttcattactttagtttattctgtactacagaatacaacaaactgtcttgtgcatattttggtgtttcatttgggttgcctacaccataattaacttctcattgccatgtgcaaaaatcttcatcctactgctaactaactctttgaactgcacggcacctatcgaaaagctccctctccttatgacatcgtcagttgttcttctcagcaggttgctgtcatcttagacttttcttgcaacaaatactttacataaggtgtgaactagtagctggtagcattatttggctggggtaaatatcattgcatgttctattgctcatgactgttacttaaagttaacagtgtaagtccaaagtctggatcaccctgtatctacaatttcttcaatggcctttaatgcttttaaacttttggaaatttgcagtataaggtttccttccttgagcttgacatgtattggtcattgttagctattacacaggcatttattttctaagctgtttaactatttccatttatgatgggcacggtgaataggatcagcttgcagcctactcttgattatggtgcttttgttttgcgcttatttccaccatagaaatcaaccatggaccatgttgtttatctaagtgctgataagctgctcaccgaacagtttgctgacagttaggtgttcttttttccttgacaaatcctactttgaatttgaacttggatttgttttcttaaaactaaagtatcataaccaagaagactatcttttagggatgtaggtagtataatctacttcctccgtttcacaatgtaag

SEQ ID NO: 7421 - DNA, 24027 bp, Oryza sativa
gctgttcgcgtcgttcgttctcatgtcggttgggtcgggtggcatccgcccgtgcgcgctggcgttcggggcggaccagctggaccggcgcgacaacagcgcccggaacgtgcgtacgctgcagaccttcttcaactggtactacaccgtgctgggcctctccatcgtgctcgcctccaccgtcatcgtgtacatccagcaggccaaggggtgggtcatcggcttcgccgtgcccgtcgtgctcatgctcaccgcgctcacgctgctcctcctcggctcgcccttctacctcaaggcggaggccgacaggagcgtgctcgtcggcctcgtgcaggtgctcgtcgccagctacaggaagaggaggggtcccttgccgccggagacggccgacgcgtcgcgcttccacaaccgggccgggtacaagccgaggactccgtcgaacaggttgaggtggttgaaccgtgcgtgcgcgctgggggacaacccggacaaggaggtgaaccccgacgacggctcggcgcgcgacccgtggacgctgtgcacggtgcagcaggtggaggacgtcaaggccgccgtccgcgtgctgccgatatggtcgacggggttcatgcccggcgtgatcatcggccagcagatgttccccgtgctgcaggcgaagacgatggagcggcgggtgggcgggctggagatccccgcggcgtcgttcggcgtcttcagcatcctcacgctcaccgtctgggtggccgtctacgaccgcgcgctcgtccgcccgctgtcgcggctcaccggccacgcgcgcggcgtcaccctgcggcagcggatgggcatcggcctggcgctcttcgccgtggccatggccgtggccgcgcgcaccgaggccgcccgccgcgccgaggcgctggccgagggtctccgcgactacggcccgcagtcgggccgcgccgtgcgcatgtccgccatgcggctggtgccgcagcactgcatcacgggactcgccgaggcgctgaacctgatcgggcagatcgagttctactactccgagttccccaagaccatgtccagcatcggcgtctcgctgctggcgctcggcatggggttcggcagcgtggccgggagcgccatcgtcggggccatcaacgccggcaccaggagcggcggcggccgcgacagctggctctccagcaacctcaacagggggcactacgactactactacctcgtcctcgccgcgctgtgcgttgccaacctcgcctacttcgtgtggtgcggatgggcgtacggcgaggagggccagaaccgggtgaccgcggaggaggaagcggtggaagacaccaagaccaaggaagaacagcagcagaaactgtaaaacctttttagtgaggcaggctgctgctgtgttctgcttcagctttctacttctctagttctctcttgtgaaaattgtagtaatatttacatgtatatgttggtgcaaaaatggatggttcgacctcgaatcctatcagccctccggatccaaagatcctacagggcacaggctgctacctgcaacgttaaaatgctagtagtagcagcagtttttttttttctgttacttggatgggttgcatataagtagtgataaaaacggtgacagaaattttctaccgaccgaacatcgttttggtaaaagtagtatggttcgattctactgtagtaaatataaaatttgacttttctaatttcttttaacccttgttcggttaatcctcatgagggaggcaatggagggtatttattccacacctatttgtggtgtggaattattcccccttaatcccctccaaaccgaacaagaccttaatgtgatattacaatggtggcaagtatagctaatgtttttcacttgtaaagtttactcctcctctattcaatgaaattggcagcttgccgattcgttcaaaaaaaaaagtatagctaattctcgactgaccgataatcgtttacatagagatacttccattttcgatcctccgtagagacctactcgtcagcagtcgtcagcattcgccagcatcaaacggacatgataagatgatcaccgcttctcttgcagccttcagcattaatgctgcttgagtgcttgttgctggcgccaaaatgctgatgaaccaacagacaagatagctcccgctaaaaccagttacgcactgcaatcaatatgcagttttgctcgacgtagcgcatggatcattcagtggttgaatacgatgtagacaaaattcaacgaggcctccttgtttcccaattctcatcatggtcttcatcagtccaactgttgctgaccatcataggcattaaacacttaaatgctggcgttacattttgtttgcttgccactatttctgccgatttcccgataagaaagccataaccttggagacttcggatataaatctcttctccctcaggtgctatagcaaattgttgcttctctgtgtgctccgggtaaactaaggtaactgctcgattccctatccttttccttagcttatcttctcttctcttcctcttagcgctatcttgtgtcacgccaactgcaatagtagtatagtactccaccatttgcatcggtagatgattttatagcttgttcttaatttcaagaatacgttttccttgatctctatgggaaaaccatgtgttgagctcggtggttggggtcacgagtttgatcactatctcctaccttggatcaaagaggtgcagtggtttctctgttgcaagatcctttatgcaattttcctggaaaaaaacaggtcccagaaagagtgccctttttctttgctgttcctcaaagttacattttcctgctaggcaacagacataacttgtacattatagcctctaaggtaaacattaacggaaacaaacacataagaaatactgttcactgatagatgcatctgtataaagcgttgcccatggttaatcacctccacccacttaccagctactgcccttttagctttgcagaagatggaagctcaagaaggtgatgtgaaaagctgtgaggcctccaaagtgaaatggaaaggtggatttgtagccctaccgttcatcataggtatgttaccattttttttcgtcttttatgttttacttcaagggtatcgttggatggcagaattttcaaaggaattttggaggattctgatactaagatttttttttcctgcaatagttgtttggaacatacaaacgaagcaattatattctgatgaattggtttcatatgccctaaatttaaaagcaaatattgtacagttttcccccttctacaatacaaatacaccccgtggggtttcaaaaaaaataaatttaaaagcaaataaatatgagctcaaacacccatgtttttactttctaaagttcagtgcattctatcttcctctcttttgactctctattgaaaaaacaaatatactttcttatggattcattatcatttgcttgttggcttatctagtgtagccaaaatttgaattttcaaacttaagttcaaaattgatttgggggctttttcgtcatagactattttctagccaaggcttttagactgctaataatagagatataaaagttttaattataaattattttttgtttttgtttatttttctataacatatcaatcgtagctcaaccgatcagggccagccaaatgactcccatattcatgtgtcctgaaatcttgtgggataaggtagcatgtccaaaattattcatgggttttcccttttcttgcggttttagaaccgtgcattccagtgaggcccttatctttcttgttatagttagatcacctcaaattgcacgcttgaagctgttagatttagtaccttcattttatacattcgttaatttactagtgacttcaaatggtttacgcaattacgcgctttattttccagtaattaatgtactcgattatgtatttcctatctttgaatgtattgagcactgcatagcttgccatgtcctcctacaaggaacaaaactgaaccaagcgccttggacacaccgagcatttccaaatggaccacaggtagaactgtcttgattatcggtgtggcagtggcagttcagtggcactgcggtagaatgacaaacctagaacgatcgctggcgataaagctgtcactttgagggcaaatcaagggaaaatggtaatgttcagttgggaattctagaaagcaaagccaccgatggagtactagagagattttttggactggcagggaaaaaacggccatcttaaattgtgcgctgccgaagattgcaggagagatacatatgtgaactcatctgcatttcagaaatagctaaagcatatcatcttagttattttcagcataagtgctccaacttagtcaagtaacaggtaaactgaagattacagtgacgcatattcacatgctgtgttccggaagaggcgtttccctccctactaggattcctacttgctactgctttgcctagattaagagctagtagtagttgtccaccttatgacctaactaccgtctaccggttgatataatttaacgaggttatgcgccgtggtacaagatcctgccactctttgctaaatcctgtaggcgtagcaattagcatttcatttctactgcgccatggagcactctcttgttgctgaggctgaagcacaagtgttcttcaaggccaaggccaagggtggtttcagagccctcccttttatcatctgtaagttcgaactgaaattcatacaaatggatttcagaaaccactgatcagagtatttatgcaaatggatttatgaaatccttcgtttctttcttgttttctttgagatgacatgagtcaagttctagaatctagatgcatatgattggcctatgatattcatatgtgaactttttcaggatagtgatgtccatcaatggtgactgtgcccttcaattgagtaaattcaatctgacggagtttcttgtttcctttgcatctccttagcaaacgagatactggagaaggttgctggattcgggctcaacatcaacttcatcacgtacctcaacatgcagtaccacctgagccatgccaacgccggaagcctcctcttcgtgtggggcgcagtatcaaacttcgcgcccatccccggcgccgtcattgccgacatgtacctcggccgcttcatcgtcgtcgcgatcggctccatcgcctgcttcgttgtgagtgcaaaaagaagatgagatttccattgacaccggaggagatcgaacaccgagctgatgtgctttgctttgcttgtttcaggggatggttttcctgtggctgagcgccatgatacccggagcgaggccgccaccgtgcgacatgagtgcctcgccggagctgtgcgcgccgccggaggcgaggcacatggcctggctgctggccggcttcgtgttcctgtccgtcggcgccggcggcgtccggccgtgctcgatggcgttcggggccgaccagttctccaggcaccccaaggagaggaggtccaggatcctgcaggtgtacttcaacgcctactacggctccatcggcgtggcgttcatggtcgccgtcacggtggtcgtgtacgtgcaggacaacctcgggtggaaggtggggctcgccgtgccgacgtgcctcatgctgctctccgctgcgagcttcctcctcggctccggcctatacatcaaggacaggggctccaagcggatgttcgccgggataggcgccgccgtcgccgcggcggtcaggaaccgtagggcgtggctgccggcgaagaccgaggacggcgtgtaccatcacctcaaggactgcaagctcaccgttccgacggacaggctgaggtaagcgacgatcgatcagcaatgcagcttgacaatggtgcgaattgctgttcaaagatgcatgattcgaagttcatgtggtgtgatcgatctgttcaggttcttgaacaaggcgtgcatgatcagcaacacgaaggaggacaagtctggtagtggcggcgcggacggcatcagcgacagagggcggctgtgcacggtggaccaggtggagcagctcaagtcggcgatccgcgtgatgccgatctggtcgtccaccatcttcctcgcgcaggccatgaaccagtacttcgcggtgccgcaggccgacgcgatggaccggcgcgtcggcgccggcgggttccgcgtgcccagtggcacgttcgccgtgttcaacatgctcaccatgtcgctctggtcgggctgctacgaccggtggaccgcgccggcgctgcggcggctgacgggcaacccgcgggggctgaccatgaagcagcggatcggcgggggcctggtgttcggcaccgcggcgatggccgcggccgccgtggtggaggccgcgcggcgcaggcaggcgctgggcggcggcggcatgtcggcgttctggctcgtgccgcagtacgcgctggcggggctcgccgaggcgttcggcgtgatcggggtgatcgagttcttctacaccgagctgcccaagagcatggccagcttcagcatggctctgctctacatggccctgggggcggggagcctggtggggagcttgatcatcaagttggtccacgaggtgagcgggcggagagggaggacgagctggctggcggaggacttgaacgccggccgctacgactactactactggcttctcgccggccttggcgccgtcaacttcgtctacttcctctggtgcggctgggcgtacggcgaggaggggcagaacgtggagtgggaagacgaaggtgagggagagacgactatagcttagtagttttgtgctgaagcatgcatgtggattgctgggaacttgtgacaatgtggaacctttcctatggttatgctaatatgaagcctatggtttggttgccccatgaaaatagcagtttgcagggttgattctctggaccatacgcaatatcgtcacgttgatcatctttgtccattgcagtggcattggccaaggaaaaatatcggcaactcagttggccatttattagaaaacactatatctatgaatctcttatttggaaaataaaaaaccaaatctatgaatatatctctagtgttttgctagaagtgacttccttttggttttggttattcagcaaaattatcaatgcgaaaaatatttattagctaaccattacaatgtctgccttcctggaaccacagctaagctcctaataatttcttcagctccttcttgttgacctgataaaagcaataggtaagtaacaaactcaacacaactgcaaagaagaaaaaattttcagcccgcacctttcccatggcattccgaggaagcgaatcccataagtacaacctcgtaggaatctatcatgcatagaaaaagaattaactccagcggggaaaaagatttcagttcgggatcagataaaagctaagctgtacgtgttaatataagcaaaggatatgtaaacttaaccagaagtggttgagaaaaacatgagtcaggaaccatcccttgcgcacgcaaaatatgaattgagaacttcatagtacttccaaggtaatatgtgtaacttttgtggatggagggagtatcacgcaacagtcaaaagagaacactaaaaaaggcaacctcacaaataaggccatactgtaaagttgctagggaaagggggaaaacatgtagaaaatcaaaccttgtatggagcaagcttatcttttgaccaacttgtcagtgcttccaaggtcagtgctggtttcgagtccagttcagctcttttctttgagtcctccttaggcacaattattgcacagataatctctccataagcttcgtcaggtaagccgagaacagcacattccaggacaatttcatgctaaacaagaaatcaaaccagagtaaacaagatgagtaaccttcaactaaaccattgggctgtcttcaattagataggtttacaaagtgactattggaaactattcaagtaaaatggagattttaagtttttacctttattattgtctacctttattcttaccacaaggaaagtactacgtatcagcaagttctttcaaggcagtacgtttgctaataatgtctagtgtggggatatttacctgtaacagcactgactcaatttctaatgcagacagcttataaccaccaactttcatgatgtcagcatttgtgcctacacaggataatacaaatgagacagataacccaaaacgattacaaatagacagtagcaccacaacttaaacaaaaaaacacaactagtggaaaacgatgaagtggtccttacgccctaaaattatgaaatatccttcatcgtctacagttactgtatcaccagtcttgaagaacccaccatcaataaatgattctgcagtaacctgcaatacaaattaactgtgctgaacaacgaaacaaagacatttgattctcaacatgcacccttcatttggttccttagtggttagcaaattctgctaagtttgtatggtgcagcttagaagtcatgtcaatcacaacacccacaaaaggaatgcaccacactggtttcttattaagacacaaataacaggcaagagcataccaacaagtatagtccatattaacaaagaacaggctacagagttgggtgaaaaaaatatgaagcaacactaccctttaattagcaatctacaacgaatgggttttagtaaaataaggatgcaactcatggagattatttacaaataaataatgtacgcaatcaaaatgaaatgtataagtttatttcttgtgcatcattcacaatagataaaggttgactgttgggagaattagcaaatgattgttttaattgacgaggaaaatactttatcaatcatagacttcatatttttgtttatgaaaacacaaccatacctctggttttctccaatattccttaaaaagggatggacttctaatacaaagctcgccaacttcagatgtagtttcagccccatcctccataataatcttggcctgggaaagaatggttctgtaagtgccatgaggcaatacagaataaattagtttgatgttatcctaacttccatggatcgtttagcatacctcaacacacggaagcggtttgccaactgtaccttctttacgtgcaccatgcaatgggttagacagtgccatgacaaactacaaccaataagactgtcaaaacatgaaaaaatgatatcatatttatgaaatgtaagtccatagaaaaggaagagttcgtgtttttaacctcagtcatgccgtatcgttccaaaagacggtgacctgtcacttcctcccaccgtttcataagtggggaaggaagggccgatgatccacacatctgcaccagttcatataatgttaataacaaaaatttagataataattacatcagtccacattatgatagtgcttaataaagcctacaagccaaagaatactatacatcattacctagagctcgaaaagttgaatacaaacaaagtcatttggcttcagtgcccagcagaatcaaataaaacacctaaaataaatatagatgcatattgcaagctcacaaaggcatcatgcaagaaacttcatctgcttttcaagttatcgtggtgttagaaacctaaagtcagtgagaccacagttatcggatatattgagtcctgaggtgcttaattaagtactttagtgcttgatcgagcaagcatggccaatgaaccagttggactttgcaagttgaatagcaggattgaagggttcatgacccttgatctatctatcgtactaccatataacatacatatatttgcacattttcaacagatagtaatcagattttgtccatagtaactatctactagtcttttcaggaacatagtacggactgaaacacatgagttgtaattttgcctgacgcgtgaagtttagtctaaccaaggtccaagaatcaatacaattacttgcaagatatatatacaactgaccattagcctcaattgctttgcagcaaaggaagatgcagactgttgttcaggatccataccatcatacccttgcaatagccgtgtgtacattgttggaacctggtagtccaaaagtatcgaataaccataatgcctcgagcaatttaaggacaggtaatagtttagcataaatctaaaaaaccaaaaatatatggcatagaaccgtactccagtaaatactgtaattgcttcatcatttttactgccattgttgggatatgactcacgccacctctgccatattcccctcacactaaatttcggcatgaactcaacctgcaacctcagagaatatatattagcatggaagaaattttgacacaagatgcattgtatgtgactcctaaaacaaaattaaaggcttaaagtaacacatcatacgaccagaaaggaaacccaagtgctacaaaagactggttcatttaaacaaaatcacaacatcaatcgatcaagtgaagcactatgcacatgctgaataaagcatttgagatattagtaaaagtaaggtcaattaccactgatccagaatagaggggtgcaaatagagcattgaacaggccatgaacatgtaaatttgaagttaaggaccttaataaatctcgcaaaagaaggcatggttcctccaaaaacaattatagggaaatctaatgcaatccattactataaaacattgtgctaagtacttaaaatagcatttagcattagctttttgtggatatggtgcagtgggagacagtgcagaaattgatcttcacttcgatatccccatgcctctgacagaatttgaacctgccaaaccacatgaaccacaaatacctttagatcagtcaaaagtagataagcagtatcgtgaaaggtggtaaaatatagaaataacatcagtaaagtgaaaattgctaacttcattcagactgtcccaagaggcataatctattaaaagttagaaaaaaatgcacctgagagactatccccttatgagtgtggaccactccttttggtttaccagttgtcccacttgtgtaaaggatgagagcaggatcatctcctgtagtatcaaaccccagcatggttaggcagctttggaattaatattgattattgagaaaatcaatgattgaaaatgacacaaaatacagtatagaaaagtagcagcagaaatcaataggtatgactgccacgaaaaacagaatcactcacctctgatttcctttgaactgtcaatctcagctattaagctagaaatagacgaagtcacttcagtacttgatggttcttggcaatctatatttactggtatacttgtcacagatggaagaagagaacagtgagcagaacatttggtagagatattctccatgatgtcttgatgctccttggtgcttaaaatcagcgaaatgtcctataggtttcagcagttagaataaaagggacatatttcaaaatttatagtaaattgcaaatgtatgcccttgtacaaaaaaatgttgactttgtatttgtgtaagaaggtgtctagactgtcccccagtggcccattgaagaaatgctgcttgctgcgtggccctttttaaacatctatttctaattttggctcagtttacaatattaagatgaaaagaagtgcatagcaagagaagtaaactcgtgatgtgttttcctggtgttgcccctcctctttttttcttaccttgctgctttctcattgaaactggcgttttttttgggagagagagagagagagagagagagagagagagagaggtgtgtagtatgatagtagaatggcatctttcttgtgtaagtacatctattgcaaaaataaatcactgcaacaagttttagaacaaaccgagtcattcatgacatgaaggagttcagcttcaggatagctaagtgctagaggcactgcaactccaccagaaagccaggttccaaatatcccggcaacaaattcaggagaaggtttagccactatgccaatacgagctccaccaaggaatccagttccatttattcctttgacagatgaacctgtacttccattctgtgtcatctacaagaaaaacagcagaagaggtgatcaggcatcatcaacagccattgatcaggttaagataagatcgtgataaacatattataatcacataacaggaaatctcaagtgaacgaagataaaacaacatacagagaaggagagcggtggtacatttttattgcgcagaatattgtagacatccagtgcagatgcaatgagctggacaaggttataactcttttggtcagatctgatggctgcatggacaccttgtgtcgaaccatgcttaaggacttcctgaacaacctccatgaacgtactagtagtattttgtgtggtgttgtaagctagtaaaacacaagatgaaagtttcaatatcagaaaatataaatgcactagaatttacagtaaaatagtaattgctaattaattcatatggttcaccgttctggccttgcatacccaatcggcagtagctcctcgcggaacagaccgaatcaatatagaccactaggtaatccataacacctctatgaggcacaaccttaccggtgaactcaattaagcacaaaccaggaaggagtggttatgaatcgtgacgtatcaatgtcgatgtgattatcaatgactagttggaagtggctcggctgttcaacaataacaattcactaatcagtaaccaccgaccaacccatgcgtgctgtacctactaggaatattggatatagagctaactgcattctgcgtacgtagcatcgtaggacccaacagacaggtttagaagcaaattcggaccactcctccatgataacgcagattgtaccactgatcatcatcgcagcagactcatcaggtagccctttagaaacccactaggaccactcttccatctccatgaggagaggacgcaacttattcactgatcaactcgagctcgaccacttgcacaccgaatccctcatcaaaacaacgaaaacgaagcatgacggggcacaccccgagagaacccgcggctggatactgctactaggcgagacaccccgccactgaagcaaaacagcgaacacctcccgatcgtgaacccagagcacggaggagaaacagagtcccccctgaacgaaaacaaaacgcgggtgcggcaaaacgacgaacacctggcgcggcagaaaaaagaggagaggaaacggggagactgacctggcgaggaggagcgggaggaggaggaggaggaggaggaggcgaagtggcgtcggaggcgagagaggagggaataagaggagcaggggaggaggagcaggtggtagggggaggaggaggcgtgggccgcggggcaattgaatggcgtcatcaagcgcgccaccgccccgcgcacccacgcctgtgcgcgcatttacgggcaggctgtgccgggtaggtgaactcccctggccgcggcactgttccgtgctcgtactcgtaccacagcagcggactggcggtaggttgctcgctcgctggtggccgcgggccggtggcgccccgcgtgttcgcgcgaagggggaaagaggaagagccggacggacgggggcacggggccgtcagtttgctcggttttttcggtttttcctttcctttcttttattttttccttctccggctgtactggtttggtcgtcgacggcgtacgttggtacggcttgtcaatcgactgctatcggcgccacagcgtcgtggttgttgtctgacattgcaacaactcaatttgctataggtgtggcatggtaaataaaggggttgtttggttcttaactaacattgtcacaatgttagacaagtgtggcttgccacactttttgtgtcctataaattgtaagccacacttgtgacaaagttaggcaaaaaaaattaagtctatgacatgcgtagtaagatgataagaaagtgtggcttgccataactatggcaatgaaccaaacacaagactaaagatgtgtggcagcctaaagtgtggtgtggcaagttgaagtattgaaccaaacagccctaaagtgtggccaacaatttgttagccacaagtgtggcaatgtttggctagaaattgagtatatgacatgtaggcccatggaacaagaaagttgtggcttgccacaactgaaacaagcaaccaaacgttaagctaacaatctgtggcatgtctaacatgtggtgtagtaatatgtggcaactaaccaaacagccctaaatgtctgctgaagattatcaatgtgagacatacatctgttcagatttattatactaaaatatatcacagctagtcctagatttttttttcaggatggagggagtatgttctttccttgtttatccatatctctaataaagcgttccattttttttataagtttattagtttaaatttttaagctattttttaatgattttatactttaattcaaatgtatagttctactctaattcacataagaaaaaaaccatttaaacatgcatatcatcatcattagtaagatgttttttaaaatcctcaccgctatgctgggaggcatgacgttggcccattcctctcgcccaataggatacgtgtagccaagacctatatagaaagctagtgaagattggtgatggcctgtactatctaaaactacatacgtggttgtacccctcactcgaggttgtctaggacctacacatagtcgggtactcgggtggaaccatttgcacgaagacattctgcaaggtgacacagtgtgcttagggaagtccaaaagtacctgcgagaagactatttgagagatgacatgtggcagtgattgagatagcccaaaggcgcccacgaggaaattgtcctagggacaacacgtggcgaatgctcagggcaactcgggagcactcgtaaagagattatcccaagaagcgacgcatggtgatgcccgagccagcaggtacgttgtgtcggtattcttgacactcacacatggtgtgcccttgcactagggcgtaggctcatgcacgagaaccccaataggggaaccacacatacctatatcctgacaccaaggctcgcatgtcccatcattccatattaataagtgcactcaaagtcggttgaggacattaaatatgggtgattcagtgaatcgcacctccccaaaccatcttttctttgaccgatccattatgttaagagagaggcacggtcaatagcatgtttgaggcggggctgcgtagcatgacatggaagaatgaacaagggatagacggtatgacagcaggtacagtgtagatcatgatgtatatctacagtaccttagcaacgcacccccccttcccccgagttaggtagaccttgaaaggtgtataaattgacaagggattgccaagaagaaggttgaacacagttagatacacgataatacacaaaagctctaggtgccccagatttagccgaacttccacatattaatcaagagaacgggactacgggagtagatttattgttctccggaggcccaaacctgtataattcgttcgtgtttgtcaaatcttgttctatctgctattacacgttgacaatagcttttgacttaatagtacaagggtgacatatactttttaaaaaattgttgggtctctaacatagaactaagggcatgtttggtagagctccaactcctaaatttagctccaggagttaagtctagagtggggttgtggagctgcgtaaacctagctcacctatctagtttattttgtgatagagcttcacccaaacctgctcccaatttaggtggagctgaaactatttggctgggctccagtttcaagagaggtggagctgaagctagagccgtgccaaacaagccctaagaccattagggttgtttggcagtgctatttgtagccgtcctgcaacaactaaccaactgaatgcattgaagataaccatgctacacggctataatgcggcgtggcctgttgcagccagtgttctcgaatagccccattgtaaatgaatggataagcttaaaaaaactcgtgccttagaaatacacgagtcaacgcccttggccgtcaactcaaaaccttggttgaattatgcctcttcttagttgccactttaccaatcacctcacttgtttgttggattatcaaacgtaaacggaattttaaattctaaaacttaattttaagtatactggggattttgtttattgcagtctactttcaatcttagtgtttaaactgctaataaaagtttcacttataaactattttggttgttttgttattttttaagctcatcaactgtaggtgtctttactgtgaaactttatgtgttccgtatcatacatctattccaaaatacctttttcatatgcgatatctgaatatacatcacatagtgctatcctagaaactaccagtagcattttttgaaaagcaaaatatgtgtcccatggctcaaaatatgcaagccttagcccatccaaagaaaagcctgcgaacctaatacggcgttaacctcgacggaatcaacaagtgggcctcaaatgggccttactgaaactgacagaactgcaagtcacatctttcaaacccgccacaagagattcagcataacgcacggtgtacatccctttcatctatttacaccaatgacaggtgggtacatcacccgcgcctggtcccacccgtcatggagaataacaaacccaccagcactttccagagaaacaaactccacgtgtgacaggacggatcacatcaacgacgccgacgccgcaagaaggcccgatctccggcccacccacgtcaccccacccactggctgcgcggccccaccgaaagctccagcgcccgtgaccccacgcgtcagccgcggtggactcggcgagcgacgcgtaacgcgcccacctcatcgcgaagggcggaagcattcagccacccccccaccccgtcgaatcgaacggcgagcggcccaacaacctaacgtctatgaattcgagccgcaggatgtggcccggccgcgctccgccgtccgatccccgcacgcccccaggatccggccgtagaatatgaatttgatttcgaaagcgaagagtgggaggagaaagaaagggggtggagaaagaaagagagagaagagggggaggaggagagaagctgcagcaagagggaaaatccactaatccccaactcggagactcctcctctctgaaatccgccattccctacccctccgccgcaaacacgcgcgcgtggggagctcgcggcgaatccagcctcgccagccccggccgcgcggggacgccttgcccccgatctggcgacggcggccgcgatctcgccgcgcgcctcggcggctgcggcgaattgggggtgggggtggggtggagtggagtttcgataggtgtggcggggagggagggagggagaaggggcggcgtgttgatctggtagcttcgtgggggttgggtggattagatagatggcggggaaggagcaacaggggggaggagggccgccgccgccgccgcgggcgccggtgcccgcggcgtcgtcgcagccgccgattaagaagctggtgaggcagctcgacttcacctcggcggcgttggcgggtaaccccgcgatggcggcggccgcggccgccgtgtccagggcgctgcagccgagggcggtcccggtggggttcccgcagccgcagcaacttagggcgcacctgccggtgggggtgccgcagcagctgcatccccggggcctgccggtgatgcggtcgcaccacgtggtgcatgtgccgctgccgcggccggcggtggccgtggcggtgcccgtgccacaggttcggccggcgcagccgcagccagtgccgcggccaccggtcgccgttccattgtgagtgtgccagtacctagatttatgtttagcatcaagctttacatttttacttctcaattgggtaatttctctcttctaactcctttttggtgattcatttcatcggaggaagactgtttttctttttctttttgtttgtaagccaaagtttcaaacttggtttcgattttactttgcccttatctttccttggaaatggaaggatggaccctttgtttttttttttcacttgcatctatatttgatattaccctcgttcttattacgatcttagttgatgcaaattccctatttctattttttctcttgttattttgcgtcatgttccaagatgttcttattgtgctttgaatctgtattgtaggaaaccagagtcaccaaagccaccacgggcacggctttatgaagggaaagatggcaccccgacaaagaagaagtgctgcaactgcaagcactccaaatgtttgaagttgtaagtcagattacatgccttagcttgaaaacggtgcaatgttgcaactggagtacccttctgagtaactctagtctggataacgttggatccaaaagagtttattttatttgctacagatgctaggacatatgtaaacttgtaaagtgaaattgtcttgagtttcttttaatccaaaagcttatatagatggatgctcaatccttttttttaataaaaagctggatgataatagcatggtcccaaacttgaccaatagcattcacagtgtgaccaaatacttgatcttatggtattgtaagatttctctagtatatacttgtcgcaagttagctggtctggataattataaaatgttatattatatatgtatccggaaaaacttatgggttagctctgggctctggcttttaccatctaagttccaatatgcatccaaaacgatgtatactagaaatgtggttcatctgattcacggtacatgaacatgatttggttctgcagtttaatgcgtttctgttcgatttccactgtagactcaaaacgcatacctctgttgtctctggtacctctttcactatgcttgtaaggttttgtgtactgatagttgatattatcaatctggatctcatggttttctatgtttaggtattgtgaatgctttgcatcgggtgtttactgtgatggatgcaactgttccaactgttttaataatgttaagaacgagactgctaggcgtgaagctattgatgctacattggagcgcaaccctgatgcattcaggcctaagattgggagtagcccgcatgctaaccggaataatatggtatgttttgagttccatgtcttaaatgagtagttagatatacatgctaagggtgttcaataattgatgcccgttacttctggagtattaatgattcatacaaggaatgtccgtgcatatggtgcaatcacatgtaattctcatttgaaaatcgaaatgaagctataaactaattgaatgcaaatgtagaacaggggaaggcttgggaaattacacaagttcaatgaggaactaaattgctactctctacaactaagaaatttacagtttggatgccatatttcagtaaaagggcatgcaacctagtagttacagtgctcaagtagcacctctaggtcctggattcgactccccatgggagcgaatttcaagcttagttagaaaaggtcactcattggcccctcataaaaacgtgttaagaattgacctatggaggacgagcatgggttaaggaccaatccatagggagcgagtccacgtgtggggggctgggtttagtggcctttctcggtcggattggttgaagcttcttcttaatgaaaagctgtgaacatggtctttccccaactggtcgagtattttttggatgccatgtttcatttttgtacatctcattatctgatttgccctgctatgatgcgtgtacttaatgttagtccctgaaattgccaggaggcggctggtgatcttccattagttgggaagcataataaagggtgccactgcaagaagtcaggttgtctcaagaagtactgtgagtgcttccaagctaacatactttgctctgaaaattgcaagtgtatggattgcaagaatttcgaagggagtgaagaaagaaaagctcttttccaaggggatcataaaaattccattcacatgcagcaagcagcaaatgcagcagtaaatggtgctattggagcagcagccttttcttctccttccgcatccaggaagagaaagcacatagatccttcccttgaccactcggccaaggaaaatggagctcacaggactaatcatgtacctcaggtaatgacaatttctagatttcagcaggcagttcagtttttccctaatacctccgtctgtgcatactgcatagctttgtgtttttgaggtattgacttcagtgatgggtggaagtggtctgctccatcaaaaaaaaattatttataccatgcatacaagtcatctgatgaacggtgtttcagatgtgtggttctgagggataggatagttattgactagcgctattgcttttttgatcagaaaggaaaaggactttccgtttgtatcagtgccgcacgtttacaacgacccactgttacattacatacccttctaattgacatccccatcagtttagcacaactaacacaatatctacctcactcttgggtttgtaccagcaatttatgcactggactgctcttttgaaggggccaacaactgtactatagataaattttgagttattagttctccgtgatacagaagtggtaactcctcatatactgctacttataaatgagtatgcaaatattttcttgagggatacaaattcctctacaacagattcaccaaaaaattggactaacccagataatcataagctgctaatagcaagagttatttcagggttctggtagggttttttgtatactctttgtgatttaattaggttttttatcagaagaatggaatgccatccgatggcccgcttccaataaaccagcctgtgcatcctccaacattggggccctttaaggtcacctacaggtaactgtcaacttctatcacttttccttgagaagatcaatcatacctgtttttgttgatggctttgtacccttccattataggcctcttttagcggatattgtccaaccaggagacgtaaaggaactttgcaagcttttggtggttgtatctggaaatgctgcaaaggcatacgctggtattgctggtcttacattttgggattttattaatttgcttgagaaagtattcatgggcatcctgtgctgcacataacttaatctttgttagaggcttagagccattcaaacaacttgcattaatctgcacatccttgtttcattttaccattccagattcaaactatgttttacttttcttgaaaactaagttgcactagcacataagcttttagttcaactctcatcttttcttgggcttggattttggatacctacgcagtgaagatatttaactatttgccactcttagatgcagcatttaacaatttgccacatgggcccacatatcttagacaaatgagggcccacatatcatagacacatgagtggcaaattgttaaacggcaaatctaaaagtggcaaatagttaaatgccccatctgttggtcactttgaagagagaaaaaacccaacactatagggttccatgtgctgcttcctctccattttttgtatttcaaataaatggttttataagatttcttttggaaccctaaatgaatatgaagctattccaggcttgatttggtgcatgatgcatcccattaacaccattctgtaacttccaatgttatcagggttaatgtcttttccctgttgaaaccatgctgtaataggcgtgatggttttatcatagttatgcttgatgtttttaaatgataaccaagtctttattagcatgttttatgtttgttaatataaggcatgaccacattcatacattgggaactgtctcattgggaaacaggtaagaaatcccaggataaggtggtagagaaggaagatgagatgggagggaagagggaaggtgagattggaggttccctagcatcgacaaaccatgacagagaagaaaacaataatgatccaaataatcaaaaggcatcagctgatgacccatcaactggaggaactcgtgcaggcaaagcttctctagaagagtctaaacatgattgcaatgatgatcagaaatccaataggccaatgtctccaggaacactagcattgatgtgtgatgaacaagacacgatgtttatgacttcccaaaatgtagttccgcagcagccagcacctgtcaaccagaaccagtctgaattgtatgcagaacaagaaaggtgtgtgcttacagaattccgtgattgtctccataagcttgtgacattcggaagaatgaaaggtacatcgaaatttcccatgtgtcatgctaatacagaattattgaacttctccattttttgctttgtaaaacgtgtacagtttgatcctgatggttcttccttgcagaggagaagttttccatggcaatcaaatctgaagtgcctgcccatcccatgcaggcgaatggtgtttcacgaataccttattcaaaagaagtagatgtacctgttgtaaaaacatttctacagagttccagtagacatcctgctgctggaaactccgcaactgggcatttggacaaaaaacccaagcatgaaaatacataggtgtccggggtttgtattttgggtagcatggtcaagagaatcatgttttctccctctaacatgttgatcagaagcttgtatcagtcttcattcttgtcttaggttcaagaaagctccaatttgttctcattggtaaaaataagtgtaatgttggatagttagcttagtcataaatatgcatttagcctttatcttagtgtctacattgtttgttcctttacctttaccatttccctcgtgaaattttgccaatcaccatgctagtattttagatgagattattccactttacgcgattaattcatattggttgtggctggttgtaaatggtaatagttccagactggttcacctacgcttcaaactttttgtgaaagtgtgaagccatacttcatcctattggcaactaccagaattgcagaattgcagaaccatcttatctccaaatttgccttcagttcatactgtaacactcttttccgatgaagttattccgctgcaatgtgccgcaaaacatggatgcatatgagtactggaaagtggagacgtctatttcatggatttatccttcaatatcatatcgatcagccgcaattttctgttgaaaataatgcagggagcagggatcaagaaagactttttttttctattaatagaacacttgatatcactctatcctgtacatgaaatggacattgcttcttgagtggacaatggcgaaaacaagcttctcacattttgcacatacagttaaatattcattggtttctccaggcctgaagaaagcgaatcacgacggcaagagttaaggctgcttgtgctccattttcgcctcaaattactgccccaagacgcgagatacggaactcttgatgttgttcagaaacttttccctgcagaaaaacaactgggctagtaaagaaagtgcaacaaaagaaactcttcaactatggtgctcagaacgataatacagatgtcccgagctgcattataaagtgtcagtacggtgccagttcaatatatatccagtattctcaatgatgcaggtatgcaggcatagtgcagcaaaccaaaaagaaattgacgttatgttgtgtgtaaatgtgaaagttccataaaacttcatcgtaaagtatatcaaactatcagtatcttctcatcaatgattcaaaaaaagtaagatctctaagggcttgttaatgatacaaagcaagttagatcttt

SEQ ID NO: 7422 - DNA, 14582 bp, Oryza sativa
taatatatcttgtgattttacctggtacaaatttactttcacggcactcatttgtagaagattaagaattggaaacttctgcacatttagatatgtgatccttcctgctctagtgttgtatgtatcagtgaggttcgggttgtcaatattctatcttaccctcatggtacaaaaggtctcatccaaaccattagagtgaccaccttgaaattgtttttgttgatattgtgtttgtctatactcacttggttgcacctgttcttgttgttgctcttgcactgatgcatatggttttagaaatgcaagcccatgctcgacaagaacaatttctccgcgttggtcattttgacattggagttgccttgctactccactgctaatgccaagagcctcactaagcagttcaacactaaatccatcaaagatgttcttcgaactctcccttgccttggatctatacaattattgaccaatcttattgttgccagctaaaaagaaatcctatcaatccataaacaaaataaatcagcatgtcaaagagagaactgcaataaatcaaacgaattcaaagaatgcttgggttgttggcaataaataagctatgattaattaccttttttctaggatcaagctggttagcactgttatatatatatcagtgacgtatatggcaacaattggtacatcaccatcattgtagcaccaatgagctacaccagcaggcaatgcaacaacatctccctatctgaaacgatggatctgttgatgttcatctatgaatttataattttggctttgtcccttgaatgattggttttgcccggattgttgaaactattgttggtaagcctgaggacatcctgggaaagttggtcctgttacacctctacctacaaatccaggattccacattaataaaaggatataaaagcaacaattatccaatatatacttaaatagatgcacgaaccttggatgatatacactagagttactccattggagtaatgaggtagtagaagacctctaggttcaataactcgacggacaacaaatactccggtacactgaaataacttattagagatatcgtaaacctcggttgtatcagcttgggaccttacggtgcgaatcggcttgaatgcctgcaaatgatcaaatctgcactctcttggatttccacggtgagaactctgccattgactagtactttgacttagaaattgggctaatgagccatgacacaagaggaacaagcaaatggcagagaaaactactgggaatttgatggttgctatttttcttgtggactaaactcaatgctttgtgtgaaacggtaatatattttggtctttttatactgatgtgaagtatcttcgttcaaaagttaagataaagtttgttaatgtccagatgtggaatgactcattagatagtaaggtacacggaaggtggatagatgagtgtggactcacaaacatgcatgagcggcacattgttattttcaattttcttttcttttccttttattttatagggatccttcttgtcatgttctacaattaaaagattgtttttaatctggaccgcatgttgtgtattgctttaattttgtgatgaaatgttttggttgagcatatgatttaaaataatcggttggatttattagtatgttttggagttacgaaagataaataagtcgtaatctcattatgtgatgtaaaacaatcagttgtgcctgctatgtggtcacggaaggtggataaatcatagccacgtcatattacctcttgtattgctacatgacaaacacattgttgtttgtttatgaaaatatatactccctccttctataaatgtttgacaccgttgacttttttaaacatgtttaaccgttcgtcttattcaaaaaacttttatgaaatgtgtaaaactatatgtatacatgaaagtatatttaacaataaatcaaatgatatgaaaagaattaataattacttaaattttttgaataagacgaacggtcaaacatttttaaaaaagtcaacggcgtcaaacattttgggatggagggagtatatgcttttggttttggtttcttctaacctaatatattatttctatgcatggttgttgacttgtcacaaatttatctcataataaatatattttacatgtacggcacctatcgactgtgacatggtagtcacatttttgtgagacttaactttaaactgcagcactggcgtcccattaaacttttgcaaacatgtatgatactgtagctgacaaaaccatcggtaaaaatgctagacgtgggcccgtccatgtctacttaaaaaccatccatgtctacttaaaaaccattggcccctgctatctgtagcctgtaggagtcgtcctgatcagaataaaaaaagaataagtccactttgactctcttaaaaataactcgaatctaatccgtgatcctcaactgtaaaaccggataggatgactccccgaactattcaaactagtgcaatttgactccctcagtggttctggatggcggttttgctgacgtggcgttgacgtggcgatgttgacctgatctgtgttgttgatgtggcacttatatggcactaaaataaaaaattatatgggctccattcgtcattcacatgaaaaaaaatgcgaggcccacatgtcatcctctatctatcctccttccccccctctctctctctcccttctctgtatatttctcttcctccagattcagtgcggaatctggagcggcggcggcggcagggtgagggccggcacgaaggaaggaacttgagcgggtcgagcggcggcttcggcggcgacggccttagctcgccggagaaggcgggggcgtccggccagtggcctcccccacgatggtgccgcgctaggctggggcgaacgagagggctaatgcagaaggcaaagcctgagacgccgctggccccagccgtgcctcccgctctgcgccggcagggggtgcgcctctgtttctttctacccggagaacatgcatgtgcacagcgttgcctagcagatgcaagtgcagtgccggtgtggggtagcaaggcgcagccgccatggaatccagtcgaattttggcaggaccagcagctgcaggacgaatccgtcctaccagcgtggtctacccgagtcctacagatcttgaggtcgtggactggtctgattttattctttgtggtcactgtttgcaaggtcttgaggtcgtagacaatagctacttcatcaccaaggacaacgtcggcatgctgaagctcgccaaggaggctaacagcatcttggttcgtcgatcagcgcattgactcatgttaccaattcgcctatgaaaattgttaacatctaaccgtgacatcctgtgattaattggtacaagtagtttgactgtcgtatcccgcgccggagacggtgggttgcgcagtggcgcactcaaacggccacaccacggcggccatgtccatgggcgggctgataaacaagatgaccgggcgcatcggcgactcgccgttgatcgggtcgggggaaggcaaggccatcatacgctccacgctggcgcgtgacatcgccgccgtgatggagtacaggggcgccgggctgcaggaggccatcgactactgcgtcaaggaacggctggacgaagggttcatcgggctcatcgcggtgtccggcaccggcgaggtggcgcacgggttcaactgcaccggcatgttcagcgggtgcggctgcaggagaaaagagagagaagggagagaggggggaggaagaagggttggagagagaaaggatgacatgtgggtcacacaatatattttgtgtgtaaatgacagacaggtcccacagaatatttttaattgtaatgccacataagcgccacgtgggatgaagaccaggtcaacaccgccatgtcagtgccacgtcagcaaaaccgccatccaaaaccgttgagggagtcaaattgcactagtttgaatagtttggggagtcatcatatccagttttacggttgagggtcacggattagattcgggtaacttttaagggagtcaaagtggactttttccaataaaaaacaaagggagccttgtgcagtttggaccgatataaagcaaaatcattatggaaaaagtacaaattagccccttgaactatcgcagtcgaccgaattaaccctctaaacccaaaaatcagacatcactcatcctaaacttttaataccggacaaattatccccttgacccaattcaggacggttttgtcctacgtggtgtaagcgtggcactccagtcatcatttttttttaatggtggggcctacctgtcatatatactctctcccctcctctttctcgctgaggaggcgagaacgcccgagagaggggggaagaggagaaagaggaggtgagagattatatatgataagtaggcccactattgaaaaaagaaaatgctgactggagtgctgtgcatacgccacgtaggacaaaatcgtcctggatgtcgagggcgataatttgtccagtattaaaagtttaggatgagcgattctgattttcgggtttaggggtaattcggtctgggtaattagtacttttccaatcatttatgatccgtctaaacctgagcacgaaaccgtgcctgattccgtggttgcatgatggaaacgtgtaacaccaaaggtagtaatctcagtgccgattgcgacccaaaacgcccggcgcgtcgacggccggaccgcgtcgatcgatgacggttactgcacacgcacgcacgcaagcatgcccgatccctggaacccaaccgcgcgcacgcgccgtgttccgccggcacggcgacacgtaccacggctggccgttcccctgtctgtcaaccaccaccagccgatggaggcgacggcgtacgtcacgcgccgcggaagacggacacgcggttgcgctcgcgtagtcacgccttccgcgcgcgcgcgccgcgcagcccggccgcctcctccacccacgcaagcaaaagtactaattacggccacggcctccctgcagcgagggtggtttatacgcgatgcgacgtatcgctgcccagacggcagctgtgataggcgtccccgttgggccggcatgggcaagctgatcggtggtgagggcgtgaggccgtggcctctcgcacgacgacggggcacgtacgcgcgcaggtactagtcaacgggaccgatctggtaacaagccggccaccgatcggggctcggttgttgctcacctttccgcgctacgggaaatgctcatagctagaaagagttatagaccagccaaatttgattctgcgtatttccatttgaacggtctttttactccaacaggtcatttatattacatctttcatattatatatacatcgttcaatatctatttagtattataagttattttgatttttccctaattattttttagcgagtttataaacaaattagtaacatatataataccaaattagtttcattaatctaacattaaatatatattttaataaatatatatattaatagtatatttgttttgtgttgaaaaaaaatgtcactatattataaacttagtaaaactttaaaaaaaacttgaaaaaaatcaaagcaacttataatatgaaataggggaagtattttctaactttcataatgcctatattttgaatgactaaattaagaatagatttttttaaaacaactatatttgtacggatatatattttaaggatggataagtttttttatgactcttaattatgtatgcaaattaagcaatctaaattatgtctgcaattgaggtcaccgtagccagcttgaatcaaggatcgaggagggcggggcagcaaggacgcagttgtattcgtcagtgctgtacttgaagcaaggagcgcgggacagaaccatagttggctactgatatatgggtcctgtatttttttttttttcactgaccgaactactacctccgtcccaaaataactgcagccgtggaaatacgtgtccaacgtttacccgtccgtcttatttgaaaaatttataattttttttaaaaaaattagccacacataaagtactattcatattttatcatctaataataataaaaataataattataaaaaaatttcaaataagacgaacggtcaaacgttggagatgaatagtgcaaaactgcacttattttgggacggagggagtaccacagtagatgccatagaggaaaaaatagtgggttttgtaatgagggggtaagttgaacgattttgatggttgaggggtgttcgattgttggttttgaagttaaatggtgtatttttgacacgtaatagctgagaggtgtaaaatagacttatctttttttcgtaatcgctacattttgaaagactaaattttaacaactatgttggtaatggatagatttttttaaacaactatatttgaacggatatattttagaatggatattattttagtggttctcaattatgtatgcaatctcaattatgtatccagtctcaatatgtatgtaaatctcaattaagtaagcaatctaaatgaggtatgcaatcgaggtcactgtgggcacttcaaatcaaggagtgcgaggcagcaaggacatggtggtattcatcggtgccatactcgaagcagagaggcgcatgtcagaaccgtagtggaatccagcctctctcctctggccgttgttgctggtcgaacttgagtggtttacctcgaatggtagtgtagctctggaggactcggtggcagcggtcctcggggaggatctcggcaacaacactccacatggaggactccgatggtggcggtgatcctgtttcgctatgcatcgcagctcgcgtgaaaggggagagatgagatcgagagagaagagagaaagaggatggattaaagagatattgttagcaacttacagatggcccctgtagtttctttacacttttttcgcctaccgaattgccatattggaagcaacatagatgaaaaccacgagggggtaagctgaacggttctgatacttaagagctatggacactcggttttgaagttggagggtgtattatagataaacataatagttgaggggtgtaaaataaatttattcttttttatatcaaaatgactatatgttgatagaaaacacgaggcctgggagatctgcttaactccagtgcaggtccaaagctcgccttcgaatgtatgagcgtgccagttgatttgatcctgtaatcaacaagaaatagagacaaagaattcgtggttaaatctataaatgatagccgatcggctaggtgccgatgacatatcatttatctttgagccgatgtcatatatgaatcgatcgacggttataaataaatagtaaggaactaaatctattcgatcggcagtagatattaacgatatatagttcttatattaatatatacttaaatcaaatgattgggatagatcggtcaccatgccgagacagtataaatcacttagattgaaatatatattaataacaggattatatatgtttatagcatagccgatcagatagatctagcatgtatcggctaatactccgatactactttatataaagatatcaaaacaaatataatataccaaacaaaagcttaatatacttaaatgcaataagatcttgacataaagggcggatttaacatgtcattgaaacacatagaccggatatggttaaatcagataaggtcggctgaaactccgatactaccctaatcggcaaccagagaacaggctacagattgatattctaagcacgacttaatagatcaaactcaaatgatgcagcattaagtatgaaaagaagaacaatatctagacaatcaagccgatgggtgtttcataaagtggtagatatcttatataatctaagacaacgtcgctatttaacctaatcggctgtcttctatcaacatatgttagccgattgtaggttagatgacgatgttgccaaagattatgtaagatatatgataacttgatgaattatatagacaagattagagtgtcataaagatggaagcactaatcccgagaacacaagccgtcataacaagttttacctcttgttgaagatcgaaaccgatgcagctcaacccgaaagcaagaactcgtcgaaataaaactaaagcaaaaaggtgacgatgcgccgagattgtattgaacatgtgtgttaaaaattacatagggctcggggtctatttatacccgagaattacaagatatgtccataccggacacgaccactatctctaacaaactctaagataccataagtctttgcggcagacttttgcccaaacatatctctaagaaagttacataaaacatcctaattaatagatacaattgccttctcaggactctatccatgtgcggtaatcatcttgaagcacctcaattcaacccaatgtcatacaccaaattatactgtcagaatcggctgcatcggctcacctagtccgactctgacccagccgatcctaattatagccgatctggacttcagccgattcttgctctgttctcggatcaatctccgccttcgactccaccttaatctaatctccttttctgatgctgatattaccaaatttggtcgttaacactataattcaacgactaaattttaacggctatacttgtaacacacctatatttgaacggaatattttggaatggatatttttttaatggctctcaattatgtatgcagtctcaattatatatgcaatcttaattatgtatctaatctcaattatatatgcaatcttaattatgtaaggaatctaaattatgtatacaatttacaaacacaagtaatccagccccacctcagccacagccacctaggcatctccacctcaaccgcagacacctagggcaaggatggcgcaactggggtccgtgtgggcggtgcatggccggaggtgctgcaggcagagtgggtatgccgccgccgaccacatccaccaccctacaatccatccctacctacagatttagtatgctccttcctctccaccttcactcctctgtggttccactcgccggtgccccattgttgccattgccgccaaaaaaaagtagaggggggggaggggggctcagctgcaccgagtagtgatgacaacaacaatagacaaggcgtcgtttggtcaatccggatatgggcatgagctcggtgcagaaaaaaagggttgcaatatggcgtgaggagagaattagaaatgctaaatttgtcgcttctttctccaggatatagcagacgcactaatttggaggaccggatggtatatgtgctcgagccggttttttctctccccccctacccccctacactattttgttgatagaggacgtgatagatgagctgctgctgggaatgctctaaagacacacgatagcatcgatctcagttgatctgatagcacagaaacgacaacatatgttacagtactactggattatttttaggcagatgtctattttatcccaactgctccagtgcgcggtgcgccgtctaagtaaaattagacatcattccaaatgtctcaacgattgtgaatgcctcaaatcagctatttaagcagtgttttgctccaacgaacgctatcgacgacaaatcacgcagcaaaaacgtacgacgtgtaagtggatcgatcgaacgtctggtcgatcgttaaagtgggccggatcttttcttctccgatcgatctcatgatcttccctttagtagcgcatgtacctattctcggctttatctttacgtgcctatcgctcaatgcggttcaggaggggacaacaacgtatcgtcctggctcctgtgcacatcttttttctcctgttgatacagctttaatcaattttggtgtaaactggtaccccttggtggaatccacggcatgacgggtcgatgcttctgcagttctctgtgctgtgcgtttcacattatatggtaatacgtccaacggagagagacatggaattctgcgttattttagggtgtgcttggttggagggatatccctggatgggagatggcgatttagtttttgagtgtgtttggttggtgggtgagggtggatagggcggcccgaagaggaaatattccactaagatgctggatgagtgtatccggctaaattggccggatgaggatatccacctttgctaatcttgaccattagttcttgattagcaataattaaagtatatttttgttaattagtaattaacttgtcaaaattagtgttgattagatataattactctattttattgttaattagtacaaattatagctatattaatgataattaacatattttattattaattaatatgttattgttttaattcaatccattctcatccacccaaccaaacaagaaactgaatggtcatattcacttaaccaaactaaaaaattggaccaccatatccctcaaaatatagatggccatatcctatccagccttgaccacgaaccaaacacacccttaagatggttgggaactccttctccttgcacggaaaacggagcggtctattagcgcatgattaattaattattagcttttttttttgaaaaatgaatcaatatgatttttttaaacaacttttgtatagaattttttttaaaaaaaagtaccgtttagcagtttgaaaaatgtgcaatgtgcatgtagaatacgagtacgagggagatgggttgggaacattgagaaaaaaacacagccttgcctgcaggcttcaggttgggcgttccttatttcagtgaggaacaactctcatgaggtgatgtatccaatgtttgtcatgtgcagtgcgtggtatatactagcatgatgaatcgcccattgacctggtcttggcacgacaagccgatgctgcgacgaaagtggaaagaatcatacatgtacaaacaggacaatcacatgcatgtaaaaaagagaacaattatacttccatccatcgagctggctctggctaaagctatagttagctcgccagtttcggcagtgcgggtaagtgttttcattgcttaaagggtattttctaatttcttgtgtaccatttaaacagtaaaataaattttaaaaaaataacaagatacttcctctataaaaaaaaaacttaacctaggacccctcctagtacaatgaatttgaactatatttgagatttttgggacggagggagtacattaatatgagatatatcaatccataaacatgcaagttcaaattctagatagattttttttatttgtataaatcaaatttgacattgcatgtttgagagatatatttatattatatatcgttaatttttttttaatttttttataactacttagatgatataaaaaaagagataaaaatccatctcctaatatgttctcttgatgttgatgcactgctaaaaaagacatgtacagatcggtactataggtgtcggaacaggtaaaaccggcacctatagtgttttcccacctacaaagggtaaaaatataaaaagcgacacctttaagcgattataggtgttggttctatagaaaaacgacaccaatattataattgtcgttttttttaaatccgacacctataatttatcataggtgccggttaattaaaaaccgacatataatatatgatagtgcccctaaaaaccaagccgaaccgaccgctcgttcttatcctcccgagcgcccgagtggatcaggagaggaggaccgcgtctctctctctctctctctcctcgcgcatgcctctctctctcgcggcgccctcccctccaccagatctggcgggaggagaggcagccgtagcggcgtgtgacagctgtggcaagtggtggcggaaggggaggtggcagcaagggcgacaccctcccctccgccagatccggcgggaagggaggtggcggcgccctccccaacatcagctcaatattggtgtttttagtgttcttagtgttcttggatgttcttaattagtcgggggtgaaggggagcttatcgatggatcgggtcgaggttttgttttattcatggaaccttaaaggtgccagtttcactagaaccgacacatatttcccctccacatcagtgtcgtcttttaggtgtcgattggaaaatccgatatctttgtagggttctcaaccggtatcaattaaggttttcgtggttgtgatgctttgtagctaccaaagttatgcttttggcgagtctattgagctatgatataatataccaatggcgtacgatcaaatcatgttatcattaagctaggttcttaattacttaaggtctggcttatacggctgcttcgtatgtagattccaaatggagacagggctttcatgctgaattaagaaaggtttcttaagactaactatagattctgttgatttaattaatcttgtctatatatgcagaagatcttttcttagaacttccccataaagccatgacctgttcatacttcatacacatcaacgcgcgcactgtaccacacacgtgcccacaacacaagtgttcccactaccactaacatacactccacccatcccagctaaagccttaaaagcttcatcgtcatcacattcgtcccagtctcgaaaagacgcctccggccgagcccagactccgccggagacggggagccggtgcacctaacaaaagatcgatcggcgcgcgatacccctcctgctacactgtgctacttcgtacgttcgcgcagtaactggtccatgtcgatatcccctgtacgtgctgttaacgttgatcgtttgccgcgaacaccctgccagaatttaggatcttgtcaagctccgatcgagcggccaccgtcgcgtctttgtttgcttttagctacgtctttgtttgtttctagctacggagagtctcggaaaagtgtcttgaagaagatattctcttgtttcttaccatgtctaaaatatttatattttttataaaaataataattaacaatatagattattttaaaaatatcacttcacaaatatgcaaattcaaatttaatttctacgagttatattaaaataaaaaatttaaatttaaatatgcgttaactatttttttaatgagttccttttgttaccatttgtacagtttgaccactcatgtttgtaaagtgttatatatcatattaattaatcttatcaatttttttaaaaaatactaattatttagatggtccaagagaaacgagatgtgtcacatctcttaggatgaaaatccttctccaaatgtatctgagagtttcagtagcctcgccgatcgacttgccacaccgccgtactacatgctttgtcgtctgttcgtggcagtatatatattatccccttgctgtgtccgtcgacataagtggagtgtactaggtagacacactagctagctagagtgatccagctagcatggaggcctcagccatggaggaggccctctcgaagaagacgacgagcaagggaggcctcaggaccataccattcatcatctgtaagcgaagcgagcctgcctgcctgcatgcattccatccatctttcaccctgattttgccggcatcatctgcacgccggctttgcacgagacatatgtacgaggctggctggcctggatcgagatgcaagtttggtttactttgtgttgttggtgtcagcgaacgaggtgttcgagaaggtggccacgttcgggctgcacgccaacatgatcctctacctcaccgagaggtaccacatgacggcggccaccggcaccgtcgtgctctacttctggaacgcgctctccaacttcctccccatcttcggcgccgtcctctccgactcctgcctcggccgcttccgcgtcatcgccctcggctccgtcgtcagcctcgccgtaagcacaaacaccaaccaaaccatccatccatccatcggagtttcttgcgcgatgacacgttagacgtgcgtgcgtgcaggggatgtgcctgctgtggctgacggcgatactgccggcggacaggaggacgccggagtgcgaggcgaggcgggatgactgtcagctggtgccgtggcagctgccgctgctgttcgcgtcgttcgttctcatgtcggttgggtcgggtggcatccggccgtgcgcgctggcgttcggggcggaccagctggaccggcgcgacaacagcgcccggaacgtgcgtacgctgcagaccttcttcaactggtactacaccgtgctgggcctctccatcgtgctcgcctccaccgtcatcgtgtacatccagcaggccaaggggtgggtcatcggcttcgccgtgcccgtcgtgctcatgctcaccgcgctcacgctgctcctcctcggctcgcccttctacctcaaggcggaggccgacaggagcgtgctcgtcggcctcgtgcaggtgctcgtcgccagctacaggaagaggaggggtcccttgccgccggag

SEQ ID NO: 7423 - DNA, 25953 bp, Oryza sativa
  unsure (1)..(25953): unsure at all n locations
agccttattactggcatgaaatcagtgagacccctgacacctttatcctgatcagtagtagttaagcctaactggattcattaatctgaacacacaattcagcacatgccggcagagaatttttttcggctatctgcacaattccacgaagtgcaggttcagtaatggcctaccagttgctgctagctggtcatgtggcaagttcttcgccacgattgagccaaccgtgtaaaaagtttcgtatgccaaaacttgttagccatactgatatactatgggtgtgtttagttcacaccaaaattaaaaatttggttaaaattggaacgatattgaatggaaaagctggaagcctgtgtgtaggaaaactccgatgtgataaaaaaattggaagtttgaagacatagtttgaaactaaactcggtctatgttgagtagtagagttctactactttcaattaaggccctgtttagattctaacttttttctccaaacttccaacttttccgtcacatcgaatttttctacacacacaaacttccaacttttccatcacatcgttccaatttctttaaactttcaattttagcatggaactaaacacagcctaagagaacctttcaatcgattcgttcagtcaaaataattttgcagtaagagtagatgatgcggccattacagaaggaaacatttcatctttcattgaaccatactaccaaagcatcagcatcaggtagttccaagttttaggatacaacttacaagaaagatacattcagcaaagtccacaggtgtcatattattgccgccatcatctcttacaaccagattttttttcctctgaaatacaaaatggatttcaagggcacaaatgaagacaatgcaacttctgacgaagtgcaagcacaagaaaggtagatacctgaaaaaaaagatgaatggtcgaatcattatccttttttacaatgataattcatgaagacagaaataattaagcaagaattcagattcacgtctggaattaggtagttaaaagtcacaaaccccacctagtcgcttcaagtgctgcatctcattttgaactgaaggtaccagaaatctagagatgactaaatagtatatgcaattctaaacgtagtagtgcacctgtgcctataaatggagtactagcatatactccttccagtaaaaaatatttgacgtaactcagttctcccaacgtcaactaatattgactggaggggagtaacttggacacaatttgccacacaaaatgcatgacagagtcagaaatagatgctactaattggggttgcaatgcacttgttggacaaacaaaaaggacaggcactgggaggattattttcatgaaagctgtcagattataaatacagtgtgaaacagatactgcaaagcaccggagagcgtcagtacttctggacaagtcagaaatgcaacagaaaacttgtagtccacatgggatactgaattagtcatacaaaataaatcagttaggggcagtttaaaatgtcgaacttccatgcacaaagaggcaacatgggttcttagttgtatggcaaggttatctaaaacttcctagccagaaaatataaggcagcattctctttattctttaatgcatgatatgttgtacaacatagtatcaacactcaaaactacaatagccaagcagctgtaagggaaggtctggataatagtgacccaaatgcaactgagttttctctatacaagaaaactttttccctcttagaaacgtgattttacaagaaaatagtggataaacatttttgttaatgcattttaaaaaatctaccccaggtcacatgttatggtggaacgtatgtatatgcaacggaggcagcctgtggcagaagcagtgaaggtggaaggataagaagcagaatgcgtgtaggaaggttgttacggcttgcaatcaaattaggtttttagttagttaaagatatgagttgttagtagttagtatttcccttcaatcagcagattagttcaatttgtaagcctatatatgggcagttcattcaatcaataaagcaagccaagaaatatctctaaccctagctcgacaccaccatcacggctccagggcggtgaggtgagcagccttgacctccccctgagcatgcctacgcctttcgtagtctagggcctcctcctgctcgcaacatcttggtatctagagaccacggtcatgctcgctgatgctgcgccatgtcgaccgtcaccaacgtcgctggccgacgactggaagacaggacttgctgcggtgatcgaacgcctcaatgccatccacggccagatctcagacctcaacaaccaacaacaagcgcaccacgtcgcaatccagcgcctggaacgggctggcaacgacaacgctccacaccacggtggctgtgacgcagatagcgacagcttcaccctggggcacggaggtgagggatgccacggcgaccgccctccatgctaccacaagcttgactttccaaagttcgatcgtaagggtgacccgattcattttctcaaccgctgcgagcaattttacagggggccgtgtacgctgaaggaagagaaagtgtggctggcgttctaccacctgctcgacggtacccatcaccaccatcactaaccctagcttgacgccaccatcacggctccaggcggcgaggtgagcagcctcgccctcccgtcgagcacgcctatgcccttctagtctagggccccctgctcgcaaacatcacaacatgtcaccgcaataagtacaaattccataaccaatcctaagtcctaaccagctcaggcaacacaatagccctggtccaatcattctaaaccagagtcatttcaggtacctatcttcaccgtgttagcctcaaaattataatacttacaaagtttagctagcaatggctcataattgaatattaatttaatcggtttaatcgtccataaatcccaataagttggaaattcttttcaattttagctattggaaattcttttcaattttagctagcaatggcatatatttccttataatgttgatcgtgcatagatgatagaagtcatagaactcaatagcgggaagtgatccatttcttacccggaatatttggtgactaactattgttttattgtaaaaaaagatcaattgaaatttagaataaaatatatgcttgcatctgcaactagagggaagaacctaaaccagacctcacattacaaggcctaaccatgaaaatagagcagcagcaccgcaaagcttttgatagggaaagaaacttctatgagaacacattgtatgtggtatggactcacaggtgtacatctttatagaatttttttttcctgctgcggcacacacctctgtggctctgttgcgtccagcagaatgtgagtgaacccttgagtcaggtcaaatggccaaattaagttgagtgcactgtgcctgattcatattagctaagcggcagctacactaaggcactgtttgatttagcttaggattattataatctggattattagtagtaagctgaaacaaacagatagcttattttaatagattattacaatctataagccagattactataatctagtaatccactctaaaggtgctttttttagattattgggttgctaacagctaacaaacagcaaataatctagagaaacaaacagctaacagcttattctatgtcggcttattataatccagcttatagtaatctggctcaataatctagattacaataatcttaagctgaaacaaacagggcctaagaacacagatcgttgcactttgcaaacactagctattgcaagcagacatctgatgttgttgctatcagttaagaggaaaacaaaatacttccaaaataagctgatgaatatgaaaccaattttaatttttatctctagatcaaatttgtatcaatataatctctaaagaagctaaccaaatgagatcacaaaatgaaagaaaaagttgctactatattcagaatgcagggagttgtatttctagcaaagaactggtattctgtactaatatccgacaaaatagaacaacccgacagataagtctcattttaattgagatgtcattgagaattgactagttagtcatactccctcctgtcaggatttcagacagccaaatactactaagtgcaagtcattttcactgtctgaaatgacaaattattccatccagaggtagtaacaacatttgaaggcgctatacgcatcaaaaactcaaaagaagattccaccaaatccagtccaaagataaaaacaataggcaaagtaacaaggtcagcatttggtggctcttcttgtttctgctacggactaatgcaaagtgattttgaattttaagaataattttaggtagattttttacttgtcatcttagcaatcatgaaaagagaacaagataataaattgacaatgaaagcccataaaattaaaatcctaataaaatcaaaatgttagaattcaaaatcagcggcagaatcattcattctgattttattacgattctcactgttttgcaagcaaattcaagagccgctacatttgagtaactgttttgcaatctagcaatagttcatttcacagcattttcgttccagtctacatgcatctaaatcatatcctcaatcataaaggaaaacaaatggattcaacggggagattgaaaccgtatgcctgtatggtaacgtttcgcacaactgttttcgtatggcaaatttggcaacacaacgaggagatacggaaccctaggtccgtccaatcctagatctagaaaggtaaagtagcaaaggatttcctcacctcgaccatcacttctggtagccgccgccgacggcgtcgtagtcctcctccacggcggtgttcacgtaaggcacggggaagtccttggcggggtcgaactgcttggcggccatgtagcgctcgaggtcgggcttgcggaggagggtgcggcggacgggcgggcggtcacggcggcggtcgcgcgtgtagtacttgatgtcgtagacggtctcgggctcggaggtgggcacgacggccatcgtgtccttcgtcagggtggccgggcagcggtggcggtactccagggcgcccgggagcgcgctgcggtactcgggggaggcgcacgggccggtgatctcccacggcttcttgaagaacttgcggaaggtctggaacagcgacttgccggcgccggcgccggcggcggaggcggaggcggccatcgggatcggggttggcgtctgcggcgcgacggaggaggagaggagggagatcgaccgatgcgaagaacgcggccgatggatacagcgaggtggagaagatgctggatctcttcgatgcgctacgtggcgcgttctggaccgtctgatcgatgtagaaaggctcaagaagaaaaagcataatcgttcatgaaattcactcgcgtttttttttgcaaaaatataaaggccccaacatttcgcttatttggggataagcgaaactgcatatttgcaaactaaaaatagtttgtaaataaaacttttatatatatgttcttagcgatttaaaagcaaaggctaaaaaataaacttcgataaaaaaacaaatcaactctaaatttaatattgaaaattcaaattttgactagtaagcataagcataaagcgaaaatattgatccataagaatgagaagaagttaggatatcacgtaggtgcgaattatattttactataaagttgatgtccactaacgctcaacatgcaagtgtgtcacatcatcacccacttcactagagtattttaaatcacatgcaagtgtgccacatcatcattcactagcaattattatgagtattttaaatatcatacaaatatgacataacatttacaatcttattgtgtttttagaactcaatatgcaggtggtgttctttttctcctgaagatggagatgaatattaagtttttttaggcaaaacgatgtgatattaacgtataattattgagttttacttcgtaattattataaacttgaaaaataaattaatatgatattttagagcaactttcatatagaaagttttcgcttgaaacgcactgtttagcagtttggaaaacgtgccacgaaaatcttaatcttcatccaactcttgttggagaaaataacgagaccgcaatcaatgtcaaatcattatccccacatcatttttcatacgtatattatttttataatgtataacatgcatttattcacatattccgcgacaaaaacacggggtatcaactagttctatagaaacgtaaaacacatgaattcaaaaagtaacgtgtttggatggttcacataaaaataacaaaggattttggatgtgctttaatagagaagagagacgggaaaagttgcattggacttctcaaagaaatgataaaaagatgattgagttcatgtgcttttttcctattgatctcaaaggaattttgaatgctccttcattcaatcattaatcattcaatctttaccttctttcaggaagatggtccttaacgtttgttgttgtcaatttcttgcaaaacgatgtttcagggaatgtcgttccctcccatgtactctgtttaatatgcaataaaactttatgagttaaaaaaaagaatttggaatgctgcaatcctttgttaaaaagaacatatatagcgataattcatatgaattgctatcatttgaaattcccatgaattttcttcaaatcaaatgagccctcgaatctgcgtgggttcaacaaaaatagctataagaaattttataagaccaataagctttaaatagaatttgatttatataataaaacttattgttaatgttttcatgaatataattatatttcaaataaaatacatggtcgttccataaactttaactgggatgtaaatcggagagtggatctggaaatgccatattgcagtggagagacctaaatacaaaattctgaccatcataaagtgactatttatgatggaccacatgtgacatattaaatcaagattagggatttagttgtatattttataagtctatggatgtctcggtctaagtttatggattattaccgaaatttcttaaaaagtttccttttttactttatatttcttttccatcatctagcttattattgtccatctctcctgtcgaaatgaacaccaccgagaccgtgtttgttctttgatcttagaaactaatcctttccaggaggaaacgtcctgaaggttacaacccaaagcagctaattcatgcgctaccttattacagtttcgtgggcagtaattaatagagaaagaataaaaacagctagcaatcacatgcttgatctcaaggattactccacccatcactgataagttgaaagagttactctggagtgcattgcacagcatcagggaatctgtttccagttcaactcgcgccatacccttctcctttgccgttctgatagccacagcactgggatggaacgactggtgaccagtgatttagctggatcagttatataaagtttcggtttccctaaaaaaaaaaagaaactaatcccttccgcatgtaaaacgagcaccggcaacggccatcgctctatccaacatgtcagccagcgtatagcacgaatattgttcgcccatccaaaatcctcggaaaacccgccgtaatcccacgaatattccgtccacaaggctggaaccaggtataacaagcggaacgcctccagtgtcgcggacaggtgggtccatgtcccagcatcgcggaggtgtgtccctacatgtcagtgacgggtaggtgtcgctaccgtgtcgtggaaggtcattattggttgggatagcgtagcgtgcttggtaagggtgaggaaataatggcgtgacgaaaagaaaaaaaaaagcaggagtggagaggagaatccgccgctgcgccgtcttcttctccattgaagccaagctcccccaggccttctcgttctccccctcctcctcgagctctcgctggtgcggggagcgaagtggagaggagaggccgagagggacgagagatcgagagggagagggagcaccgaagcagcgggcggcagcatgcggccttcgctccgtaagtgtcccctcctctctctcctccccgatcgatccgccggttttctccgattcaccggaaacagatcgtctctctcttttggtcattttgccggccccttgggtgattttgcatttgcgattggttgtgaaatctttcgatctgttgcattcgaaaggcctggcacaagaatggcgcttcttcaggtgggttgtttgtcttcttgacacggagttagaggcaatggttgctgtttgttgaggcaagaaccgtgaaattatgcaaaagtgagctgtagtaaccaacgaacttgcttctgaattgcttagcggtagctcttacgacttaagttggtacggagtagtagactactactacgaacttacgagtgattctgtatctctgtgccagttgatccgatcaagttggtacggagtagtagactactactagtacttttccgggtgtgaatatttatttatttttggttatgactaggtgaaaggaatatagtaacatggagttgagatatcttctatatttagcgcagctgctcctacaagtggaattgtggattgatcggtctaactagaccaatatattagcaattgtttgccatggaactgagtaaatgatggcttggttaggcaaatttgaccaacattctgctatttttatactggagccctggaggcgggaaattcttatagagttgttagttgttatctaattttgtcatttgatatgtgctcctacattatctagtactaggttgagtttttgtgggataagggagtagagaacaacttaggtgtgacgtatgttgttccgaatgagtattagaaactttcagattcagtcccatgaattctaatcttggaacacagggggtgtttagatccatgggtgtaaagttttggcgtgtcacatcggatatacagacacacatttgaagtattaaacgtagtctaataacaaaacaaattacagattccgcttgtaaactgcgagacgaatttattaagcttaagtaatccgtcattagcaaatgtttactgtagcaccacattgtcaaatcatggagcaattaggcttaaaagattcgtctcgcaatttacacgcaatctgtgtaattagttatttttttcgtttatatttaatactccatgcatgtgtccaaacattcaatgtgacagggtaaaaaattttgccaggggatctaaacaggcccacaatgcaatagcatggaaattgacacaaaataaaaggcgatgatttttcttcttttggacaaaaaggaatctttccttttcctttgtccaaaaaagaaatctttcattggccgtattcatagcctggatgtgcacgtacaattgttcttagatatataatgaagaaacagaaaccagtgagagcagctcaataattttctagttcatcttatattctccatgtagcatccaacctgaaaaccatacgattactgcagcacttgtttccagcaatagaccatattcgtgagcagatgatgacatctttgcgctgtaagctatttttgtaggagtatttgtcttaaaaagttatatttggtaatgtgtctgaatctatccatttttaaccttgagttcaggtttctgcagtacacgatcccttaaaacaaaattaaatggttaacaatttaattactggtattcagaggactctgtgacttttgtacttatcactgatggtaaattgagaacacttaccttttcctggatagaatctctgctttgaccagataactttcttataacatgttaaggcatggtatcacatatacacattgaaaaatattcctgagataaccaaacatggttactaatgaaaagtttgggaattagttgaatttatagtcttattgtgttgacctttttaatatgtttgtatttgcattctgcacatgagcttggtcctgtatttatttgtcttgtcatcattggcaggtactatctattttcttcttttgctacttccacatgtggttttttctagaccactctttccactaccaagcaagagtaatggaatagagaagagacccttacaaacttttcgaccatataacattgctcaccgtggctcaaatggggaaattcctgaggaaacagctgctgcttacctggtacaactcagagatatgctacatgtactcctttttaaaagaagacaatggtggcggtgaatcagataccccacttcttccgcatccattttctatgaacttcctagttcttcaatattacttgatagtccttcaaaaatcaacatattgctatcttttgtttggtcttcacaatataacacaagaggtctaagatgactaaattttcacactatgtatacaagctaattttacaattataattgtgtgaacaatttcaattattcgtcgttacaaacatttgaatggtgcatatataaaaaaaagcattatttgttttgaacaatattaggccatgttgcttcatttttattcatagcagaagtataggcatttagtaatacaaaacacttcatgctattctatttgcatggaatgcaatagcctatgtttacgattgcaaatttattggatttgattccaatatgtttctatcctgcaatatttcaccattggaaaaagaataggaccatataaataatagagcactaaataatatttatctttcgcagagggctattgaagaaggtgcggattttatagaaacggacatccttgctagcaaagatggggccttgatctgctttcatgatgtaacactggatgctacaactgacgttgccagccgcaaggagttttccaatagaagaagaacctacgaggtggaatggttcaacgctactggctggtttgtaggtttgcacattacaaccaaacctaattccatccctcgttcttgtaaatgtttgcagcatcaaaagtcagaaataggaactaattgtgcatgccatttgattatttcttgagaccttagcttgaacttattacagttgaaagtagtgcatgcaagattttcttaaaatcattacctgtagtgttatgcctgcattagcaactggtattgtgccattttcagataatgccataaactatctggtgtttgctactccctccattttaaaattacttgtcgttttaggcttttagctttgtcctaagtcaaacatttgtatctttgatcatcaatttctaaaaatttgtaagtttaacatcgtaagatttgtgtttttagatccaccatgagaaatattttcatatataatttatttgttgttaaactagttgaatttctaaaatttgatggtcaaagatagaagtgtttgacttaggacaaagttagaatgacaactagggagtagcatgattggcataggaaacatgtatatcatcttatctttgtgattcacaagggagaatatatccatatttatttcttccacttactttttctccctttattttatgtttgtcatatcctttcctttttctaaattagttaaaggttatactggttgatatatgtttttaaactgcatattgctagggtgggactgatgaggatgataaacctgtgaagctatatctttttgattattcatcctaaatatacatgtgttgatatgcagtggacttcacacttgaggaacttaaaacactgaaagtcaatcagcgatacccattcagagaccaacaatacaatggtatgcggtcatataccctttgagtatcttttttcttttgtatctctttgtattatcatgattgtcagacacaatatcattactctcttctataggtcatgttgttataattttaaagatcattcacgtgcattctttttattgataatgcgatactgctgggcttcatctttaccagtctttctacagatgtggaagttaactgccaatgtttgtaagagtgcacattctggtggcatataattgtgaataaaggattaacactattttttttctatctgatggtgcaggcaagttttcaattatcacatttgaagaattcatttctattgccttggatgcaagcagaactgtcggaatatacccagagatgaaagatccagtttttatcaacaagcatgtaaggtcccccatcctcaagaagcaacatttaaaattcacatcattgtcaagtgttttccagcacaaatttgtgcttacatgttatgcagaaattttctgtgaaatgattttaatatgtctagctgcatacctttgcaggttaatcaaataattataatatgaatcatgtggactttaatgtattgctttgaatttcatgttttagttctgttatttttaagagaataggtaattgcattacccggctttgcaagaaaaccaaaggaacaaacatagtgttttacacatgaacagcaaaagaaaacatgttttagttctgtcaagaatttctttttgtcataaatcttgagttaatatttaatgctatttttctgtctgcaagaatatatattgcatgtgaataatgacgcagcagcagctgatatgccttttacctcaaaatactttaatttggtttagataaggtttacaattcacaaaaaaaaactttattcataacaaatttccagtttcggatgtgccataagtgaggaattttgtattctactcttgataggtcaagtgggatggtgggaagaagtttgaggacaaatttgtggataccttactgaagtatggatataaaggccaatatatgtcagaaaattggctgaagcagccgttgtttatacaatcttttgctcctacttcccttgtacatgcatcaaagttgacagactctcccaagatattcctgattgacgatttctcagtgagaacacaagatacaaaccaggtactaatcttgttaataaaatgtttcatatccattgacttctttctttattctggaaaaggttgatatccattggtttcaatgttacaaaaatataatgaatctggctggataatctacatctgaatgcatataacatatgtttttttctgatgcagtcatactgggacatcacttctgatgactacctagcatatattagtaactatgttgttggccttggtccatggaaagatacggttgttccagcagccaaaaactatacgatggcaccgactgatcttgttgcaagagcacatgctcataatcttcaggtatggtatttgtttatattctttacagttacctggaatagcatgtttccatgagctattgcctacttgtgatataatccgtacaagatgcgataagttttatgcattaatttccatacttcagggttcataacaccttcagcatattttatgtttaaatctattacggttgatttgaataacgagaagaatggaaacattatcgtcattgtccactttttggtctcatgtgtcatgcaatgagtattgcacattgagtaactgaatgatttgaacaaaatgcatagcatgtctttaaatttcacatgactctttgtacatcattaaggtgcattaactttctgctgtannnnnnnnnnnnnnnnnnnnnnnnnnnnnnnnnttatgttgccttttgttggcccataacatgcatacttcatgacaaaattggcaggtaattttgtatctagataattaaactcttgctgtcattgcaggtacacccgtacacatacaggaacgagaaccaattcctgcacctcaacttccatcaggacccttatgctgagtatgatttctggataaacagcatgggggtcgatggattgttcactgatttcactggatccctgcaccgttaccaggaactggtagctccacatgcgaaggatgaaactgcaaacagcctcctagtaaaaattgctcaaatgatctcccaatatgaaggtttctgatcatgttttccatttttccgttaatcgacatgcttatatacacgcattagtgatcaagggtgaccttgaatgttacagaacaaaaaaaaaaagaaaaaaatacttgttttctggtggctagcagttagaacggattgtagacacctctataactataaatccctgaattgcggggagaaatttctacagttgtaataattgtctttaaaacagttgtatctgattagttccttgaaacaaagttcattgatgggtacattgagatggagctgtttggacaagttgtcaggaactcaggatgtgtgcatacctaccagtgcagatgtgaaaagcaacaacaggaagttggaattggtattgagagttgaaatgcaaactggaaatcagtaatgacagtgaacacagctgacctctgctataataaatagtcgtctccggtctgccacttgtgcagtggcggagaccggagtgatcaggcagccgatgtgtggtcggtagtcgcatttcaagtccctttctgttctcactggaagggaaccaagtcttctccttttgataactggtacaactcaccaatctcaatgcagatggtagtgagtaaagaagagccatgaaggataaggcattcagctaaagcttttgaagggaagatttcaggccacacaacttgagcagaggaaggatggaagcggcggcggctgcctccaccggcgaacttttgacaggtaaccgcagctctacccactcctgtcctctgtcaaaagctacgagaatgccatgatgcaacactttgatcttcttcgttgtgacccgggtcagtttgatagtactagattagtagattgtgctgtgagctccagtgttaggtgataagatttctgagaattttttttattagtatcttgaattggtcatctaatcaacttctagagaaggaatatgttcatggcaatagaatattgagttctagggacgacgactttgaaggataacgtgccaagtgcagccaatatttcttttctttctcacaccccctttgaccaggacaatctagctaaacaaaaccaatatgctccagtcctgcagttcaagtagaacatgactgcataaactacatgtcttggaatttggaacagcaaccactaactaaagttcagtcctagagtctttaccaaactactactactactactactactaaaaactcttactgaaaaatatcatgggtacacacctcacggtataatagtaaatactgaaatatcttggaaaaagcttgctcttttctccccaactttagcaccggcgccccatgcatcagtctatctttgaatcgaacaaccttttgaaaagaaaaaaaaaatcaactcccatgtcttcttttattatttttgataacgacttccatatcaaatgctcccgagcttttccaccaacagtcaaaagcgtcttgctgttacagttgctgctactactccttcagttcagtcgcctgcactgcctaccactaccgaaatcttgcaattttcagtgtcaaaagcttgttccctccaatacaggcaaaataatttcagtgtcaaaagcttgttccttccaatacaggcaaaagttcagcgcctctaccccacaagaggcgatcgcgagacactacgctctgctgctgcgcgcatcgccagcagaaaatcgcagcatttgcaggctctcgcatcattttcagtcgccacgtgatccaggtaaagtcgtcagtctcactgcggctaccggccgccggccggtgaaccaccgtagcggtcagcgtgggggctcatcgatctcaccggcgaactgcttggtttttgtgtgtgtgtgcgtgtgtgtttcaggtggtggtcgtctgcgcggctcggcggaggagggcggacatccagtcggagacgtacgtgctgatggagccaggggaggaggaggagttcgtgagcaaggaggagctggagggcaggctgagggggtggctggagcggtggcccggcggcgagctgccgccggacctcgcgaggttcgacaccgtcgacgacgccgtgtcgtacctcgtccggtccgtctgcgagctggagatcgacggcgaggtcggctccgtgcagtggtaccaggttcagctggagtagagtggttcttgtgtggaatggaatgaacgcgcgatcgacgtggagtgatagtttatacacgtacgtagtaatcttcaacgcgacaccatttatctttttcagatttagaattctacggaaccgatactctactctgaaaagtaagaattttacagagactaaaattcaacccgtgcgaaattcctgtagaattcattcgtccagaaaaaaaaaggggcacattgtgtcattgtccctcgtagcgtaaatgatgtccctcgtcgttctctcgtgtcacaattcttttctgtttacttcatataatctgctctacgtttctagaaatatgttttcttatactccctctattactatataattatcaccatcgattaaaaattgttgtaattttgacctttagtaatttttaaatgtttagattataacgaacgaaacttaaatacttatgtttaatatgtacccgatacacttcaataagggagcatctatttatcagtttagaaagtattttaaaaagataaatagtcaaaatttcaatataatacttcgataagtttcttggagcactttcaacttgctctgagttagggtgtgtttagttcatattaaaattagaagtttgattgaaaatggaatgatgtgacggaaaaactgaaagtttatgtgtatgaaagtttcgatgtgatgaaaaatttgaaagtttgaagaaaaagttgggaactaaaccaggtcttagtactaatttgctaaatttattttttatatttaatttattttataaacgataaataatctaggataatcatccgtttgaaaagctagtttggtttatacacctgcagtctacagaaagtctagccatgctaaaagcagtcacggtcagccgtcagcgcaagccaagtgctgtaccctgtacgaaagcacgctctcctctctcccgtctcaccattccacaggtcgccgcaacccgcaacaaacgagctgcagtgcagtgcaactgtggaaggctgcaactgcaagaaaaaaggggaaaaaaaaaagaaagaaagaacggaagagaaggccgccggccgtcagaacaggaacgggaacggaacggtcagcggccctttcaacgggagaccccggcagcacggcatccgttcccgttcccttttattcagtcccgtcctttccattgaccgtccacatcctcccccctcctccacccgctgccacaccatccgtcgccgtcgccgtcgccccgctcgccctcgggttgacttgactcctcctcctcctcgtcctctctctgtagttgtacatacacctccccgccctccgcctcaccactccatttccgtcttcttcctcctctctatctctctcctcttggatttgtcaggttctttaccacggcggtttgatcggatccccaatcctgggttccggtggctctcgagcacagcggcggtcgggaccggcgaagaagcggcttttcgctgcggagggagtgcggtgagtcgtcttctcctccctttactgctcttgcttagtagtataggggggcttcagggcttaacaccttttttggtatgtgtatttctgtgtttgttaatttctggcccggttagaactggagctctgatgatggaggtgggctgtttctggcatgagttttttttttcgttctgagagcttgatgtgttagatgatgagctgggtttaaaaatttcttgggagtatgagatttcttgattggagataggcaaaaacgtgcaaagaatggtggaggtgtttctttttgttattgtttttgggcctaatcgagtaattactgaactatggaagaactaagtctgtgtaatagccatcgagtaaaaaaaatactgtaatatatataaaaagtaatcttttgtggacaaaaattgaaaaaaaggcgattgcgacttgattttatggtaacctcaactcttatggagatttaagaagttgttttgtaataaatatagtactaattgcatctgtatttgttgttcaattggaacagctgaacaagttctatcaaataagtttttactctttgaagttgtttggttttggtgtaagaagtggcaagatgtgctcttactatgagccttcgtggtatcttatctaatcaaatccagctagataatacatgttcagacattcaacatatgtactggagcttatttattccacaatccaagatatatataccggaacttttctattgtctttttttctacaaaatcaaagaaaaaggagaattggctgggtaatgaaaagctttgggaaaaggagaatcgatcttcaaccatgatgtgacttccacagtgtaattctttctgtttccacgtttgcttgcatattgttatgcttaattttttgaaactcatgtttcattttcatgactttattttatacttgcatctcaaattctcaagatattcttgtgagtcgtgaatcattgctgtattcatctttgaacgttagcttttctgtatttccaaactccaaagtggaatgatgttgacttgctcttttgtttgaacatgtgaagcagggaagaaaatcacctccactgattttatagaagacgttgaatatatagtctacaaaatgatggctgctgagttaattaagcagttttcaaacatcaccctgtgagaagaacaggagttatgtgatattgagcatgcactcaaggcactgcggaagaagattcttactttggattttgaaaattccatgcgtgttcatgatccgcaaaactcatttcagtacttggaagtgctgtacaaaattcggcagctgactgaaaggttagggagcttacaccctgttggggaagccaaagagcataatgagctcatagtatatgctggcgacctttttgatatggcaatggcaaggcttgaagaggaatttgtttatcttcttacgcattacaaacaaccaatagaacaaggacttgtttctttccggtctacagaggatggcagtgtggatgatttttcaagcagctcattcaatgaggaacaatgtgacggtaagacaacacagactgaaactactggaggatcagaatattttgcgactgatttgattcaacatggtgcactctctgctgtcaagtccattgccaacttcatgtttctgagtgaatatgataaggagtgttcccaggcttacataagcacacgacagagtgcagtagatgagaaccttgggtctcttcgtattgacaagctcagcatggaagaacttttgagcaccaactggaccaagttaagttcattgataaagaggtggaatcgtgcaatgaaggtctttgtccaagtctaccttacaagtgagaagcgccttagcaatcatgtctttggtgaactttcagaatcaaccgcagacttgtgtttttatgagatttcattgagctcagtcatgcaacttctgaccttttatgaatctgtagcaattggacctcctaaaccagaaaagcttttccgtctgcttgatatgtatgaggtcttaaatgatttactccctgaagtagaattcttgtttcaagaaggatgtgatgatatagttttgactgaatataatgaagtcctgctacagctgggagaatcagtaagaaaaacaattacagaattcaagtatgctgtccagtcctacacttcatccaatgcaatggcccgtggtgaagtgcatccccttacaaagtatgttatgaactatataaaagctctcacagcttatagcaaaactcttgattcgcttctaaaggacacagatcgaagatgccagcatttctccactgacattcagtctatggcaaaccaatgtcctcattttactgtcagtgcattgcatttgcagtcagttactgcaattctagaagaaaatcttgaagctgggtccagattatatagagatgatcgattacgaaacatctttatgatgaacaacatctactacatggtccagaaagtgaaaaactcagagcttaaaatctttcttggtgatgactggatccgggtgcacaatcggaagtttcagcagcaagcgatgagctacgagagggcatcgtggagtcatgttctctcttttctgagtgatgatggcttgtgtgctgctggggatggtgcttctcgtaaaatcattaaagagaaattcaaaaatttcaatctgtcatttgaagatgcttatcgaactcaaacaggatggtctatcccagatgaccaactccgtgaagatgtcaggatttcgatatccctgaaaattatacaggcctatcgtactttcacgggacgatactatagccgccttgatggcactaggcacctagagcgatacataaagtataagcctgaggatttggagaaacttttgctcgatctttttgaaggagctcaaaaaacattgtagcttgcagagtgtagaacttaaaacacagttattcttgatgaaatgtgcagttgtaatatttggtttgtattaagtaaaatggtatagttggtgattatttttatatgctgttttcctgaagttaaccagttcaattttccctgctgcttgaagtatttcataactatctgaattacagaggatgattatgccttagtaatctaatatggagttttttttttgctacaactgttcttttaacaatcttataagcaaatgtgtaattttctgaacattagtgtgctgctgctgacccggtgatcagattgtatgcactcttcactgtacctgtccagaattaaacgtttgaatcattcaaatgataaatggcatcacagttcttacaatagcttttaaaaacagaaacagtcaagctcctatccacctatatttttgcagcagccatgctttgtcctaaaaaaatgaacccttttaagtaattttattcctggatcatggttgaattactttgcaattagacaagaaaagaagaagaaaaaaaatgttaaggaatcaagaacaaaccccatacacctatggccacctctaccaaaattcaggcctgcatgggatcttattctagccgggcgggtcagccggcgcgcttctcgtcgatgtccttcttgaggtcggagggcggcaggaagtagtcggtggtgagaccgtacaggttgaagtcggcctcctccaccgtccacgtctcctccagcttccgcttgtggttgacggagccctcgccgtagcggaagagcgtgacggcggtgtggccgccgtgggcgatgttgatgccatcgatgtggcggtagtcggagatggtggactccatggtggtctcccagaagatgttctcgctgcggcgggcgcccttgccggacttcatgcggaggaggtgcgagtcctccaactggatgagcaggcccgtgcgctggctgaagtagccccacaccgtgtggtggatgatgtcgaacgccgccgcgctccgggcgcgcagcgtcgccgcgctcgcctccagcttcaggatgaagcactcctccccggtgatgatcttctcgccgatgcacaccgcgtcggagaacaggttcgcgattcgacctcgggtccagcccctgcatcgtgatatcgaagctcgttgagagggagggaagcggcggcgcggcggcgagcaaagtgcgatcgacctggagggagcggcggagggggcggggagggcccgggaggcgtgggagttctcggcggcggactggcgccaggcgaccttgccgtcgctgccggcgctcatcttgtggccggccatgatgagctcgaagtaccagacctcggggcacttctgccagagcacgaacccgccgacctcggcgcggccctgcgcggcggtcacgttctggtcgccgaggtggaactccgacgcgcacatccgcacctttcccacggcgtacatgctctgcagcccctgcaacgccgcctgcccgcccgtcgccgcgatgtactgctgcatgatgtacttggccgtcgacgcttgctgaccacacacgcgcgcacacacacgaggagggggatgaacgcgtcaagacccacccggcagcggagcatgcatggacgcgcgcgcgcgcgacgcgggcaggggagcggtggcttacgatggaggagtcgcggatggagcggctgaaggcgcggtcgtgggggacggggcaggggatgagcggcgagccgacgacgttgaggaagagctggagctcggcggttgcgttggcggggccgccgacggtggcgcggtcgaacgcctggttcttgagccacgcgcgcatgttggcgccgccggcgccgcggcgcttgtcggtgcctggcgcgttgatgagcatctcatcggggatgggcacctccagcacggtgtccagcgagtcgtcgcggtccaggttcgggcacagcttcctcatcgcacgcacgcccaccaccgccacgccgcgccgcgcatcaacgccgatctcgccacgaagagaacacccgcgcgcgcagccgccagagctctcgcccaaacaacgcgcgcaagacgcacacagatcaagagagggagagagaaacgaggggagagaaagagcgagaagagaggccggggacgtggagaagaagaagaagcatgcggccatgcatagcattgggagcgaggaataagtggatcgcggcgagtccggaggtggctcgtgctctcgacacgcggagctcggacatggcgacccggcagcgacgacgcggggtttccccacgctttcatcgcgcgaaaaacaccagcagacgagtacacgacttgggttcatgggccggtccagcaaaaaaaagcccactaactttctgctcgggagtggttcggcccaacttgtgccctgaaattgggctggaccaaatctgctcgaacctagttagtatgatctctccttttgaaatgatttcactgtaatttcaaggcatttacttgagtactgagtaggaaattcaataatatcagtgagaatgtgctgacactagcacgataacatactaaacatgccatgatgcaaacggccagttcactgggcactggtacaacaggtgtaaacacccaggacctgcagttctggtaaagaaaaagaacaggccgcgacaagctccaaagcagaaaaggaaagccaaatctccattctcccacagtatgctgcttcagttcacgttactttccggccaaattactacgccaaaagaaaattagagagcagcatggaggcaatgcacgtgaggagaagatgacgtccaagggacggggacggtgcttcgctgctgtcaggattcaaggcgctagtcgtcggcccagacgcgccgccgccgatcggcgtagcgaaggtccctcccatgatcggcgtacccgtggctgcagttgaagagcccggggaagaagtgctcgtgctcgtgctcgtgcttgtaccggtgcctgtgcctgcacccgccgtgccggttccggtgcttgtccctgcagcactgcacaagaacatgtgaaaaggaaaatgcttcagttcatgaatcatgggttcatcttccaagcacagatgctaattttattcagtttgagtttggccattgaaagttgaaggttaatcaccttgcggttgcagggtatttgcaggttcctgagcctgcacaacataaacagaataatatcgtgttaagtaaacacatcgaagatcaaaggtactagcagagttgaggtgagaaacgtactggggtcggtggaggagagggtggcggcgccgccgaagtcgcaggtggcgcccttggcctgggaattccgctggaagtagctgttggcggcgtaggagcagtgcgccgccacgttgtttgggctgtagcacgacccgctcggcgtcaccggggcgcagtccgcgccgtgcccgcacgcgtagtccagcgccttctgcagcgccgcctccgccacgttcggcctgcacacgcaccacgccccctttgcacaccgcacgcgcgcgtcgtgtgagctcggcccgtgacaacgatatacccgctacgtagctagccatttcgatcgctcactcacctgatcctttcagcgacatgccgagcaagagcagcagcagcagcagaagccgagtcgccattgctcctctgctcaccacgcgtgtacgttctgcacttctgcctctgcccctagctcggcgaatcgtcgatgctgctggtttgggtgtaactgcgctgctggttgtaggagtagttggctagcttctcattctctttatttattggcgaaaacggcaagtcaccactcaccgacgggctggtccgattctatcgcgctttccgaccattccgcgagctgtcgcctttgcgcgtagctgctgccccggccgcgcgacgaacggcgctgtttaggccgggtttgcgagccggcgtcgcccaaagtaaaggcatgcaattgcaaagtcgcgagctgcaaagccgtcacctgtgtgctgtgccgtgctctggcagctttgctgtacttgtgttcttcgtggtggacagtgagtggtagtgcttaccagataatcttgagctttttcccccctcctttttttttttcgaaaagcaaagttatgtatacacacagtatggtatatagtagcacattcttttgaagaaaaaggaaaaggttagggagttaacatgtatcctgcacatgctgggataaattgaacgtccgcgtgtgatgtctgtcaatcatcactcatcagctgttctatctgtattttcagctcaggctgctttgcactactacattcggggactgctaatttccagcagatgcacaaagtgacaaaaccaagatcgagaaattgatggaggaacactaattggtttatcagttctcaaccaagtcagaactcagaagtcaccaggcctgttcatgtggcaaatatctccaacataagaatcatgtacttccttcgtcccataatgttgcaacctaagatgggatgagacccatcctagaactacgaatctggacatgtctccataatgttgcaacctaggatgggatgagtctcatcccattctaggttgcaacattatgggacggagggagtagtatattgtaacacatgaaaaatctcttcccccttgttctagattatctaattccacaacaaacaaacgcacacaattgcttgcactttcactttgttaagttaaagcccgatgatattctgtaaactccagaattgtatcaattttaacttcataaacatgatcaacgaatcgacgaatgaaaaattaccaagggctaggtgactaaaagcagaatttattataaggttctcaagagcgaaggccagagcacaagaatgctcatagcagtacaagacttaggttggatcatatgcagcataacaacacaatcctgattgcttgaacattcaacatccaggacacacataataacacaaatccttaaacgagcaaccaactgggcacacctcagcttattctgtggaccatggacgacaaacctgtgcctagaacaactaccttaagcaggaggcttcatcagtgaagccaccttctgggaagacggccttgccatcaggtcagtccaccaggccttcacatgcgggtatgcgtccaacacggatgcgtggggagtagcccccaagcatacagtgccagccacatggcttaggtccgcgacactgatgtagtctcca

SEQ ID NO: 7424 - DNA, 45511 bp, Oryza sativa
  unsure (1)..(45511): unsure at all n locations
ccccacgacctcacctcctcatcaaacacccccacacgcacgcggctgcggcggcggcggcggcgagcagaagaggaaacaaacagctcaccacgtcgtcgcgatccaatccaatcccaactctcctcagctccagacaagcccggtctttatacactcccctatgattaccaccacctcacccaaaaaaaaaaattaaaaaattaaaattccaacctttccttttcctcctctcctccagctggagagcaagtacaggacgacggcctttacgctgctgctcgaagcttaatcaactaatccgccggagcattccaattaaattaagccaagaacacagtccctccctcgctctcgggatcgggggccaattggcgactcgatatgcttcggcttcttggcgggtaactacgactacggctccatttaagcaagctgataaacgcggcttaatcaaagattcaaggagagcagggaagcaggcagcgagtgcaacgggacacgtgaggtgcgggctagcacgtcggggggaggctgattgattcgttgcgtggagccgagccggccgggcgctgtcggtggcgaccggattggttggggtccccgcgggggttggtctcgttactgctctgccaccacgttgccccgcccccttgctgctgctcaccaccattgctcatcctaccacaggctaccacttcatcatcaagattttagcacagctactgctactcatttgatttactagtttagtactgtagtttgttttcgttgatccaaatcaactctgtttctttcagcaatgcaaatcagtgttcagtgaatggattggatgatcaccgaattttacagcgcatcatcggtcataattgatgcaagcagagtgattctaacagatagagagcaaaattgcaggcaaattaaagccagtgaaccagtgacttctgagaatgttcttcaggttttttttttttctgttgcaaaccggacagtggttaatactgtagtatgttctcccctacataacgatactaacaaacgttaaaaaaaatgttggaaaaaagaaccaacttgggaaatctgacgtgcccaccacacacactgctccaaccgtttactagccagcacttataccgacaccaaaacacgtagtaggaggcacagtacaagtggattattactcgcatcatcagtggtgcgtgcagcaatgtgacgtttttagaatgtgatttcttccagctgccatctgtctgaatctatagggttgtactactcagtacataagcattttctctgttctaaaacgaaacgacctaatattataaatccgaatacaatatagcagtttagtattgtattagaaacaacgtagcactacgaatctggacataatatagcaacgtaccatattagacaccccataatactatgatatatgtccagattcaaagtactacgttgtgttctagtacaatgaatatagacacaatatagctagctagtactcgattagacataatatgtccaaattcgtagtaggctacatctaattcattattaagttgctatattttaaaacggatagagtatgtttcaaggccccagaaataattggcataataattaatgaggtagagatagaaggtaacaaaataaggaaaggaaatgccaaacttacataaaaatatcatgaaatgaaatgccaagcttttgacaggaaaggcaaaaaaataataataaatgtataaatatatgtaatgtagaataactcaggaaaggaaatgccaagcttttgataggaaaggcaaaacaattaataaatgtaaaaatatatgtaaggtaaaattttcagaaaaggaaatgcctaactttttacagaaaggcaaacaaaacaggacagaaagctgaagctggtaagacaacagaaaactccccaaattaacttttcataatatatatatagacagagatggaagtataaaaaaaattatgtgaggtctggtccgagcagaagaggaataacaatctgaagagatccagtcagaagaaaacaagatcaaacaaaggatccgccccgtacttgtttttcagcgaaattatttgagagagaagaagcactggaggggagattagatctagctatgctggccagtggccacttgggtttgcttggagattgcatgattatatatgatcaaaatggttaaggaatttatagaagatatatagtgggatcatgtttggtaggatatatgtgcaaaaaacatcgccttttttagtcaaacttagattgcacattgctggattcatgtggcacggttactgaatgtttgaggccttccatatattgtatactacagcttacagactgcgtgtagacttcatattccctatgcaaattaagcagataagtttttttttcacctttttcagaacaatccattgtctgctccttcagagctgttgctagacacctgcagttacgtagaagtcaaaagattaatactgtccaaaaaagaaatgttttcaatacagaaagctatgctcttctggttgccaaagtcatattcttatagtattatgtttgtagtattattttttaaaaaaaaaaactgaccctgcaaaactcaaaataactttcaagaaacacattctgctgtcttgctgagaagcagtggacacacattctattcttgctatcaaactcgtatggctgcatcattctctctctctctcttctgaagaaagcattgtcaggacggaacatctgaagaaaggaggaagcagagaccacccatgaaagacagaacacatgatcagaacccaaagccaatatagaaacaaaccaagatcagatctgaaactgctcaacttgcctcaggtagggacaagtttcgtttgcatgccccatttacgacatccatccatgataactgatgaaagagaaaaaaaataagaaaagaaaagggcaattggcaatgccaatcgaatctctacgcaggctacagaacctggcaagcttgcgctgttagttactccttcctaagctgcacttgctaattactgatactagtaagcaatttgcttctactgaagtggtgtgatggcccccctctcttttcagtatttctgtttgttgatgcatcaagttggccgttgtgacatgtactgcactgacatggctgaaatggaatacgatggcaagaggcaatttcctaccccgcgttgcatctgagtaactggggcgaatgtttgttgtgtttctcatatggagtgctattaataaagattcagtaaatccccatttactaccatcatgtcaccattgggtcagtaaatcctgagaaataatgctgatcgtaccatgctaccgcatcatcggttgtactagagtatatgcccacgcgattcacatgaagattaaaaataacctcattgattaacccttctcatttctcaagatatccaggtgtggtctcccctcttctttagctatttcttcagagttcagagttcaggttgtagggtagatcttttttccccactctatctatcacatggtgattaaagataaccttgattaacccttctcatttctcaagatattaacttctttgatggcttggtttgctcacttcactgacagatccagcgttgagcatctcagagatggcaagaacacacgcatcgcatcgaatcacacaggagggcagcgtcgtcagattcagatgtgctcacgttcaatgctgctgcctgctgtaccttagcttggatgcagcgatgcaggcagcgagggtccagccattattaactcctattgctacaatactactggtagtaccacgcacgagtaggagaatcataagctactacgatgctgcttgttatttaatttaatccgttcttgtgctgccattgccggggaggacgtaaggaatcattccaatctgcatctcgatcgatccatcacccatgccgccttgctctgattgattcctccttttcaatccgtgcaatgcaatagtagcattacttacacgctgcacaagcatgaaaaggctgtagtttttcgtgtggaaatttaccgggagtagttcagttcctacgaaaatactctaaaattcctccaaaagggagtcttaaatttcaggttatcagatctcgatggttttagatgtgccgtataagtaagtctgtcgctgccaacctgatgatatactacaggctgcctgacagccgacattgtcattcagtctgtcaaccagcaaaataattcgctgcacaaccgggcaacggaaacttcactgcaataggagtcctaaattagtatactagccacagtgtgttcatcccaagaatcggggagtgttgttgctgcgccacgaatgactaacagctgattgtttatgtgttaatcgtggcgatttgtaagttggtcgcagacttgcgtatcgtgatgagaggcgagcatgggaaaaaggatggaattaacaaatcgatcgcatcgttgtaacggcaaatccagcaggagctccagcatgatcagcgtacgtgcttttgagttcaggcgcacatctttatgtaaataatttgcattaggtcgctcatcaatgtcattcgtgctagtagtatttgtttgagtttgactaaacttcaggttttgttttagacgcagacgaccactaatgattttccgtcgtggggtgcactaatagaacgtctgaacgttttctgcgtgcttagacgagttcacattgaccatcaatttagtactaaaaaattagcagaatatttagcagggtttgtactacttaactacttattgaaatagagttttatttgctataaatctttcgtattgatctgtaaagacaaaataacatagttgtaacagcgtcctaataaatacttcctaatcaatttacccaaagtaggtgggaatgaaatgggaagcttggcaaagggtaatcaatttcatgaacaatcattttctgatataatgaaacagacatcctcattaatcttcagttgaaacagacatcctgaaacatggacccgacactgagaaatttggcacggccttacttataacataacggtatttaagccaataagacgaatcaaatgaatatcaaaccatctacgttaactttgcttccacttcgcacaacagcaagaggttaccagggcgcccccatcattttttacacaaccactttacaagtcgaagaagcaacagaggcaagaagatggaaaacacagtggaggattcagctcagcagcggcttccaaaactgccgctgctcacaataccacatgcacacacaactagacacaaaggcttcccctttcaatccgagaggggggcaatgccgaaagcaatacagctaaagtgattatctttataagagaggtaactgtcagcctacagttagctctgtattatctatcagaggtgaaactaatctccatcaagttatgaggaaacgccacagcttcttcgctgaagatgttttctcttcctcttcctcttcatcttcctcgtcagagtcattgttgtcctcaggtccatctacattagatgtttcagttgcagactgcaaatcgaaaacagaatatagtaagttcaatggaccaaggcacatactaaaagcatatgatgagaatagtgcagctgcagctgaaagaggaattaccactgtagcctccaccgaaggttcctcttggacagaatctgaattatccactattccgttcacgtaaggcacatcaacagatgaagctggttctcctggttttgtaaggttctctggccctttatcgccgtattcatgttccttgcaggtgttggataaaccaagtggggcttcatcatgttcattcttggagcatttctcttctagagctgacaggctgtcaatatcagattgttagtgaagggcatgaagaaacattaaattaaaatagtcacgctgctttcaaaagttcagatagtagtgtaaaaacaaatcataccagttggaagtgatttcccctccattaactttctgaatagtactccttctgtgctttcgttttggctctaaaacttcagtttggtcacaagaaaccaaatgattaagcctcttttgaccaacttttgcaaagtccaaattcacatcttcaacatccacagagtctccaactttctttggcacaccattctggacaaattgatcatggctagcgctcttctctggagaccgtttgaatatcacctgagcacattttcgaacccaagaaatcggtgttgagactggagaaaggtctagtttccttccaaaacgttgctttggtgaagaatgggagttatcatgatgattgtctttcacatttatatcacttccaagctttgacttatcatgttgtaacaaagacagttgcttattttcagaatcaattttcagttcttccaacacattaagttgttgaatttgcactgtaattgcttctcggtctgaatgtaatagttttctttgctcttgcagcttctcccgttgattattcaaggcttcaatagtgccttttatctcagacaactcttgctctctcctctcacgttccaaagtagcttcttttctctcatccttaagtttctgcaattcaactgcaacatgttctaattttgtgttgatcatctccttctgagaattgatgtgttcgagttccttggcctttttctgctcaaactcttcctccctttccctcaaataagaatctatttccatctgccttgccttagcagaatttagcaattccaccctctggatatcaatgtctctcttcagatcttgcctttcttgttgaatcttactcagccaacttgcatgttcttgctgcatcttactcatgaactctttgtgttcacgagagagtgtttctgaattacttttgaactgaacacggagattatccttctcctgtttgatgatatcagattcattcttcagatactcagttattgctcttcgttcttcagcaattctgatcgcttccttttgtagctcctctttcttttcatcaatcagctcccattcaatctcaaacctttccttttcggcttgcagcctatctgcatcagccatgagttcccttttttgggctctgaggctgtcaatttcttctttaagtttcatctgcagagtaagcaactcatctctatctgcttgtgttattgctagatcttgttgggcttgaattgcttcccgtttctcctcttcaaagaaagccttttccttctccaaatccgatttaatcctttgtatttcttccctttctttttgaagttcattgtgtatggcttctctgtgtaacaagagcttttcctcctcctctttcaactcatctgatctccctgccaacgccttttccttgcttgctaattcagctagctgaaggtcaagattctgggatctttgcacaaccacagattcctgctcactgagagcacattctctctgatgcagcgcatttcttgtcacctccattgctgcatcaaaagacatttgtttgtttgccatctcagattcaaaatcatgttttctcctctccaaggctatagcttgttcctgattcaacctttcaatctcggcctgcagcagaaattcaagatgatttacaagaggttaagtcacaacacacattgtcaatagtgaaattggagaatcttacccgttctttacttgcgattgtctcttgcaaaattaataattcactctcccttttgtcaagcagggattccttctgaatcagagcctgcaaaagagatcaattttgttagacagaactttcgcaatgatatataggtggtaataaaaggagaaaaatatacatacttcctctcttgaaactattgcctccattttcagctccaacttatatttttcctctaacaaaaccttccgttcagcttcaagaatattcttttcttcttccactcttttctctgagtgagtaacataagctaatctctcaaggatgttctcgtccctctgattgagtagagcttgttcctttagtaatacttcctccttttcatgcaaaattttcttcatatcgttcaacgatttcctctggaggctaatttccttctctttggcctcattcctgcattagcatgcctgatttagggaaaaggaataaaagatgcccactaaactatgcaagaatatcttacaaagtacacagttgactaaaaaaattaaaagcattttgacagtgatttactgaactgaattaagctatactatataagaaagacgatttaattgaaaaggtggaacatagaacactcactcgagctcacaagaaattcggtctcttctaagctgatcttcgcgatcatcgatgtcatgtaaacttctcagtgctgcattatgagtccgtatggactctgcctccaaagattttgctagaagaagcttctcttctgcctcatcaaatttcttgtgtgcagcctccatcaattgaagagcttcagccaatttcgattcatatgaaacctttgtttcagctgtttccccacgcatatcatgcaatgctttttcaagctaccagaaaaaattgaataagggccacattatcattatatatgaattggataaaaaaattaaatctcagaatgtctcatgtacagtgaatttttcttttgttctcatagacataaataataaattttgcttctgagctattatttgggataaaaacttacattagcaacacactccttttggatgcctaaactctttttcaggttttcttccttcttccttgcttcagctaaagcagactgctgggctgcacgttcacgcttgtgcataatctcagcagattccgaagcagctctaagttgctcatgcttggatgttaactccttccgctccatcaaaacaagaccaagattgtgttggtattgataaatctacaacaaaacaagcaaagaataagataaagcagatattttatttaccattcttctgcagagcaaaacgtgtaaatttgcctttagttacaacatgtgcaataggtcctaaatatgatagcttatgacaatgtaggtatttaacatttgggcatacatccgatggtgaataggaaagaagtaaataatagactaactggtttactgatgtgcagactttactattgatacaaattgcatacagatcaatgaatggtttcggcaaataccaatgtaataatagccatggcatcttccaacattaatcgtatgctaccgcaatgcataaagcaatctactatttcaatccagacaagctaacccagaatacatatgtatagttgcaacagtagaaaccccaaagcgaaagaaatagataaataagttgaatgtaaaaatgtaaaaaaaaaaataaaagaagcaaacttatacaattacagttcagccactaactaatccaagcaagctaaactaaatgacaaacattccaagataacgattctaaacaccaacgcaaaaaaaatagcttcttgaatcattaataaacccatccagcatgtcagctgtacctaagaaacaaagaactgagcaaccaccaaaatcccaaaatgatttttcttctttcccgataactcatagcgcaccaaactcgacattagtcacacaagaacccacgcagcgaatgattccaagaggaagacttcatcgacgttccgccgattcttctcggccatcaatctttctcctctcctaggaggaaaccctccaccaagaactagctactgagggagtcaaaccatcaaatcaagaaatccaagaaccttgccatccagcacgcacaaggaggggaggaggggggagagagagagtgaggtgggtacctcggactcgagccgcgagatgtacgcaatgagcgccgccttgtcgcggcgcttgagggactcctcgtcgaagccggcctcccggagcttactccagatcgcgtcgtcccccgcggctgcgccaccacttcctcctcctcctccgcctcctcctcccaccccacctgccgaccgcgggctcgccatggctcctgcccgccgggaaccctagatctcgacggcacgatgcggcggcggcggcggcgaccacccgtcgtcacgcgcccctcgcgcgcagcagtgctttcttcccgtgcgagtagtggaggtctccctcctcgcctcctctctctctctcctctctctctcccttctctcgcacacctctccttttcccctcgagctttttttctctctcttcctttgggcggctgctcgtgtgtgctgcgcgagacggaggttttttttattattattttttactcggcttgggattcggtggagggagaagggtttggtttgatgggtggacactggacgagggactgggtgaggtgtgggaccgtggagttcagggtggaccgggtttatggaggtggtgctctaccgtattagagactgatgattattggcaagattctttctttctttgctttcgctttccatttgtactctaatttttaatttggagatcgggtttgttttaggccgatttggctgagcttcaccttcagctctactctactttttattaagctgaaaccaaactaaacaaatttaaatgcatgtgaaaaaaaataaaagaatggactgaagtgctctcacagaataaatttaaaaggtatagcaaatgttcggtttgttctacaacttcactccaaacttaggttttggagttaaatttagacattggagtcccatcaaacgtgtcgtttatttgaaacagagactttagcttgccatacatattgcttaaaaaaaacatttgaatgacttttttcacaaacaaccttgaaatgtcaactatttggcctgctgaactatacagaccttttcctcttaaaactatatagataaaatagtatagtaaaaaaacatatatggagtactacttttgacaaaaaaaaattaagggtgtgtttagttcggaaaaagaaaattttttggtgtcacatcggacgtttgaccggatgtcggaaggggttttcggatacgaatgaaaaaactaatttcagaactcgccgggaaaccgcgagacgaatcttttgagcctaattaagccgtcattagcacatgtaggttactgtagcacttatggctaattacggactaattatgctcaaaagattcgtctcgctatttcccctataactgtgcaattagtttttctttttatttatatttaatacttcatacatgtgtccaaagattcgatgtgatgtttttgggaaaaactttttgataactaaacgggccctaagcaagatgacagtatgctttccgttggcataagcccggggcacactgtaggcttggtccacggaagcatccgaggattcggagatcttttcggcagtaaataaaaaacaattaaccaacgtcaccaggtgtaacgcatactaagcatgacacgtaggtccaaatccctcgtggcccacacgtcagtctccccagctactaatcgacaccggcggccggctgccttttgcggctgccgctgaaaagccgtagcgacgcgacgagcacccccgcacacggagaccatcgcccatgacaggtggggacaggggattcggggggcccacatggaagcggcacgggaaaggggagcgatcgtgactcgtgaggatcggggttcagttgggtgggtttccggcgtggcgcccagctcgtttgagctggtgatcgcgatggcggaaaaagtggatacgtttggatgagggggatgaggtcaggtctctcagttcgggagtggcgccagtgagaacgcatccgaggtgggtggtggggtggtctggttttttatgtgggccccaccaaacttgtgcccttgactttgacggccacagtgatagccacagctgtggaaactgggaaacggaggggtttacagtcacacttaccactaatgaattttttagcttcccagtctgttggcagcaacagtccatgaacaactggtgaaagcttctgctcctaccttaccaacggtgtactagtactactactactgcgacatcatggccagcttggagaactccagccgtccagcgagcgaggcaccagcactgggtacattattggttagacacgggaaatgcagctgcgaaaatcagcgtctggttgggagttgcagcgcacggccgatcatcgtcacgaatggtgcagaagagtccatgggatgggagcggcgcgctggaggagcgcccctcttcttgcaccgtagtagtccgagagccagcccgatatgatgcccagttctgattctctcagcctaacaagccaatccgggtcgtccttgctcgcggggcgcagatcgatgtgatgagctcctgcaaaggcaaatcacaaagcggatttacgattcaataactcaagatgatgcaaaccagagactcaatgtgcttgcttacaaactgcaccacatcaacgtgatttagtcaagtacttcttccgtttcgcaatgtaagtcattctagcatttcccacattcatattgatgttaatgacttacattgtgaaacggagggagtagtatactcaagtatattattgattccattatatcccagtatcccacacacttgagtctagtacagattaacaccaccattgatgaatggaagtgtaggaaaacagcatacctaatggagcgatgatggccacaacactctcagatatattcttcaggacactgtaatgttcattgttcagataacggcaagatcataacacgaaaatggctcgtgtaggtgagatcgtcatcagaggaaataaagctcaaaaggcaagtgaagtttgtttaccctccgccactccaaggatccagaagcccattgaagaatatgatattactaccaaatctctccagaactagactaatattctgaacaagaaaaaaaaaacaagaagtcattaaactctctcacatgtatattttggctgaaaaaaatatgaagaatcagttgtattgcaagcagaatagtttatggagtagaacagaatttgagcattccataacatatctaataataatacatttttttcttagttaagaaagtttcctatcgatgacaaatcatctagcagagcaagttgttaaaaacaaatgtatatgctttatgaaaaccttgagattttgatactataactcacatgcccaccaaactctgtagtaatccattgaggccttggttcaacaccaaagctgttgatgcaatccttctcatatgaagtgtagttgaatttatctgctggaaacatactatcttcactgtatgacattggcataaccatctcggtacaagcctgttttaagcaataatggcagatatgtcatatcagataactcaagtaccttaacatatactccctctgtcccaaaatataaatgtttttttgcccatttagagggagtatcaaatatatccaatggatagaaacagcataaagttttagttgcaagacctgccagtcccatccatccattccatgcggatcatcatttagatcaaagcagtcaacagtaccagtgtagttgtagtatacatttactcctgcatatatgcgctccagaatactggttccatcaggttgattgtcaatttttgtacacaactgaaagagaaaccagataacctagtaagtagggagtagtgatgacatgcagaaaatagaacatggtaagcaggtaaggcttcagaatgttgcagcacactaaattatcattctgatatagtgatactctagattatcttctttgttgggtcttgagaacacaaactaaataatggttgatgaatgttagcaaattaaattttatcacaaaaaggaactaacttcctttattggattgccaggcaaaggcatcataaaatctgctggcattgggtaatccaccatggccaggtaactgtacgctgagctcaaccaatctgaaagttccccagtgttttttatagtcctgcaaaacattttttatacatatatgattaccgattaataaagctcaatgtaaaaaagatgtagtgaatagaaaaattactcacttgcatagatggaaagttttgcttagtttcagcagaccatcttgcccatttccttgagcatccagtgctttccaagagtcctttattgtttgaaagcagcttaaactttccctctaaaacacagtgaataagtgtcatctgtcatgtcactcacgtatattgagaataataaggaaacaggaaatgttgcaaaataaacaccttgaaatcatttgacacgagatcgtagaatatggtagaagggacaacgtcttcaaattgaaggattggagctgatgacgcgagagccccaacagcaatatgtgggtatttaagtctcatccaagcagcgagcactgcagcaatcatacattcaatggtgtcagtacagaaatacagattgaagctggagcccaacagaccaccaagccacattcaagaagaccctacggaatacagattttgcacaggcaaggctatccagttaaagagaagccttacttccaccgtatgagcccccgaagagcacgacagggctgccttctgatgacaagttcttcttgaggtcagtgagcagtacagcataatcagcaagcgcttgctcggctgtgagatacgccaaggacttggaattgttgtaagctttatccttgctgccgaatggcatcgactccccgtagtaccgatgctgcagagaacaagtaaacgggatcggatctcgcacgatcagcgcacacccaaggaagaacacactgactggtgcaaggtgagaggataaatttgcctcggcgaagacgacgagagcggcgaagcgcgtggcggcctcccacacgaggcccgagttggcggcgaaccaggcgatgtccccctcgttgccgcagtagaagaagatgggcccgccggcgccggcccacccgccgccgcggccgaccaggtaccgctgctggaagaacccatccccctcctccccctcctcctccaggaagctgaagtggtccagccgctgccggaagtagcgcgtctcgtagtcgtaccctctcaccgcttcctcggcccccaccaccccacgccgcggccgcgcgtgcggcaccgggaagcggggcggcgccctcgccagggccgacgcggcggcggcgaggattaggaggaggagagggagcggacgcatggccgctttgccgccggcgtggtggggaggagcagtggacagcggtgagctcgttctcgtcggaggtggcggcgtgcgtgccggcgcggacggaaggggagctttatgacgtgatcgtgacgtgggggcggctcacgcagtccacttgtccactcactagatggcgcgggtgacacgtgatctttcaaggtgggccccgttgattttgtgtatgggctcgttgaggccggcccatcaagaacttgttcctggaccgtgtccgtcctggcctcctgtgctccgtgtacatatatgccaacaatacgggaaacgaccgggtttttcctgcagagatagatagatcgatcgatcgatcatggccagagagggaggacgagacgacggtgatgacaccggcgccgcctctacctcgcccaacagcgtcgcaaatcagtcgtcgtcgtcgtcgtcgtcgtcggagccggagccggtgcctttcccggttcaccgcttggcgcgctactccaagtcgatcgacaaggcgatcagggagtcggtcctcatcaacctgctgtcctggagcctcgagcagcggatgctgtcgcccgaggcggcggcgcatgccaccgccgacgggctcgtgggcgtggtccggtgccacgccgtggactccggcgtcaccttctacgggatggaggggatcggcaggagcttcgaggaggagctcctcaagtccttcgacaggcagctcatcgccttccgcggcggcctccccagcaggggggagaaggtgcccgtctccgcgggcgaggcggcgcggatccgcgcgctccacgccgcgttcgtggaacgggacgcggagctgtggaccctggcccacgtcaccctggccgaggacctcgcggcgtcgcgcggcggggacgcgtcggccgcctccatcccgcgcatggtggagcgcctccgccaggtgcggcgcctcttcgaggcggtgctcatcccgttgagatcgctcaagtctattttcgatgacctcctcagtagtagcagatcaccaccagcagatgctgacgtgctgggcggcgccacctgtgacacgcctgtttctaacgcaggttcttgtgtgcccaatgtctgatgcgtctgttcatatgccaaagttaaccatatgaggctttcagttgaacctgagcatgtaagtttgctatttaaagctaaactttagttatagtttttgtctttgaggtgaattggacctcaagtttagttctaattttcaattctaggaaattttagttctaattttcagttaagccaagagctttnngtagtcagttggttagagcacccgtttagtaagcgggaggtcttgagttcgactctcaacgaaagcaatttgagtttgttttatgagtaaatttcataaaactacatgttttgtggtctaagttgcaaaaaaatcacatacattttgacacttagcatttaattatatatattttggtcgtgtagtttcacaaaaccaaactatcgatgaatggattcactcgtgagatgatatagttgtttcacataggacgaggacatggtatcttattaccagccatcacacaaaattaacaggatgccacgtccccatcctagatggaacaaccacgtcatctcacggatgaatccattcatcgatagtgtggttttgtgaaattaaactaccaaaatatatgtacttaagtgtcaagtgtcaaactgtgtgtggttttctgcaacttgaaccataaactcatgtagtttcgtgaaatttactcttgttttattttatctgtgtgcttaggtagaatctcaagaaataactaatttaaaggatgaaagtcacggtgtgtcacaaatggtcccatggtctagcggttaggacattggactctgaatccagcaacccgagttcaaatctcggtgggaccttttttttctcgtaaatttttgcttgctgctgtagtctttgcgtgtgccaccgaattaaagaagtacgaattccaaaaatatcaaaacatgttacgatataaaacggatggagcagtaattgtgttcttttatgtttggaattccaaacttactgcataaccatgaggccatttcatagaagcgttgtactactaactgggctgcgttcggcagaccaggttccaactcttcctcctcgttttccacgcgcacgtttttcaaattaataaacgttactttttaaaaaaaaatttctatacaaaagttgcttaaaaaatcaaattaatccatttttataaaaaaaattaataattaattaattaaatcacacgctaatcgctgctccgttttgcgtgccggggagtgagggctcccaaacctcactcccgaacgcagtctaaactgtgaaaggtgaagcactgagtatttgatgtcaaatctcaatcatatagaaatataattctaattattttaaaaaggaaaaaaaatccattttaagtcactgaactttcataaaatctgctcctactcttcatatcagacgatgttcatactacaatatttcaaatcatttaccttacacccctcatccataactagaactagattgtttaaagcttacagggtgcttatctagcattatagtaaaaaaaaagtgtgaagtgcacgggcggtacttaaatttgaacggatgtgtcatctatgtccctaaactctcgaaatgtaattttagatcctcgatcttgtcatgtgtatcacataggtccaaacatactccaacccgctccttaagatgacatggcatgccggtgactcctacgtatcaatagaacccatacgtcagtcgcgtatagaaaaattaagaacatatattttctcctctctttttcattttactttttaaattaaaaacatcattttctcctctctctctctctctctctcactctcatcccttttaaatttttcttttttctgtgtgagtgacatgtggatcccaccgccacgtaggagtaaccgtggcatgccacgtcagcacacggagcaggttggaacccgtttagatatatatgacacctgagacaagttaagggatccaaaatgcattttgagaattcaggaatttaggtaacacacccgcacaagtttagagacttttcgtgcactttactaaaaaaggaagtaagatccacattgattctctccttccttacctttcgtcctcatcattctctgcttggcaaatgtttcatatagcttgatgccccctccctgtatgatctcaataagggcactcacagtgcaagcacctattgtgaggtaccacaaggtgacacctagggtggagagcttcaaagacactctctccacaatgcaagcaccgctagtgggacacacatatactactttaccaaatccccaactccctcaatcattacgcccgcctcctcctctctcactcaccacgtcggctctcccttgctccctccagcagcgccggctcccctcctcctccgccggcgcggctctcctctcctccggtccgagccgagctctcccctcctccctccccttccccacgcgggggcgtccctgcttcgagcggtggagggcgacgacgacaccacagatccaactcgccgggggtcctcatctcccgaccgatggatgtgtatcttgagcgacgagatcgatgccaccctcgacagggctgtcagatttggcctggcgctaggaggagagggcggaggtggatctcggcggccgagcgacgacggtgtcgtcggggccaagcggcgacgatggcctcggggcgagcggcggaggcaacggcgctcttgaaggtgccgcgactgctggtggggctggcggcggcggcgaggccttgccggcttgtcacgcccagaaatttagcccaaatttccagactattttgtgtattaaatccctgtccaggaccagccagggtacacaaaacgacaagtaatatacagttccaaacgtaaataaagcgtaaaatacttacagaaaaggcacttagtcctcacaccgaaacaaaaacagcagcagcggaaaaaggcgatcctagcggggcttcagctccactccacaggcaaaactcaactggggtctgagccttggtcttctaacttcgtcttcagctcagaagcactacacttctgaaaagggggaataatagcaaggctgagtacaaccaccgtactcagcaagccacaccaatgatgcagacgtgcaaggggatacaaggatggtttgtggctatttgcataaaggcggttgtaaaacattttattgagcaaaacagtaaaactgttgagtaattaaagtaacattaaaatctccactgatcaacgctacaccacgttgaacaggcccaaccaacccacctggactacagtgcattgggtcgatttattaaggtgggactaatcacggtgaatctggtcgatcgcccataaccgcgggcacggctattcgaatagttttactctggccagaggtgcacaactgtacccacaagacacaacccaccgacatgtcaccgtgtcatcatgtgcccatgatgcacacgtcaccatgtcgagtgattgtgacgagacccttcgcataaccctcccctaaccatccacaccacgctaaggtttcacccccacccctcaaaaggcagtgggcggtcccctcttgcgccgcggtgaatccggcagctggacaaccggacaccccggccgacccaactccatcacgcccaccctcgccaccggtgcctaggaaagggtcgagctatacttcagatcaagcagttacccattcccgcttgtggcaagcgctgtaagtcttccagggtttcccgtgaaccggtccttaattgccatgggtgcgactcacaaaaaccatgcacccacagcccaccattcagtcgcattttagttggataattacgaccatgaaacatggccaggtgtttcgagcacgcagctcaacaagatactagaaaggtctaaaactgtaattatcccatcgactgagctagtggtaattaagcatggctaagcatatagttctagctaggtcacataagtaacacaagctagtcgatttatcacccaaggttgacaaaggacagatatcaagtaaacatggcacaagcgagcagataggtaaaccctgatcccatgtaattagcaaaacatgcatatttatttgtaaacggtaaaacatttataaattgggatcaacatgctcaaggggaatgtgtgacttgccttgcttcttcactttgatcttccgaactcttttcctcgcgaccgcggacttccgaaacgacggaaactacacgctggcacgcaaaacgaggaaaaactctaataaaaaccaagaaaacagtacataaaaactaaacaaacatgtagagctcaattttagatgaattttgcaagttgaatggctcaattcggagttcgaatgaattagatatgaattttagaagttttgagccatttaaatgaatttctataattattatcgaattattgcgcaattattaattattttctcaaaggaaaagcttaagcgctgacgtcatcaaagaggccggcgccgacaggcgggccccacacgtcagcgggtcaagggtatcggtccaccgtggaccgagaccaccgaggcggcccaccattcagtccacgggaaccgacggcccggatcggcccaaagccgatcggacggccacgaggcggcgcggctggggcacgggcgcggcatgaaaccggctcggccgagcgatagcgcgcggcggcgtacggccagacgaccgccggcgacagcggcgcatcgcggcagcgggcacggggagcggcggaggaggaaaaaaaaggagaagggacggtggggattctcaccgaggacggcgacggcgagacgaccacagggaggcggctggcggcggaaagagatggtggcggccgacacgggaggcgacgggaacggcggtccgacgacgcccgaccatggcggagccgcggccgagggccggcaagacctagggaaaatattggagcggttagggagagaaataggcgaccggagcggcgagaataccacgccagagaggagaggaatggtggggctcaccggcgaccgagagataccccgttccggtgggtttccggcgaagaggggcggcggccaaggtcctcctcgtccttgcggagctgagggaggcaacggcgcgagtcgacgtcgaccgaagcggcggcgcgacgcggctggaggcggtgaaaggggcggcggcctcgggtgtgcggtgggagtggtgctcgaggggtggagagggggaaataagaggcggccggacttccccttgcggtggcgaagctggcggtggcggtggctcggcgcggcgacggctgtggcggcgggaaacggcgaccgaagctcgccggagtgtggcagcgcgtgggtgcggcgtggggagagcgagggagagtatgccgggctcgggaaaaatggggaaacggacaaggggagcacggggattgattttatagctcaaagggccgagaaaagggccgggaancgncggatttcaagggnaagtgggccggcgtcgtggggaaagagagagacgcgggaggcggcgacgtggccggattttgcgggaagagtgggggaaaacggcccgaacgtggcgggcgaggtcccacggacaaacgcgcgcgcccggggtgaagnaggtggcggnaaccggcggcnacgtggcgggttttcggcggccatgccggcaacggcagctgccggcctgaggttggggatgaccccgacaggtggggcccacctgtcggcggctcggggagaggagggagtatgaggaaggcgaagcggacttgcgcgaggagggggcaagccgggccgacggcccaaagagaagggaggaggggaaaaggagggcggccgggcccgagagggagagaaaggaggggttgggccgaaaggggcccaaagagaggagagaggattttaatttcttttctttttattttaattgattcgatgaactttgtgccattaaaactatttctcgagctccgaaaattcacggaaaattccggagagtacattagggcacaaagaatattacaaaatattcccggccattgatttttaagggaaaattttaattctcccaataattcacttgattaaattgcttaactttttatttaatttctaggaaatgcattattaaatgatttttaatcccgaacgaaaatcggggcgttacacggctcccctctcacctcacctctcccgacgagcggcggcaaaggcggagaaagaggaggcgaggtcacgccgaatcgaagcaatgacctccgcagtgcaagattccttcccccacacgccctcatttcggcgagaaaacgtgtctcccacctagggtctcagtgctacgtacgctagaatccaagctggcgcggtaggaaactcctccacgtacgaacactgtgaagggcctaagctgtctctatgtggcttgccttgcgcgagcctagtcatccaagcgctttattctgccattgccttaacctcattttttatggtctcgcatggagatcacctgttgcacctctgttcaacggtctaacctcttgaagcacgagctcagacatcgcacgggccttgccttctattgctccatgcaatgggcgaccctcacgtgtgagagcttgcttggttgtcatcgctcaactagttccacccaaagacgtacttcctcctccgtttcacaatgtaagtcattctatcattttccgtattcatattctagatttattaacatcaatatgaatacggaaaatgctagaatgacttacattgtgaaacgaagggagtatctctctattgaagtaaccatacttcatgaaatcttgacaaggcaattatttacgtgagtttcactgtgagatgtaattgcttgtatgtggaacaggtgcggagacaagcctagaacagcttaggcttgagttctaggattgcctcaatattcatgtttaaatcccttttaaatcaccatttaagaaaaccaaatatcttatcagctaagtcctacttgagccataggcttagaaattttctaacttcgtcatagtgtggaacgacacatcatgaagattagagatacaatgtttgattcaattactttttgttacctacgcgtatggctgaataaaaagaataatatgagaaaacgcaagcaagttgattttgcaacacgattatgttgtcttcttttccctatttttacattttcatgtagtgacttattaatgtgtatcaagttatgttgttggcttggcacgactatccttgtcgtgaccacaccttcgtgagctcgttgttggcttggcacgactatccttatcgtggccacaccttcgtgagctctgcctttattagtttcgatatctcgattgatggtttgatgtttgtttaattctgtaaagttatctaaattattggaaagtttggttcgaaaagtttagtgacgagttttaaacttttatgatttcttttggacgtaaaaaaagaattttctgaattctaagaaatccttcaagcggccggcttatcgctttatcgggtcgtttttttggcggttaaattatctgggtctgttcgcaaaccgacggagaagccgctgctgcaaccgcccgggccccgcgtccacgcaatcgtttgctcgcccttgattggttcgatacacgttttcccctcgtttactcgaaacgaacccacgtggccgcgctctagagagttccacgtagctctaggtggggcccacggacacgggggcccacgggtcatcctctcaagaaaaactttatttggaccaataaaatgaatttccctctttttcaatctctccgcttccgccgcggtgttcttcctcctctcgcaggagaaaatttcgctggttgaatcggagggaggcagcaatggccgctcgagctcggtggcgaatcctcgcgctgccgctcgctcttctcctagcggtcgggtcgtcgcctggcctcgtgaggcaggcgtcgtcgtcggcggcggccaagcctcccgtccccaaggccatctcggtgagttacacgaagaaatttctcctcttccaacgcccgattggccgattcgtccttgtcgcggaacgattctgatatgttaatgtaacgatgcgcgcgtgtggcggatcgatcggtgcaggacctgagggaggcgatcgtgaaggggctggggttccagtcggaggagctcaaggtgtccgggttcgacgtgcgcgacgcgctcgtggggcaggcggtggcgtacgagttcgacatcgaggtcgggaggaaggtggtgccggtgcgcctgctcgaggacgtcaaccgatgggacttcgtcgacctgcccatcttccggtcccaggccgacgccgacgacacggcgctcgccgagatccggcgtggcaagagcgggaagcgagccttcgacccgaccctgccaccgttccagctcgccgggcccatggagctctggatccaggacggcgacgacgttaggctcgccttgccggtaagagaatttttttttcttctcgtgcttatggttaaaaggatattttcatcggaatgattttgttgttattaagttgcatgcaccaaccagttcaacccaaaaactaatattagggaagatgggcaattcagtttatatttcaaagtactgtttgtgtttaaaaacgatgaattttccttcagcaatttttttaaaaaaacatacaaagtagaattaggtatcaaagctaacaatacatcgttctacacctcaaatgtgaaatgtgtcaacagttgggaaaatagagattgtagagcataacttcaggtttctgatgtcatcttgataacaaggcaaagtttcagttgctgctataattaagccacctgacgtctcatctgattgcaattcaatttagttctatgaaattatggaagtgaatttttggattacgttgataattcgtcatcgtcatttcgtctggcgtaataggctctgaagtctgaactatttgtgtgcttgcagactttgaataacgaacaccaactttgttcacgtatacaaaagaatgatttgaattgagcttatgtgttcatgtattgtaagatttcattcagcaatgaatatgatgatttttgtcctggtgagttcaagagtcagtgttctgcaaatctgcgttagtattcttcattgtggattctacaccagaatggtttttcattacaacattagtagcttcttcattgcgcgttctgctctgaagtaatgttgagcaaatctgtatggaatatcctactcctttcacagcaatggaatgtctcacatctggaggttctgtgattcctagttagctgtaaatactgttttgtgctaggcttaaactctgaatatttacaatatgtgtttttttttagactggtcaacggggggggggggggagcttttccacctgaattttgatttaaagagagatcgagtacattaagtcagggtacatttgaacggatgggagaagatagaatttgtttccaggattctactactatcctgtcggcacagttcaatctttccgcccagagagtagcatcctctatgcactttgttgctaaacgatttagaggaggagattctcctctgaaaactacatcaccgcgatgattccagagcccccagagacagagcaggaagaagaccttgaagtgtgtacaatatgtgttgttttataattcctatctctttagaaacttgacattattttgcaaggcatagttatttctaatagttgcctcataagttggtggtatagacttttacgcatttgccataatgctaacaccatctgcggcctggggttcatttaagattggtcatttggttgccattgctgtatttaaccatgggaaggttcatctaaccattatgttacacacatgcctaacattgctttactgggtgaattactttatctactatgtattttaaatacaaaatgctaatactgttctcttactatgtattttaaatacaatatgctaatactgttttctttacagcatgatgtggaagcagggacgctgaagaaagtagtgctatcagatggtgccgtggtaacagtgaagggtgccaaggctgtgagcctccggttgccacttgaattaccgctccctctcaaccgcaccacttacaagggccggttgtcaagcttgatatccattgcgcaaacgctacggggcgccgcccggtcgaaccagaagccgctgctctccctccgcatcgaaggtccgacgtcgttgtcctcgactccttccatgtctcccaatgacaggctcaagctcaaacggttggccccaggccaagtggagctctcctcgcgtgcaatccctgctgttacagacgatgatggtgatggatcacacgcagctggattgtggccccttctgtcactgaatgggtcagatggcagcctgcaggggtttgaggagttgctggcctcggttcttggaaagaaggcaggtgagaaggggacgttcaagctgttgaaggcgcgagcttctgcccaaacgtacgtcaagatggggtttgcggtggagaagaggattgctgacggagaggtgaactggtccaacttcccggagtggaagacgaagcccaagaagttgagggcgcactacgaggttcttgctcgtgtggagggtggccaggcgatccctgaaaggatcgcgcaggtgcagccttttgaggccgacgaggccatgtccgagagcgtgctcaccgggaatgtgtcgatgtcgaagacggaggtggttcatccgccgccggtttacttcactctttgagagcagttgaagctccggttttaagtgagctgatcacggtaaatgacaagcggcgaaagtttcttggcggcgagtattattaactgcattagcatgaaaaattgttgtacggggtatgttatactggccagctttgtaaattaccaaactgaataatgaatgaacgaaccattacaggaaaaggattcatccataggcaattgtatatctttttgaaaccaagagtgccaacttttcagttactgcatcttttgtttcatttcagttaaaccgacgacgtccttgtcgccgcttttgaagttcgccgccggtggcatatgtagcgtatgcggtgcgaatattctcccaggctcctggaggatttgattggataagccgctcgtaaggacaccgtgcctccaattgttttaggctgctatttgttgggcggtgcaccgtgcacgcgagtacggcgtcgcatggtcgcggccctagtcgcgcgctcgcacgtgggcacgtggctaggcttggcttcgcttctactacggcctcccctcctcaccgacaggcatggcccacacgtcaggcgtggccgcccgtctgaacctggttttcatgggccgcccgctcgcacgcagcgcgcagccaccgccatctgggcctaggttttccgggagagcgcagcggcggcgcggaagcaacgaagcgaccgcttgcgggaagggccggagccgagccggccgcgccgcctcgcccgacgtcgtagcaaccaagccacccccgctccacgacgaggaggaggaggagggagaaggatggtgaggagagggcggaagggcaaggacgcggcggctggcgccggcggcaccggtggcagaggcggcggtgccggcagaggaggcggcagaggaggaagcggcggcgggggcgggggagggggtgttcgggaggcgacgctggtgcgcgtctcgaaagtgctcgaggacttccaagcctccgacgcccagggttcgctctcattcgtttgcccaatttctccattccattcaatggtgtctggtgtgatctgtcatcgcggtgttcgagcgagttggggatagtggcacgaatacgatactttgggagcttggttttggtgaatttgaggcgatggtttgggccatgcgcgcggccatgcccattttgtgttctctcttctctgttgcattttttattagtcctcctaatgtatgattgactaactttactggccttctagtgtactgatcactaacgtcaccaatgtttgtagcttcacagttgattctgagtttggtaacaagggaagaggaataccgtctactttatgtttgaccattgtatctcacaatatgtgacatggtattttcatgattgtcagtttgtcgctagataagttggtctgttgactgactagaaagtatttcttaggttttactacaatggcatctaacctgacaattgcacttgaattgatttgcaacagtaatcctaggtggccactagactgttgtgtaaatatgcatgagaatcaactctttgggctgatattagtgggtgcaattaagctcctgcataaaccccaacgaggagtctcaagcaaaacactattaggattctgttagttcaaagtagcacccttttattagttctcttctcataacaaccctcctccctcctcccaacaacaatgaaaagaccacccgcacacatgcttgcacactctgatggtggcaatgttttcttgtatatcttcttttcacattttttgtgcatcccttgcagagccattgcttgctactccttccatcccaaaatatatctacctttctaattcaaatttaaactagaaaggtagctatattctgggacggagggagtaggtcatagcatgtgctgtgctgtggtgttttttcttcccttgcgttgtttgcctcgactgagttttagcacattactgccccattatggtcctgcatggtagatggcatgtttaggtttcttttggtatgtggggaacttttcctgttattcttgtgaaattcctggattccaaacaggctcctatatcaattcctccactacttgtctctttctttactttttaatgaaacacacatgttttctctgttatgctgtcagctgaaaaagtcacgtatctacaaaattttactttgcagtgtacaaatttgaacctggcatatcgaaacaagagcgagcggcgatacatgagatgtgtagaaaaatgggcatgatatccaaaagttctgggtgagtgatagtctaattgacctctggaatgatgcattccgtacactggttctagtaaagagtaataagcatcttttaaacttcattcatcatagcgactgttatcttagtaggattaaactatgtgtatctgatgttttctgaaatctattaattaactataggaatggggaacgacgatgcctatctgtttacaaaagaaaacagaaccagggccttgaaacagaagaaggacctagccatcttggattttctgtggaagcgagaaatgttttgcaagatctatttatgcattatcccccagatgatgcggagctaaatgggcatactgtcaggaattctagtgataaggctgtaaagattcagtggaagccagatggtgcattttgtaggccagcattgcgcaaaccggatatattgaagaaggtggagatgcttgcatcgaaagtaaataaatccgaacagttgaggaaggttgtatattctggcaatctggcttgatatggtgtcctttttgccattcagtttagccaattcctacttttatatatgttatattggatagttttatctaattgaacttagtgttgtacatttatacagattgtccaagatagatctaaacttccaatttcctcatacaaggatgcaatttcttcgactttagagaatcaccaggtattgttctttgtgtttttatggaaataaagttgcttcactcgagcttcatcctgatgcatacatcaaaggtggtgctggttgtcttttctgttggtggcggggctaatagcaagacattctatatattaccttgtaatacttcaagacaaatcaagaaattactattattttcttgtttagtagtttcaattcttggtaggcttgactgctttccaataatgggtggatgcctcttcaggaaaatgcttatcactttcctgaacctagctatttattttgatccatgcttatctttgacatttgccaacttccagaatgaacatttcctttaacatgacctgataacaatttgaccttcatccctgtcaggtggttcttatttctggagaaacaggatgtggtaaaacaacacaggtgccagttcttttgacttttgttttgctctgttttgaccatgaaacaactattgtatgtaattaacttcactgtgacatttcctgcaataaattcagatgtatcttctcattctgttactctgtgttgattaattgatccaatctatgcctattttctgctattttgatattttactttgtgtttgttgttatcgtgttatatgtattaaaacatcctgatttgtgagaaatttcacaaaatcgatagtcaaatgtacttcttgttttagtgcccatggaatgatgtggacacctttctttttcttaaattatgatttccttggaatgatattctgcttatctggctcactcatcgtaccattctttttttaggttcctcaatatatcttggatcatatgtggggtaagggtgaatcatgtaagattgtatgcactcaaccaaggcgaatatcagctatctcaggtaattctgtcaaatgacttctctttcattgctattgtttttgtttaagcagctgagagtcaaatgactcatgtacacagttgctgagagaatctctgcggaaagaggagagtctgtgggtgacacagttgggtataaggtatgccaaattttagaattttctattatgcatttctggactgaaattgtacttattattcatctgtttgaaaatgacacccaaaaaatgttatcttttttttttttgaaaaagaatgtttttttacgaaactttgcccgtaaatttattgtgtagtttatccgtacagtgacatgtctatgataacactaaaatacttgtagatatgaatttgccttggttattttgtgcaaacaaactttgcattgtttgagaatttcttggtagaaattgacaaagtttactcaagaaacagtatcagtatcttgtattttgaaacgagtaaacaccagttttgttatttcgcttgacaaagttgagaaagtttgtaatttggactatgttcttaacttcaattttcgtccttaatgttcatatatttgtcatctatgacatgtttgcacttgtgcacataatgtggatatgtacctctgtcttattccgctgtttatttcaattgcagatacgcttggagtcaaaaggagggaagaactcatcaatcatgttctgcacaaatggtgttcttttgaggctattgataggcagggtaactaatatttcaaaagaacaaaatcagaaacgctcatttgatgatgcagttactgggataacacatattattgtggtaatgtttaatcttagaactttcaaatagcttgattgcaaattattgtattctgaactgcacatactttacactccttattttgcaccaacactgcatccatgctattagtaccaacaagtagttaaatatgatgctttttgtacaaggggggaaggagatatttaatcaaccactgggtttgtatgacactagacttgttgcagaaacttaactctaatgctctaagtagatctatgacaaccagaaattattttcccgtctagtgtgaaattatttctttaatattataactgtacttgcatttcttttgtagtttgatacagcgtattgcagaaaacatttaccaactgttcctttgtaattctgagagggcagagcatttggtgagcattaattgcaaaatggttatgtcagtgcttacctattcaaatcttgttatttgtttagtactatcttagcaccccttagcattgtccattgaatattgttgtcattgttgaactggggcaagtcatgcatcaattagatgtaagaggtattgtgcaacttagtttataactctattgcaaaaataactggaatggaaatttatgattatttgttattgagcttctaatagcatactgtcttttggtgaaatacaatgttttttttaatcttggaaagcttcatatattattgtgcttcagaactggagccttatacaaggcacttccttactgaattgattttcaatggcatatactgccagtatatattttattggtaatatgagttggcactctccttttctctttaggatgaaatccatgaaagggacaggttttcagatttcatgttggctattctaaggtattatgctaaaagctgtttcgtccacatgttgcttagattgtgtttttagtgctttaacgatcttttgccaaacaattatgtagagatttgctgccgttgtatcctcatctgcgtttggtaagaagatttttccttctagtttaaggctctatagtaataactacacacaatcatgcatcctctatcatgtatccaaaagattagggtacggctttacaaaatcctctaccagataactgtgcaaaagacaaaagttagtccacatcttttgttagtttgtctctgttgttatttttgcacagtacacatatgatcatgattttgcacaaattttgcaattgcactcgtggcatggtgctttacatctacgaacattttgttcctttttcaagttcacaagacaaaataggttcatataccccaaggaacacagaatccatatttccattccatatttgaagcacagaatttcttctgagtgtatccgctttccgttacatgagtattaactagtttaatgagcaggtactcatgagtgcaacgattgatgctgagcggttctcaaattatttcagtggatgcccatttattcaagtcccagggtttacccatcctgttagtaacacactaatttacattttgttaagaaagatattgaagtaattgatggcaacattggctcttttttctcaggtcaaaactttctatttggaggatgtgctttctattttgcaatctgtaggcgataatcatcttgatcctacaacagatgatctgaaacagagcagtttgttaacagatgattacaaaagctcaatggatgaagccattaacctagctttggataatgatgaatttgatcctcttcttgagcttatttctgctgagcagaaccaagaaattttcaattaccagcactcagaaactggtgtgacacctttgatggttcttgctggaaaaggtcaggttggggacatttgcatgcttctatcatttggggtggattgttctacacgggatcatgatggaaaatctgcattaggttgggcagaacaagggaatcagcaagaggtttgcgaagttattaagaaacatatggaatgtggttcagcaaagttaactgaagagaatgagctgctcaataaatacttggcaaccatcaatcctgagcacatcgatactgtgctaatagaacggttgctcagaaaaatttgtgttgattccaatgaaggagctatcttggtgtttcttcctgggtgggaagatataaatcaaacacgggaaaggttgcttgcttctcccttctttcaggattcgtcaaagtttcttgtgttgtcactccattccatgatcccatcttcggagcagaaaaaagttttcaagcgtccaccagcaggatctcgtaaaataattctctcaaccaacatagcagagactgctgtgacaattgatgacgtcgtatttgtcatagatagtgggagaatgaaagagaaaagttatgatccatataataatgtctcaacacttcattcttcctgggtttcaaaagctaatgccagacaacgtcaagggcgtgcgggtcgttgtcagccaggaacgtgctaccatctctactctagatttcgagcagcctcattactggaataccaaatccctgaaataaagaggatgcctattgaggaactatgtttacaggtatattcctagctaacctttgtagatttgtttcctccaataactcttgaaatcaatacttctgcaatattatggttcgctgcaataagaatgacatttatttactgatagctgttaaatgtttcaatctgtattatgcaggtcaaactgcttgatccgaactgcagaattgcagactttttaaggaaaactttggaccctccaattccagaaactgtaagaaatgctatcaccgtacttcaggatcttggtgctttgactcaagatgaacaactgacagagttaggggaaaagttgggctcccttccggtccatccatctacaagcaagatgctcttgtttggtatattaatgaattgcctagatccggcgttgacattggcatgtgcagcagattatagagatcctttcctccttccaatggctccagatgagaggaaaagggctgctgcagccaaagttgagcttgcttcattgtatggtggatacagtgatcagcttgcagttgtagcagcaatggactgttggagacgtgccaaagataggggccaagaagctcaattttgttctaagtattttgtgtcttctaacaccatgaatatgctttcaaacatgaggaaacagcttcagaatgaactagcccaaagaggatttgttcctgtagatgcatctgcatgcagcttaaatgctagagatccaggtacttttctagaaaaaattgagttctgaaacatattctttgttcatgtgatttcttttgtttgtttccactttgctttgcttaactatagtatatgcatggttgagggatacatggtattatgtaagcagcaagtaagttgattagttaagtccctagtatataatatactcagtgagaagggtgttccttttcaggatagctaactagagttttccatggttagttacaaagaaaaaccttgtgtttctatgaattagtcttgcaatatgttcacgcctatattactagttcccatttggatatattgtaggggatagtccatcccctgattagttgtattgtagattagcagttccttaagcctatgcacagcagggtttattagttgtattgtggattagcagttccttaagcctatacacagcagggtttacaacatacaaggtcatagtgcacagagtgtatatgaataagagaaccaatctaaagttagtacaagtagctactaagttacatatatcactctaaagttagtagctactaagttacatatatcattcactgtattgtagagttttccatcctttccccgttcaatctttttaattttcttcttacttctaattcacgagcaaatcgtccttgccttttctttgtagtaaaattatttttagagtatttgctggattctatttttattcttagtaaaattatgtagtaaaatcagttgtcacccgaacttcatcaatcttccttagttcctaacaaattatgctttattgcatcaaagttttaattgttctattgtacttaactgacttctaaattctgtaggtatcattcgtgctgtccttatggccggtgcttatccaatggtagggagattgcttccccctcgcaaaaatactagaagagcagtcattgaaacagcaagtggtgccaaagttcgactgcatccacattcttgcaactttaacttgtctttccgtaagacttctgggaacccattagtgatatatgatgagatcactcgaggcgatggtggaatgtacataaaaaactcttcggttgttgggtcctatcctttaattattcttgctacggaaatggttgttgctccacctgaggacgatgatagtgatgaagaggatggggattctagtgaggatgaaactgagaaagtcactttgggacaacataaagagataatgtcttctcctgataactctgtttcagttgttattgatcgatggcttcggtttgatgctacagctcttgatgttgctcaaatatactgccttagggagcgcctagcatcagctattcttttcaaagtaagatttttatatcttgcatcatctaatttaagcttgattaatgcaatacaacttgttccttttgtattctctctttcatccaatgttttctaagatgccatgcatggttgccagcatattagcaaacttttgttttacatttcagtctgcacactcccactgtcccactctgacccccgagttttcctttaaatatattgtgttgatttttctccagtgcagaaatctggataataagcatacatgaaaaatctataaggcatgtagatagactgcattgccttccgttgttcattctgagttgtctcaatcagataatggatctggatcaatagatcatcatactgctttctgcatcattcttagtacctttatagtccaattatttctgaaaaaaaatggaattatttttctcaggtcaaacatccacaggatgtcctcccacctgatcttggagcaactatgtatgctattgcgtgcatcctatcatacgatggcttgcctgctatgattacatctgatgatgttgctacaagtcagggttcaaaccaaagttcagctgaatcaagcagattctctcagggtcgtagagtcggttatattccacctggcggtttcctcatgtctttgttatcggataaacctcttaatgcgcctcattttcagaagtcctttaatcatccagatggagcttcagggcatattcggtcatcgaggacctccgtcggtagatttgatcagtctcgccatcctcaacgtaataattctggacctgggagttcagcagcacggactttcaaaagacagcgcaacggtgcacagtgactctggactagcggccgcgttttgcagatccttcggctatgctggaatattggatgaaaggcttttgtggcagaaataaaggattgctgtcttggccgggagttaaataggacttgcagccttcctttgttgaagggccatacgatggcaacgtgatgccttgagctgaaatcataatccagaaacgctgttttgctggtgacttgcagccttcctttgttcggtgcacgttgctattctgttcagctctgcttcccaacttgagcgtgccttgtaatctgatggcaaggcgacgccatgccatgccacagtccactggtgtctaaccaccaaattgtactcgttggaagagtgacccatacaggctcaacgggagtctgaattctgatgtccctcatacagccatacaggagtagtaggttggtagtctgaaacttttgttttgctctgatgatgtacgtgaagaagtggtgtgtttcccttcttcgacctatggttcttttatagtactggagtagtacagtagtactagtagtacatgcgcctaaattctccatgccatgtgtaaccacagtgatgttatgccgtgcgcctaaattttcccgttctggtttgagatagcagtcgcacccagagacgctgcgggcctgttgggaagctggataagcagctgagctcctgataatctggaaaagttgggtttcacaacttctggtttttaggttattttcaggattttacaaatatagcttctcagaatcattgaaagctagactatttagggagcttctgattataagaggaactgcagcaattccgagagaaactgcagctagaagctcctccaggaccggcctctcttctcttcgtgaagaagagaaattgagtgaaatataattgctcttgtaccaatggggcactactagcacccaaaaaataataacactgtagcaaccttgtagtactccgtaatgcacgtgtctctcaggaccacctgacctgagattgaatgtctagcaggtgccaacatccgcccgtttggaacacggatttgccacgcccatcacgttacatagctggcggatgtcgacgtgttttaatggcccaatggcaggtttaatactcgtacgtgaaaaaaggctttgctcttgtacgggcatcgaccagtgggcagtggcgccatcatgttttcgccgtactacctcgttctcgacgactcgtgccatactgtcatgcgaaactattttgtgatatgatcatcgcagtatacagcatctgaccagtactactactgattagaccaataattgcctcctattgtcagcagattattgttttatggaggatatatttgtagaatataattggaatggttcacaacttcacatctcctgcctctccaatgacatagtacaaagccagaatacgatatagagtggattgagatcggtgcagtcgtaattgcgactgcaccttaggactgcatccattttcagctatttatttttgtgatcaacagtacagatcaactgctaccgtactcgtgctatagtaccctgaacaatattttatgtcgtggtacttttgctacagcaaccggcctaatccttaccgttggatttagatccaacgtagcagctacagctgcttaagttacagtccatactactactgcatttgatccggatccaaatagagtcatccgaagtgaaataaaggactattgctacaatagcaaaacgcatagaccctttagcaattatactccctccgtctcaaaaaaaagacaaactctaggcttccgtgtccaacatttaaccgtccgtcttatttaaaaaaattatgaaaaaaaattaaaaagacaagtcacgcataaagtattaatcatgttttatcatctaacaacaatgaaaatactaattataaaaaaaatttcatataagacggacagtcaaacgttggacacggaaacccagagtttatcttttttttagacggagggagaattttgtagataagaagtgaaaaataaaggactattgctacctttcgtttaatgttatcaatcattttagcaaatttcacattaaacatgtagatgtctctaataacaaggttaccctcattaactatatcccaaatgtttcctaaagtagcagtagttgcctgcattgacaaacagagtagagatggaatgccacctctaaaactcatttgaaatgtgagagtgaagcattttgtatcgaaatgtgagagtgaagcatttcgatacaaaatatgaatattagaatgacaagtaatctacaataagagtagtactgattttaacagagtagtacaattgtgtataatatcttaggactcttaaattcgttgtaatatagaactaatgcaacaaaattaaattttatggcaaccattgcgataaacatcgtggtactaataggctattgcaataaattagtagtccttacgttaattaggagcaaccaaggagcccttaggtttattagggacaatgaagggaacaagcccgggtgctcaagtgaaaacgtcatagaccaatagattacttccttacattgtgattcaggtttcgatatagctcattgctgacatcggccgtgataaatttatgagcatgctgagctgggatcatggcgttagcaaagttatattcacaccacgtatagccgagtcaacaatcaatcaatcaaataaaatagtacagtacagtacatcgtgtttccgttactacgttctaaaatagctgctgctttttttaatcgcaaagaagttctctctcttttgaggacgcaaagaaaggttgatgctttcgccattcgcaagcgtaagcatattttgctaaaaatgctccggtgggggagagctgtcgatcccatctcaggagtgttttatattagtccccaagtcttaacgactttaaaggtcggggagtcctggtcaactttgccatgaccgcattagtttattaacaccccacgactaaactacgtattcctgcaattttcacaagatctaaccatcacccgtagttactacttcttccgtcttataatataagagattttaaatttttatttacactgtttaaccactcatcttattaaaaaaatttaaaattattatttactttttcttgacttactttattatctaaagtattttaatcacaatttttttgttttttatatttacacaaattttttaaataagataagtggttaaataatataaataaaaaattaaaatctcttattttatgaaacgggggagtagtaggccgtagcgtctccaaactctcgtcaggtatggacgcgatcgcgcgcaacggcggcgcacggcgcccgcaccccccgtgccttttaattaactctccttttgaccgtgccaggttaacctcacctcgcgaagcgaactggtctaccacaccaacacgaccacacgacacgatcgaggctcgcatggattttcgcattttcggtggacagagtagggtaggggcgtggagaggggaggtgagcggtggtgagccacacgagcagggcagcgcagaggatcgcggggtgcatgattgagcggaggggggaaggggtgtggtggggtcagtagtacgggggggggtgagcggtcggtgacgcggggtgagtccgcgtcagcgatgcctacctccgcgcgcctcacgtcacccgcgcgacctcacccgttcacgcgggccccaccaccaccaccgcctccctcgccgacgccctcgtttcgtacgactagaaagaatactccataatagaagagattttaagtttttttacattatttgatcactcgtcttatttaaattttttttgaaattattatttatttttttgacttactttattatccaaagcactttaagcacaattttttgttttttatatttacacaaattttttttgaataagacgagtggtcaaacaatacaaacaacaactcaaaatcccttatattattatattatgggatggagggagtacaatacagtactcctacgtactaaaaaaaccgggccgatgccatctttccgctaaaaaaacagtcgcgcgcagcgcagcagcagctgctgcggccggccaggcaacaagatgcaccgagttgccgagcaaaagaaaaaaaccttggggagatcgcggcgcatcgcggttgcgtctccgcgtcccgcgaccacggattttcctttttgcctgcgccgtttgcgttgcacgcggtgtgtgtgttacggcaacttctgtatcgtgtacctacgggacatatcggctcggcatgcgcaaagacggggaagccgaccgagcgagctggagcctgggaggaggagaggaggaggtggtgatttcgacggcctatccacagtacacacacgcgcctgcggcctctgccctgcgctgccccgccacctgtgctttggagacctccgtcccatattactcgtctttttaagtttttatttgtcaatgtttgatcattcgtcttatttaaaaaattttagaattattatttattttgtttatcatttgctttattatcaaaagtattttacatatgacttatctttttttatatttgcactaattttttaaataaaatgaatggtcaaacgttataaataaaaaatcaaaaatgtcatctattacgagacggaaggagtagtaggagaggataacgctgggggtttgcctctcttggccagggcacgacgtgatggcgtgagcctctcaccgtacatgtcacgtcgcgataaccatctgtccggccgctttctatgaggataaccacaaggaacagtaaaactaatcctgacaatccatgctattacaccgattctaaaatatatagtaattttaactacaaatatgaaggagcataattattttattttttaagctgctatattttaaaatttttacttttgttcaaattgatggttacaaattattatattttagaatagatggagtactgttattttcttcgagcacaagatcaacatgacaacattaacgtttggattgaactactttcttattcaacctaaacacgctaccaaattgttgaacggttattttttcaaaaaaactatttatacaaaaaattattttaaaatgataacattattatttaaatttgtaatagttaatagataagtagtcgttcaataatgatttatcttacggataagtataagctaacccctcatttaaacgcaaccttgttaccgctcttctggcaggatagactcaaatctagaccaataaatttctcacttgtttggtctaataggaattagggaagtcccaactctctatttaggatagtacttatagcattaactacattgccatgtaggacttttaacttatgtggtaccatattaattaagagagagagtgaagagatgaagaaactgggtctcatgcaaaacacagcttcaacacgagaacctatgcactagacactatcaagttttgcattgggagagaatattgtcttcataatagatgaagaataaatatgattggtagagaagagagatggtgtatttattaatggcccactttaacaaatcatgggttgtgaagtgtagtttctattgtgatgtcttattgacatggcaccatagacactgcttatggacactatgagttgggactgcccttatgctatcatacttatcacgaagaaaatgattttactggtctaaaagtatgaccaaaagttactataccttttattttagagtaaagtgtattagcggttcttaatcttatagggttgtgtcatataggtccctaaactctgaaaatggtctcagaacttgtcaaaatgtatcatctaagtcccaaattgacacatcccctttagatcctacatggcgctgatgtggtgtgccacatggacgtgacgtgtccttttattttttttccttcttttatttttctttttcttttccgttttcttctcattcttctttttttactttcttctgctcgggtcacagagaaaggagaataaaggggaaaaagagaagaaaaaaagaaaaagaaaaaaaaaataaatgtgtcccatttgtcagtcaaaataacaccacgtcatatttgtgtggcatgccacatcaacgtcacgtaggatcttgaagagggtgtggcgatttgagatctagatgacacactaggacaatttctggaacttgaatatatatcttgagagcttaagaatctggatgacacaccttacaagaaccgtccgtacactgtactttttttttattataacggatgtgttactagtaatttgttagggtcacctcatgttcgtgatctttcaacaacaagatcgtgtttaattcgacgaaaatgaccggtaatgccgagacaaggtggtgcaggctagtagcggtgaatgccttagatctctagtcagttttgtggtgttcgatcaatggatcagcccaacatcattagctcccagaggtatggtggaacgccacaggaaaggcgtgtgaagagaggcgatgccacggcatagcggcgagacgagagagagatagagagagagagagagagatgtggacggccgcagtgcacggcaaggaagggtacagactcccggtggggtgaccggggggtgaggtgatgtgtatggcaaaaagaaatgaaggagatgtgttggatgctgactgatctgaacagtagtgctactggaaaaatttaagctattttcgctcaataaaatatctaatactaggtgcataggaatatctgaacttgcacattttgagggctttttacagcacgtttaaattacttgatgctgtgagtgtacagcacatgaatggaatttttgtagactctctattgtaccacatactcatagaaaagagtctaatactggttgacaaataaccctactattggatctagattgactaaaatcacaaacactaaatagaaatagacttgccgtttgtgtagcgatgtatgtactctctccgcacctaaaagatttgtttcacagagactattttctaagtagatgtccattagatctttaatagtattttttttcgttttaaccttcaaacccagttgtactcccttctcttcctcatctttgattatcttaaacaatatcaataatattcttttatgaatagtgtgagtttaaaataaagtataccttttcctttaaaaattactagtttttaagttttttacttacagtatatattttttattaagatacatattttacctatgtttttttaacatgtttttaaaacagcttaacgatgtgtttcttaaaaacattttatgtataaaaattgctttaaaatataaaataaaaatactttcaagtttataataatataaactcatatgttaatagtttttgtattttacgtgtgtgctgacatcatcttcgtagcctcaaacacactctaatttatatttcacatgtattttactcatactatttcccaaaggcacgagagaggacggcaacaacaaaaagatcctcgcctccccacacctgaccctacccatcaaaatcctcctagacaactcactaaattatataccaccagtatgaaaaagaaactaaaaaaccatttttaaaaggtcccagatgaagaattcttttccaactcgatcccaacagaagaaaaggaaaaagaaatgaatagcaccgaggagaggacagacagaacaaatccatcggtctcctcctccctccgatttccccccttcgtcctcgtcgtcttcctcccatttttttttcctcctcctcctcctctcatccctcgccgcgagccaaagcccctggtttcctcgcaactgcctccccgcgattccgtttgacccccactgttcttctcccctaccaccaccaggtcgcagtcgcttccaatttccaaataattccctccactccggccgctcgcgaggaaagaaaaggatttctttttctctctctctctctctccccctctctccgagatccgtttcccaaacaggcggggggtcgaaagtgtttggtactttggtttggggagcttgtttgccgacgcggatctgcgtggagacgagcagaggggggagcgccggaattgggtggtttggcccgggaggcgccggaaagtgggggagcctttggattccccgaacccgccatggtgatccggcacgagtagtagtggtggtggtggtattagtagcagtg

SEQ ID NO: 7425 - DNA, 15384 bp, Oryza sativa
gacagaatacgcgctcgatcgatcgtccactagtatccccaaatttaggaaatctcttttctacgcacgcagcaaaatctaccatgccagacgatttaattaattaattctcggttgcgtgaaacaacatcactctctttttgtctcttctacaagcaatcccgaacaggtaggatcgattcgttcagaaaacactcacccgtagattgaggaacagccacgcaccgtgtaaacgacgcggatctggaccggtcgatcaacagcaagcgacgaccgcgatcgagcacagcacaagtcaccctgtcgaaacgagccactattcacccaaatccacgcggagtactccggagatagcgtcgaccaagcgcccgcgcgcggtgcactcgccggccggcgcgcggcgagccggggagcagacgctggcagctaccggcggcgaatcggaggaggaagggttggggatcgtgggggaactcgagtggtggtggtggtggtggacgcctcggtcttcgagtggagcgagccttcgagtgaaacacacaaacgcgtggcgtggcgtggcgtggcgtggatgctgcgactgcgactgcgacggttgggaagcggacggctacgagcccgtctccgttcttcctactgcggggacgaaacagacggtcggacgggcgtggtcgtcccgtcccgcgtgggagcccctcggcccctcggggcaatggcaagtggcttgataagttgatagctgccgtccgatgtcccgaagcttcggccaaagagcattgatgagatacgtgccattgcagaaaagggaagacgactatggccgtgttagttccttttcaatttttttaattatacggttacatatttaaattattaaacgtggactaataacaaaacaaattataaattccacccgtaaactgcgagacgaatctattaagactaattaatccgttattagtaaatgtttactgtatcaccacattgtcaaatcatggtgtaattaagctcaaaagattcgtctcgcaatttacatgcaaactgtacaatttcatattcgtttccactacaagaagtggattaaattttggattttcgtggcacgtttttcaaacggctaaacggtgtgtttcgtgtaaaaactttttatatgaaagttgttctaaaatatcagattaatccatttttcaagtttataacaattaaaacttaattaatcacacgttattaccacctcgttttgcatgaaacacttaatcttcatcttcatcttcaggagattcaaacaccaccttaatgctccatgcatatgtgtagacatttgatgtgatggaatttttggaagtttgaatggaactaaacacaacctatttacgagaagagtttagaaagtatatgttcctttcgatttcataattctgaatagccaacactgtccctactcctaaatttctacttcgggctcagtttagttattgagatttcaaaaacaagttctccaaattaatcatttgggttaacatagtccttagacccacaaaatatgccttattagcatgccaagtcattctcgaatgcaactatataaatgaaatgaccattctacccttataaaccatatagaaagaaagaaaagaaaaaaatagaggaaaaaagaaaacaaccaaaatgaacaagcaacctgttagttcaagtcagtctccacacatgctcttacgtattaccaggaataccattacaataatctgtaagaatcatttttactttcaaaaagaacatgccaatcgaaataaaggaggatcaaagttgttgattccgtccgtcatcggtccctgcccgacttgagataaaattggatgacaaatcaaactcgtatttgaaggcctcattatttggcttatgcttattcttataagctaaatttaaactttagaacttaattttggattcgattttttggttttttattgtactttattttaccataatagtttttgagtcactaagaacatatatataaaatatttgcacacatatattattttatttagtaataaatgattcggataagcacatgaataaaacgaaacaatgggttgtgattatttatccaccgacacatatgtacaaattaaattggctttaccgttgcaacgcgcggatatcttttctagttatattagaaaatcaaggttaaatatatattttgtagactgtgtcattgtccaaaacatcaacaattatatatggaaccgggcggagtattgtaacgccccgattttcgttcgggtttaaaaattattaaataatgcattttctagaaattaaataaaagttaaatcaatttaatcaagtgaaataatgggagaattaaaattttcccttaaaaatcaatggccgggaatattttgcaatattctttgtgccctaatgtactctccggaattttccgtgaattttcggagctcgagaaatagttttaatggcacaaagttcatcgaatcaattaaaataaaaagaaaagaaattaaaatcctctctcctctctttgggcccctttcggcccaacccctcctttctctccctctcgggcccggccgccctccttttcccctcctcccttctctttgggccgtcggcccggcttgccccctcctcgcgcaagtccgcttcgcctccctcatcctccctcctctccccgagccgccgacaggtgggccccacctgtcggggtcatccccaacctcaggccggcagctgccgttgccgccatggccgccgaaaaccgcccacgtcgccgccgtttccgcccacctcctccaccccgcgcgcgcgcgtttgtccgtgggacctcgccgcccacgtccgcgccgtttccccccactctccccgcaaaatccggccacgtcgccgcctcccgcgtctctctcttcccccacgacgccgccccacttcccctcgaaatccgccgctccccggccctctcctcgcccctttgagctataaaatcaatccccgtgctccccttgtccgtttccccatttttcccgagcccggcatactctccctcgctctccccacgccgcacccacgcgctgccacactccggcgagcttcggtcgccgtttcccgccgccacagccgtcgccgcgccgagccaccgccaccgccagcttcgccaccgcaaggggaagtccggccgcctcttatttccccctctccacccctcgagcaccactcccaccgcacacccgaggccgccgcccctttcaccgcctccagccgcgtcgcgccgccgcttcggtcgacgtcgactcgcgccgttgcctccctcagctccgcaaggacgaggaggaccttggccgccgcccctcttcgccggaaacccaccggaacggggtatctctcggtcgccggtgagccccaccattcctctcctctctggcgtggtattctcgccgctccggtcgcctatttctctccctaaccgctccaatattttccctaggtcttgccggccctcggccgcggctccgccatggtcgggcgtcgtcggaccgccgttcccgtcgcctcccgtgtcggccgccaccatctctttccgccgccagccgcctccctgtggtcgtctcgccgtcgccgtcctcggtgagaatccccaccgtcccttctccttttttttcctcctccgccgctccccgtgcccgctgccgcgatgcgccgctgtcgccggcggtcgtctggccgtacgccgccgcgcgctatcgctcggccgagccggtttcatgccgcgcccgtgccccagccgcgccgcctcgtggccgtccgatcggctttgggccgatccgggccgtcggttcccgtggactgaatggtgggccgcctcggtggtctcggtccacggtggaccgatacccttgacccgctgacgtgtggggccccgccctgtcggcagccggccctctttgatgacgtcagcgcttaagctttttcctttgaaaaattaaataataattgcgcaataaatcggtaataattgtagaaatccattaaaatggctcaaaacttctaaaattcatatctaattcattcgaactccgaattgagccattcaacttgcaaaattcatctaaaattgagctctacatgtttgtttagtttttatgtactgtttccttggtttttattagagtttttcctcgttttgcgtgccagcgtgtagaatccgtcatttcggaagtccgcggtcgcgaggaaaagagttcggaagattgtttgaagaagcaaggcaagtcacacattccccttgagcatgttgatcccaatttataaatgttttaccgtttgcaaataaacatgcatgtcttgctaattacatgggatccgggtattacctatttgctttcttgtgccatgtttacttgctatctgtcctttgtcagcattgggtaataaatcgactagctcatgttacttatgtgacctagctagaactgtatgcttagccatgcttaattaccactagctcagttgatgggataattgcagtattagacctcctagtatcatgacatgacgagctgcgtgctcgagacatccgaccatgtgtcatggtcgtaattatccaactaaaatgcgactgaatggtgggctgtgggtgcatggttttgctagtcgcacccatggcaattaaggaccggttcgcgggatgccctggaagaacttatcgtacttaccacaagccagcgtgggcaacggctgggcttgtagtgtagctttcctctagccgacgcatccaggcaagggtgggcgtgatggagtttggatgggccctgcgacggcctatgcggcttccggattcacctaggcacgagaggggactgcccgctgccttgcgaggagtgggggtgaaacctgaggtgtggtgtgcttggttagagggggttatgcgaagggtcctgtcacggcctctttccggtatgtcgtggtggcatgccggcgcacggaaacgtgtcgtggggctgtgtcttgtgggtacagttgtacacctctgatcagagtaaaactattcgaatagccgtgcccgcggttatgggcggtcgaccagattcaccgtgattagtcccaccttaataaatcgacccaatgcactgtagttcaggtgggttggttgggcatgttcaacgtggtgtagcgttgatcagtgcagattcaatattactttaattactcaactgttttactgttttgctcaataaaatgttttacaaccgcctttatgcaaatagccacaaaccgtccttgtgttccccttgcacgtctgcatcgttggtgtggcttgttgagtacggtggttgtactcagccttgctattattcccccttttcagaagtgtagtgcttctgagctgaagacgaagttagaagaccaaggctcagaccccagttgagttttgtctgtggagtggagctgaagccccgctaggatcgccttttccgctgctgctgcttttgtttcggtgtgaagactaagtgcctcttctgtaagtattttacgctttatttacgtttggaactgtatattacttgtcgttttgtgtaccctggctggtcctggacagggatttaatacacaaaatagtctggaaatttgggctaaatttctgggcgtgacaagtatgattttgtaaatctacatgattaaggacccgttttaacatgccgaaagcaaattaagtgcgggtacataaaacaaaagttattagcatatagggagtgaatcttaaactttcgagggacgtccgtcattgattgcaatgtcacttaaatagttatgaaaaaaaataagaagatgtattaacgtgtgatatatcactctataaacatgcaacttaaaattcaacttgtacatgtcgcaaaaaaattgattgtgaatatacgttaactagctataatttaatttgtttttttgttgtgatatgtagaagttgaatgtttgtgaagtgatatatcacatataatacatcttctcaattttttttataaactatttgagtgtatgcaaacaacgaggggtcatcccctcgtatgaataattgagtcttagttatttcaaacttgaaaaatgaatttatatgatactttaaagccacttctatatataaagttttgttatgaaatacattctttagcagtttgcaaaaatcgtaatcatgtttaaacaggtgtaagtgttgtaatatggagtttagaggttgtccagatttattgtcttagattatctaattcttttttagattggtttattttgagtcgagacgagttgttgctagcttaactgtgaagaccgagatttaggccctgttgggagcttgtgccagcccaaaagctgcttctgctagaagctgccccaaacagtccacaacttctgagaatctatagttacatatactaaaaaatgaactaagaaaacagaagctggagaagctgggtttcagagctttttcagatcctatttcttagaatgtaaagctcaccgaacagacccttaatggaaatgttcggttgatcttccaagcgggaagtccagcactcatttttctgcttcgttcacgcgacggtacgacgccatttgacaattagaaggtgtagtacattgtctttgccttctctacatatgaccagacaaaatgaaaagaaacatactttctagattggcaaatattcatgtagtatatgtcacgtaattaatctcagactagtctagtacggtacaacgacagcaagacaaacggcggccaatggctcagaggcgcatgtcgccgacagtgacgccaattgattcattgcttcgggtgaggcatcagcgagcgtacatcgatcgatagtgaacttagtgatgactaaacgctacaaatcgctgcacatatatatcaatcatggacaaatgcagattaattgtcacggacaatgacgagcacttgaaaaaaacggctcatatattgtaccatgtcagctgaaaaatattcaaaataaccgtgggcggtacgcagcggcgagaaatgtctaccatgcgcgaagaaaaatggagcagataagatagctacgtgctgttcattttacggaagcaaaatagtttacctttggttgagtgattcatatcctgcatactatattcaaaattaaataaccgtttgtccgttttcaccatcaaaatcgtttgttccatatccgtcgcttccagaattatggttgcatagtgttagtgtatggctgtgtttggatacaaacttcagttcttttccatcacatcaacatgtcatacatacacaatttttcagtcatatcatctctaatttcaaccaaaatccaaactttacactgaactaaagatagcctattattagtagtcagtagagtacaaaacttcacgtcaattttttgcttttttttaaaaaaacaagtcatctccaagtcgtcacgtcatcaccgtaatgatcggctaaggtggtgtttggatctagggacttaactttagtccatatatttagatactaatttagagtattaaatatagactacttacaaaactaattatacaaatgaaagctaattcacgagacaatttttttaagcctaattaatccatgattagagaatgtttactgtagcatcacataggctaatcatggattaattagactcaatagattcgtctcacgaattagtctaagattatagatggtttttattaatagtctaagtttaatatttataattagtgtccaaacatccgatgtgatagatacttaaaattagtcccatctaaacagagtctaaagctagcatttcgcggaacgcgtcgtctaaggaaatctatgacagccaattgaattcctcgtagtacatgtccaagctcatcttatgctcatgcatcacagacaagtgataaattggcattttactattcgtactttgaccgataatgacatacagtagtaaaattgagcagcaaaggttagtgtccttgtaacactctgcacctggtttagtgatatgtcttccagataacaccaggaatatgagttaagataacaaaaactctgccctagtcaggaatatgatgatgtggatattgaccgtaaggcagggtccataccgaacatgcataattcttcaaaaattcacgggaatttcaatcggtttgttgcttacagtatcacatattgcagaatttgaattaagattactgaattgttagtacaagagcatgcatgacgccattcccctggactcctagttccattagtacaaggactgggcttacgagatacagtaagaaactacaaggacggcgctcacgacaagcacttgaattagtagaatccaagagcatgacaccgtttcccttgtaccgttaataccgctgcttcaacttgcttccttttttcttcccttctaaagtcagcgagtacttttccggttgcaatgaacatgaacttgtacatcacaattcacagcctccaagcagcttccagctaagcaagcagctacagtaaacttaagtcgaaggtgctagtgtctagtaggctacttgctggccgactgttatgcggataataaatcgtacgatgtatcagtataaaagggtgaaaagggatataatctattggttatggtgacctgagtaacatcctaatgttttgagtttaaatcttcatatgagtgaattttagattgatatatcccaaagtctttagttcaaatctccttagcagtaaatttcagactgagttgtttgcgggactaacgccgcatttgtttctctagcttgggaactcattccctccgaaaaaaaacggagcagtccattagcgcataattaattaaatatgagttttttttttcaaaaatgggtcaatatgatttttaagcaactttcatatataatttttttttgcaaaaaaacaccatttagcagtttgaaaagcgtatgcgcggaacacgagggaaatggttgggaacaaagagcaacgaacatagcctaagttaccaatttgaatgacctcgtatatctgattggatgcggatgccagacaaaaatccccttctctaaaataaataaataaatttgtataaaaagtatttatggatacattttatatacatatgttattagtgtcagtgtcagggttatgataccatatacctaatagtaattgactaaatctcggcaggacccaccacataccatgtcctatacggaaacaacctgcggatataggagaagttcttgataaggaaagacaacctgagttctacatgaaaacaacaaggattactcgaattgtatccatattggtttccttagttctacttggacaaagggacacctatgggtataaatacaaggccccataggaggagaggggacgatcaacacccgagacaatcaacacccaccacaatctacggaacaatagatcaagacagaagccacaacatacaagccaacacacgctaagacaagacgccagatatcgacttcagagataggcacggctagtcccctacggtgtttctaggtactgtcaggagagacgaaagcgctatctctgatctcgccgggcacgaacttaaggaggaaggctaccctgttgtcgactacgagtcagaccttcagactaccatgtcgacaacagttagatacgctaccccaaatattgtactagtgtgattatggtgaataagagtaatactggcttcaaccaacaggatgtaaggttattacctgacaattcaggggcccgaacctgtataaaaatcctcgtctccgtctcttttacctcagtctcacgtatatcctagtaccaacgatccccataccatgcaaataccgaaatcgtgacatcaaacgtcgacaattagtgattagaagataatgctgaaaactaataagagggcttagagaatgcacaaaatggatgaatcaaccagcaatggggtgtaccgtgtaccgtcagaaaccgtggttgccgccttgccggccgccatatcgccttgcatccgcttgccacttgccaattcgcatgggtgtgtggccgtctgtgtgtgaggcgtccaaacggttgtttcttggctccctgcctgagcatgtttaaatgatggtcatgatctgacctgacacgtgggctaatccacgtcatccacgtgcgtggaagatcaaactaaaaattgacactccctccctccctaaacaatattacaatcactttcaaactttgacatggtttctaatatgccattttcaccaaattatttccaataaaaagagtctcatattatattacatattataatagtttgtttaaagataagactattaacaccattttcacgatatcaatatttatgatcttttattgatcgttaaagttaaaaagtgtttatatttgtttaacggagagagtagaatattcagtatattggttaccagatggaacttcacttgttgccacggaaatataggttcatagaagagagaatttagaacatagattgatcatttaaaaaacctaaaaattagttgttgtggcatcatgggaaaagagaaatagtaaagataatgtagaacataaattaattctcggagtgctagaaacaattaatataatataacttaaggagagaagagagatgacaatgatttgtaaagaagaaatcactaaaccttacgcatagtgttaaaatgtcataaactaacgaaatgctttaacttaggaataataaaatgagtgaacaacactttaaaccaccatttattatccaaactctctttgcaagtacatcaatagtctcaagaagacggtacggtcggtaccctcatgcggatgttctcttttacttcatccccctaaaaaaaagccaatctagaagaagatgtgacccctcctaatacaatcctaattcgttgtggtaggaggggtcacatcctcttctagattagcttttttttttttacggaggaacccgtacatgaggaaaagttggatacttggattggatatactagccagacaaaagtgaaaaaaaaatgtataaaatgtgatctaaaataaactttgggtaataaaacgtggcaaaccatctcatgccgaaaactaaaaacagacactgttaaatctctcgagcatcatgctatcacaacggtgtataattttaagcattcgtcagtgatatatcacaggatagcgcatgtactgtgcttcaaagccgagttgcttcaagctaacttctagagagttttgacttcagttttatgagttccagtttacgctttgttcctttttttttccactgtacaaatacatatccatttacattcatcaccgttacatcaagatgaaaatagagagaaatttcagattctatggacgttcaaatgctgattatactccagccaaaaataataataaaaaaaagctgattatactctcgcaaaaaaaaaaactgattatacactggcagtagcagtacatgtattatacacttcgcttagcgcgcgaaggcctcggtccccaccttaatggcgccaaacccgccggcgcgcgccgctaggccgtctgccgaggcgccccgcctcaccggcggcgtggccttcagcgtggtgtccgcgacgaactcgcacggcgcgtcctcggcgatggtccccatcgccgcgcccttcttcctcggcgccgggacggcggccgccgcctcctcgaagggccccttcttccccgccggcgcctcgcgataatacccaaccttcttggctgcccccaccgccggctcggccgcgacgcgccgctgcctcgacgcggcgcggacgaggtcgtcgacgtcgcgggagctcagcccccgcaggcgcatcgtcgccgtcgcggtcgccggcctgccgaacccgcggccgaccgcgacggcctccatcgccgccggcacgcggcccgcgcacccggacatgccgcgcacgtagaggtcgcaggccgagtcgcacgcccgcgacagcgcccggaacggcgcccccaggcacccgccgccgccgctcccgcccttcttcttcatctctctccgctccggccgctccgcgcgcgctgcgtcgaattggcttctcgcgctggcacgaggaagagtggctcgctgtcctactactactagtagtactagctttgattgctttggtcggcttcgggatttcgtctacggggctcgaggcttcccgttttatagagcaatgtcaacgggtggcggtgacgtcggcgaggagacgaaggcggcatctcgttccatcgcgtctccacctggttgcaaagtcttgaattggcaatctgctccgctcatcggtggggccgatcgaggcggttttcaggcgcgggtttaactcatggaaatggtcaggtttcgcgtgtatttttgctcgatttcgtccacggttttgggataggatcgattgatcgagatggcaaggttgagcagagctgtgtcgggagaatttaggatattcctcggtaaattcaataaattttagttgaatttgactgtttcaaacttaaattcctgagagagaaatcccctaatcttaaagtattgagaacaattcggaaattttacttggagtctactttcatcccataatggaaccttaaaattttatggttttcgattggttttcgtcgaaaacgtaaagatcggtgagcggtgaggtgcaccttgtctgagtcagttcaagttaacagtgtgtgtggaaatgtgattaagttattacgttcagctaagccgtcgcagttgcttgtttcagcgctgcaactgcaaagtggaaagggtaaaaaggagtcatcaaatctgttggaagaaatgcgatgttattagttctttatgatgctatatgctaatctttcttgcccgtgagagaagttaccgtaagctggctgttgatgttggaattgcgaagacctaaggcgaaaaatggcagaaaaacacaccgccgtcacatcatgttaaaagcgaagaaatgttgagcgcgttaaggaatggactaggagcaagtgatgaagtgaaacactgatgagaagctttgctttaccaggacattttcatttttgtgcgtttctgtaaagccatttcgtttcgatgacacagagaatttttcattttgagacttgaagaagagtacctgtcctcgagaatccagagcttgacatttcgcaccaagacaatcactcaaaatgcgcgtgttaaattttcccagagataagagactgttcagttctcagaaagaaataaaacgtctgaactcttgtccaaagccaaaccgtctgctcaatcttttttttccgggctggcgaaaagatgccaaccgatttttattaagcaaagcactccatcttaaaatataacaactgatagctttcataatttatttaaaatataacaacttcttcacaaatattcttttctcaaccaatcataatccttcaccattcaaaattttccatttaccttcccttctccgccaatcaacattctcattaactatatataaatctaaaacttcttatattctgatacagatgtaatacattaccagagatacaatgaggaagaccatatataatgcattaaaggggttcaatgagacaaatcctccactcagcctgcccaacgacacccactctagctgcaacgatgttcctatcatcgcgcccttccttttcgcggtgcgtcttaagacggtcaccttgcaataaataaccttcttggttgttcctatagtaagcttcggttcggtcttgatttagcacagcggacgaggctgttgtcatcgagaggaggtgagggaacaagtttcataatatagtcaaatgccagctttaaaaaattgacgcatcatttacatccactctaatagtctacccatataattattttattaaatatatatcgcacaattaatacttaacccacctctcatacaaacgtaatatatttgaattccgtactgctcgtttttgttctatcttcttttctcactccacatgtatttatttctcactcctccatatgtatttataggtgtacttggtcttaagagagagtacagaataagaagctagtgcgcaggccaaggaggaggtagacaaggctagtggatgattgattcgtgcgattagatcaaactcattccttcttagggtgtgtttaggtcatactaaaattgtaattaaatttgattaaaattgaaacgatgtgtttaaaaagttggaagtttatatgtgtaggaaagttttgttgtgatgaaaaagttggaagtttgaagaattattttggaactaaacacggccataatcccggtagtcttcggcttttacatttttattctttgaattcctacatgggttcatgatcatctcgtttttcctttttcagcagaccaaaacagttcagtttacacggtctaaattcggtcccctttggtaggctgttttttaaaacagcttgtatagttgtatgtatattttgccttatcttttataattgttttaattcgtgccaagtttgtaagtataaaagttatatatacataattttttttcactggctaagagtacgtggaccataattcattgggtaattttaccattcttgaaaagttactaaaagttattacactttctattgtgaaatttggtacctctagataagtacctcaatgtaaaaaatttatgtaaaatttagatatctcaagatacttttttaagaaccataaaattttcataattgaaaaggaaacagcccgaaaaagaaatgtaggcgggcctaccactaccagtacacattcgtgagtatcgtcgatcctgcgttttacagagaaaataaactattttggacaacattacagacaggaaaatttactgatagagtcctaaaatttccaacaataccttggacgtattaggggagcttaaaattctaaaaaacaattggtcagtagccagtttctgagaatctgaaaaagttggatttcacagcttctagcttctaattcattttctggattctacaagtacagtttcttagaatctaaataactgtacttgtagaatccagaaaactaaactgttcggaagagcttctgattttggaagaagttgcagtagttagaaactcccccaaacagacccttagggtgtgtttgagaaggagaggattgaggagattgagaagatacgcaaaacgaggtaagccattcgcacatgattaattgagtattaattattttaaacttcaaaaatagattaatatgattttttaaagcaactttcctatagaaattttttttgcaaaaaac

SEQ ID NO: 7426 - DNA, 26253 bp, Oryza sativa
gtcgtagcgcgccgagcgtacctcgcgaagaaggcgggtccggggaaggtctgggagggagcagcccgcctctccgccgtcgcccgcctcgtccgcctattcgccgccacccgcctcgcccacctctccaccgctgctcgcctcgcccgcctctccgccgccgcccacttgcctctccgcctcgttcgccaccgcccgcccccgctcaccgtcgaccgcaccgccgtgcgcaccgtccgccactgtcatgccgactgccgagagagtgaggtcgatggcgtcgatgctgtccaattttttttaacaaaatctatcataattgcttcgaatttgacaatttttagtaaaatctttcaaaatgaattaaatttctcaaatttatgccaaatctgtcataattggggcacattttatttaatttattttcacaaaattctgtcaaatttaagtcaaatttcacaaaatgattcgaatctgtcaaattaatgccaaatctgttacttgagcaaaaattattacaaatatttcaacattgttgaatatatacagtcaaacaagcaaacaaaagggatataacagggtcaaataagcaagggcaaaatggactatttacccctaaattaacaccgtcacctcacccaaacggaatagggtcagaccggagcttcgtactcgaaaaggagggtcaaataagcaaagttcaaaagtagggccaattcggcaattacagttcaaaacagggtcaaataagcaattgcccctataaattagcaaacgatagcacattcaaacattaagagaaattatgaatatgagtttcgttcaatctttgaatttgatatggacagaaaaacttgataattacccctcatctgttatctttgtgcaatggcacatgatatgtttgcgtcaaccttatgggatgtagaagagactaaatatcagactatctcctttcctgcatcatcagtgcctctctacaaaaggctgtcaacagagctctcaagctgaacaacacaaaattcagaggaaaatttcttacagaataagttcattaaaaattatctttgttaaaattaacccttgtaaaatcgactgagaatgtcccatcagaaagcaagacaaaagcccctttctcatacatcaagttacaacaaatctttctcgtttttgcttcatcataattcattcaaatagtacataaatgctatgagaactgagaaatatccatgcactcttttcatcaaaaatcgtaattcagttccctaatagggaaaataatgctttattagtacactaaaatcataatctactcccatttgttcaaagtttgttacattttgggacggagataatactttacttcattcaaataataacactagttcaattcccaagtataaatgggtaagacagataatactttgtcacacacacacacacacacacacacacacacacacacacacacacacacacacacacacacacacacacacacacacacacacacacacacacacacacacacacacacatatatatatatatatatatatatatatatatatatatatatatatatatatatatatatatttgcacacaatttatatcaaaaatcaaatggccacaactgccctgcttctgacaaatacaataatactaggtttcttagcaattaaagaatactatttttctttagcgtttctataaaactaaaaaaaaatacaaacgtcgtgaagaaagtacaagtttcagaattgaattttcgtataatcagtattcagtaggctccagtacatcaatcagccccttgttaccaccaccatttacattagatatttagagacagtgtaagggagcgttgcagcatagaatgcagatcagtacaactgtagaaggcaaccactctgtctacgaatgagttgaaacgcatggagcagaaaaagggttggatcttggatgggaatgggatcaacaagaccaagctagtttacagctcgcagcatccagctgaggtacgatccttgtgtcctgataatacgactcctcgtgccatcccaggacctcctcgtcgtcgtcaatggcaagagggccggaacgacggggatgtacgcgactacgcggccgcagacgcgcccggtgtgcggccgtgcggcaagccggcaagtcggtggtgagagcaaggtgttgcatcggctgtgtggcggagagacagcggccggcgtcaagaagaggcaaatgcacctgtgaagcttctggcgcgggagagcagaggaggggcggcggcggtaggagagtaggagagactagagaggagactgcggcgaccggccggcccgtgctctgatggaccgttcgggctagatccaacggtagaaatcgctccagcctccagtcccaccacggatggtaacagttttgcataaagcccccttcttatctatgatcgcgctaccactggaacactggaagtggacctatttgttttcataaaaccccctattttgccctaagttgtgcataacccccccccccccacctgttttggaccgctacagtatttcgctaccaatgagtacagtacagaattgggctatttcaaaaagatccctggtagtgatattttatgcgatgtgtatccttcccgagcacgcacactcgccgccgcactccacttccccaacacgccgccgccgccgccgccgcccgagctcgccgcgatgtcatggctcgcgcgctcaatcgcggctaccctctcttcttcccactctgatgaagatggcgataacctcgaggcgagcagcggcgacgaccatagggacgagcagccggacaccccgagcggcggcggcggcggagtcaagggcgacttgtcggagctgaccgactccctcacccgcggcctctggggcgtcgcttccttcctcgctccgccgcctgcgcccgccgccgaagccgcggagacggctacgggggcggtgggggagggggaggatggggctcggtcgccgcggatcgccgggatccggagcgacctggcggagatcgggggcagggtgaggagcggaatctcgttgctctcgaacgccaacgccgtggcggagatctccaagatcgcctcgtcgctcctgccgttcgggcccggagaggacgacgacgacgacgacgatgccgaggctgtgggcgtgaccgaggaggtggtggagttcgtgaggcacatctcgacccatcccgagacgtggctcgacttccccttgtttgtcaacgaccggcacgcggatggtaagaggcagtagtatgaaacttctcttcctggatctcttcagcgtttgtagtgctttggtttgcttgcatagaatgctggattggttattttggtctattatacattcatttaggagaccattggttccagttgcttcagtgcttaggcttcttgctctgttcgctctgatactaagattgtgggatcttctgtcataattttagcagcttggctccagtcatgtttatttactaaggtttaatgtgggaagggtagttacttacaattaagagtggcactcaattcttaagatcatgttattttgaaattgagttcatttgtttacatgtatgaaggtttgccaggaaattgtaattcatgttaatagaaacttttattacttcatgtggttgcatttgctgatgttagttagacagagtaggtacatgaactgaggtgggttaatcgtttgttttactctagtatcgctagggctgtagttcaaaatttcacatttggattgtattaattcaaagggataattagtaaatagaaagttcgtttgccaaaatgaaaaaaagagagtaggaatggcttgtaattaaggaaggtttaaaagtatcgaacacaaaccttaatgtcgcatttcagtaatcttgctttttgtaaaaatgtctaatgagacttagatcacttgacatgtaagaactgtatgaaaccatcatttctgctgatacatcagtattaactatgcatttatcagaggctgtatgctataatcgacttcaccggagacattgagaaacaataaattaaacgagggacaaactattacacaaacttgtaacacacatacaacactgcaatctgattaatcacctaaccaacaaggcaacatcagaataggggttttgtcacaaattaattcaactgtcgaatcatcactttaacctttagtgttactatttcggtcaaatagctccaagagttgaatgctccctacactttgtggaagtctagctatatccaaggattcaacgtcgctaatgatgtgattacatgtgcaaaatctaatgggatcaaagtatatttcatccaacaaatttattatacattagcttttttacatgggtttaatatatgaatttctaatgttctgttatttatagcatgatcactacttgcccctgtctctcagaaatgctgaccatggtttcctatttttatttgcttttataccttttggttctaacttgccatagtactaggtaacaactgtgttctggaaattggaatggctagaactcgttaacctgttacatatgcatatggccatcttcaatatgtagggaattactgttaaatggaggccatgcatgtatattgttccatcatgtcagtcatgccttacttgtcgtgcctgactggtttcctcaattcctttgcttactgcaatgcttcttgcgtacagattttgaactgtcagacacacaatatggacatgcattggctatagagcgtgttgttccaagcttgtcatatcttaggaccgagctttgctctaccaatatgagtgaagcatgcttttggaagatctattttgtgcttcttcactcaaaactcagcaagcaagatgctgaacttctttcaacgccacaggtatattccctgctcttcagcatattctgtctttatggcaaacattcttaagtaattacggattatcatgtcaacttgttacaatgcatgctttcctacacatagccccataaccttttttttttaacaaaccgtctatgcatatatattaccaaatggtatatcttgtttccaagttacaaactatgataagtcaggtgtgtaaggagaatgtaactatgtatgaacttaagaatgtaagttaccgaagcccaaaagttgcattagattgtggctgccagtgtgggagcataaacatagaggattacttttatgcttgtgtaagcgtacaatcaatatttgggctccacttctcattatagcatcaaaattgggcattcttcacttctcattgtagcatcaagaatttgttgcaagtttcaaccgacaaaacaaagctaaactacaggcatatatttagttaattatcatgttgaatatatccagtcttgtcaattcttttggtggaaacacttggcagtgctgaaaaatcatagccttccaaagggaaatatcagtgacgttgtagaactctaaaccagtatccagaacagcaggaggatatgcttgagaccttcgtatttgtgattttgaactgattttatattatatgttcggaattatgcatctaagcatgtagatctgcattcccaatttaattatgtatgctatcagcacatgtgaaggctgtgtaacgtttgattactaatcatatagtccatgtatgcatgcccctatagctcacgttgagaacatgtaacagatgtatagattgtcgatcatactgtatattttgttgttaagttactatcagtatatatgcagtagcaattttcttgtaattagtaccctatctcgcacccccccccccaaaaaaaaaaaaaatttcccaggatttgattttttttgtgggatacagggagtacattgtaacagaaaatccttattgcattgtttttactccactggaaggtccattgcgcatacacttttgctgcatttcaccttctttatcttttatttcattcagatcctaaaagcaagagaagtattattgcaaagttcaccgacaaagaaaaggctgggacctgatgatggttcatcacaaaactggaatgttgcatctaccaaaggtgacaacagtggaatgtctgaagcaccttcattggaagaagcaacttctgtaccgatgaatgtggttgaggctgacaagcatccgatttcagtcgctgaggtggaaataatagacaagtccgtggttgaagaagagctggtggtgaaaaatgagaccaagagtataccttctgactctgagaaggctaatctgcatatcacctcggacgatgatgataaagaggtggaggactggctgaaggatgtggctcctgtgtccagcaaaacaggcaacgtcaattcagcagggcaggaggaagacatatccttcagtgatctggaggatgaagaggatgattgagagacggctagcttaagcagcgcagccagtactagttccctcggttcaatgtcgcaaacacaagacaacggctagcttcatgaagaacatcaactgttactgaatgatcgaaactctgcagctacagcaaagggaaccgtgttgttgctgagtgacggattcatcctaattgcatgttgatgtaatgatgtatttatgttcgctctctttttgtacatagatatatacactatgtcacctgcgtgtgcactgtatatccacgatagcgtgcagcactcatacttactggattctgaatgcaagatatcctctcatttgctgtcaaatgtcttagaatatcttatgacgcatttaagctggcactacgcaaaactcgacacacttcccctcttactctagtgctatacgaaattcgaagctgatatacttatctacccggtattccctcgtctctaatgataacattcgtgatttatatgtcgtcgtcatcagcagtttccaatgtcgacatacatctgcatccccaaaacagtctctgtaccgctaactccagcagagcggaccataaaccgctcgacgcctcgacggagcggagcggaggcggacgacaccacgccaacggctcacgtttctcgctctcgctgcctcgacatgcaatgcaaacgcgcgtgccgcgcggctatcaaccgccgaaacgcctaacgccggcgctgaccctccccgtcccctcccctacctggcccctgcagggtgtggtccccactccgcgccttgcttctgctgcgggctccacctgtcagccatccccaggctgcttctgctgcgggcgtcgcgtgtgctacgtgacgacaagcgccatctctcctcgcctgattacaaaagcacacgcgctccgcgttcgcgttgcctctatcgcgcttccaccattcggccgcatcagtttctggtcaccacgctctcgctcgctagcttcgtcggagagaccgagagatcgatcatggaggcggaggcggagacgacggtggccgtgacgacgggcggcgagggggagatcgtgagggggaggaagctgctgagccacggcaaggtgttcgtgggaggggtgccgctggggacgagcgagtccgagctccgcgcccacttctcgcggttcggcacggtggccttcgtcggcgcgcccaagaacaagcagacgggcgccgcgcgcggcttcgcgttcgtgcagttcgtcaaccccgacgacgccgccgccgccatcgccgcggggcccgaccgcaacgtcatccgcggcaccacggtatacacacgcacaccccaggccagatccggtcctgatcgatctcatgcatcaatcacacacgctatcttctcatctcttcgatctccgtcgggtgatctcactcgatctgtccttgatttacatgttctcgtcctcttgcatcatgcatgctttgcttccgcggcccgggtgcaagtgaaagagcgtgggatcatcgattttttgctttgctgcgacgaggttggcttcttgcgttgttgcatggtggacttagctcgtagcatcgtgttgctcggcggcgcggtgggttagtttctgttcagtactcgtcgtcgacctgtgaccagttgaccgcagtattagttaactcttaagtcttaactaagtgatggttagagcttgattagaaatggtatgcttttggtgatatgttaattctgtctatatgcgtccttggtatcataaatttacgtgtagctgcgaattacagctgacctgtgtttgaatcataatttagatgtaattattatagattagtggtaagagtatgattcgttctgctcatatacaattgattgtatttaaggcattgtaaagttatttttagctctgacgaaaactttagttcttactgttaatttctttctttgtgacttactttgctaatgtggttcgtcgtccacaggagtaaaaggtgtcccttattattagctaactgggattgtttgattttcacgtgttgtgcccaagtgttacgaatgaattacattatacttttatattaaactagcatagtggcccacagaaattgcgcagcgagcatccttatattttctcttatataatagcatatattttttcttattttattcttaaaatatattaaaataataacataattttaattttgtactaactttaccaaactaccaatgtataatatttatattgtattgtatatacatgatagttattaattatttagtatcggagtttggttatttctaaattatatttctatatggagtttagactcatcttccaatattctttattttttaattctaaatttctattacttataaaatttattcctatatttctcattttaaaatttagaatttcagttatttctaaattatactcatgtgtggactctaaactcctcttccaatattccttttttttaattaggaattttctttatttgtaaattgtatttttatatgaactctaggcttttatcccaatatttcttattttttaattatgaattttcattatttctaattgtatttctatgtggactctaaactcatatttcaatattctttatttttttatttctgattttcagcaacttctaaattatattcctatatggactttgtactcttcttccagtatatattttataatttcaaatcttagttatttataaattatatttctatatggactctaaactctaattttaattttattatttttatttcaaattttaattaattctaaattcctatatggactttatactcttcttccaatattccttactttcttattccgaatttcaattatttcttacttgtaatcctatatgaactctatactcttcgtctaatattctttattttttcattccgaatttcagttatttctaaattgtatttccatattgactctatactcttctttcaatattcgtttttattttgaatttcaattattactaaattttatttctatattgactctatacaccacaaatggacctttaatttgatatgtagctagcctgcttgcgtgtagttgtagtttacgatcgatttgccactcacatggattcacttcatgtaggaccaccaggcctcgcgcgcgcgtgtgtgtgtgggtgcgcgcgggtgtgtttgtgtgtgtgacacaatatatttttcatacttactaattatattcgaacacatgagctgttctctagtacatacaatgttgatcaactctactggttttttccccagatggatatcaagttagcccaactaaagccatcagccggcggcccacaactcagtccaggtgaccagaagaggaagattttcgttggcggcttgccggtgtccgccaccgaaaagaagctcaaagaatacttcaacaaattcggcgaggtcaatcgggcaatcgtggtcatcgaccttaacacgaagatgcccagggggttcggcttcatccagttcgcatcggaggagtccacagcgagggcgctcaagaaggacaaacacttcctctgtggccagtgggtggaggtgagccttgcaatgcccaagcagcagaatgcagcttctggcactagcaaattgtcagttcaggctcgcccgttttatccgacgacatcatcaaacttcacaaccgccgctaattatcctgacgtcgttaatattgtccctatggtgacacctatgaactgcgtcatcagcaatgcttttaaccctcatatcggctttgaggtacccgggatgatacttagtgatggtgtgagcaattctgtcagtgctaattactcctaccagaacccctacttgggaggtggtggtgttcagcctcaaggctcggcggtgtatcttcaagcagcacattattatagtggtgtgatgatgtgaagctcagaagctgttccaatctatgcctaattatcaagtcatagtgtcacacaatatatgtggtttatttacttcatttaattttcttcaatcttgcttgttcgtttaaagaactcatggtatttagtttcaactatttgctctggcgaagttcgatgtactcacttccctgaatttttcgatgtgtgtaatagtgagctaggtcgggaagaattatgatttcttaactaactatctaaatggctagatatatataatctctatacacagactttcaagttaagtttttaatagttttgggtgtcaagtgttttcccaaggtttatttacctttgtttcttaaacatcatgtccagctcatttttgtaagaacataattttgaaaacatgcatatgctttttatttatgtcattcttaagtactcattttcagatcttttacatatgcatatgtttagtattcggtacttaagagtgatttatggtccttgatagaggtacgaataactcctcttttaatctcaaggagggatgtaaatcacttcagcaaacataaaagtggacattttatgttgtctatggactatatgcatggcaattgattgtatttatacaaggtttctaaataagcaagaacaatgcatgcataccatagtgaaatgcagatcaacgtgtgtgctaaattaataagtccagatagattaacgtgttcaattaatattcagattagtacatatatatctccattaatattcctgctgttgctacataaaaaatataaattgactacatatggataaatatattgttctaaagcatttttcacaattttattttaactttttttatgtaatggaagtaattaacttctcgctacagcagattaaactatgtatatgtgcatggatcacattgccattcataagtttttaccaattaagatatatattatgcgctaccaatgcccatttatctactagtcaactgtgtgtcatcacattaaatttcagagattactgttattggtcaaaattgacaaatatatatagtcaaatgagacgctttcgtgcctttttaatttatgatcactcgttaacatttcgttatagttgattaacaaaaacaatgcgattgactatattcttttgttgagcagataacaaaactcctgatcgatattgtgggaatgtgggttcgctcttcaattctctctattattgattggctgtgaaggctgtttcccaagcgattgatatggtcatctggctagctgtttgaagactagctagctaagttgatcatactgttgaatgaagccaaaatattttcccttttttgttaattacatcatcatcatttatctagaattcctgattatgttggctactcgtacctgctgcatgcatggtctaggatcatatgaacttttttctttttctgaacgttgagaaaagaacctgctaatatgttaatctggtgttgtctggcgtgtatatgcagccggatatatatacatgtatatgaaggaactgccaacatgggttaatcagcggtaacatttgcatttctcatgacacattttgaagctttttcttcttgagctatcattatggttacccaggaggcagccagctagcaggtattgcttctgaagaaataatgatgatacatgatccatattgcatctaactagttataactaccattgctatctcctggtcctgacgtatctgcaggtaacgaacgaactgacaatgcaccatcaggcatcgatcagatcacaccacaagccaccgtggctcagaccttgggtcaacacggcccgacccacgtgcatccctaccgctgaccctctcctccctcccctcccctagctacctggccctgcagggtgtggtccccactccgcgtcttgctttcccggagaggcggagacgccggccccacctgtcagtcatcctcaggcggctttgggctttggctgcgtgcgtcgcgtgtgctgcgtgacgaccgcaccatgtctctcctcgcctgattacaaaaacacacgctccgcgcgcgttcgcgttgcctcgatcgcgcttccacaattcggccgcatcagtttctggtcatcacgctcgctcgctctctcgctcgctagcttcgtcggagagatcccgagagatcatggaggcggaggcggagacgtcgacggtgaccgtgacgacgggcggcgagggggaggaagctgctgagccacggcaaggtgttcgtgggaggggtgccgctggggacaagcgagtccgagctccgcgcccacttctcgcagttcggcacggtggccttcgtcggcgcgcccaagaacaagcgcttcgtgcatgcagttcgtgaaccccgacgacgccgccgccgccatcgccgcgggacccaaccgcaacgtccgtccttcgcggcaccacggtatacacacacacataccccagatcatccggtcctcccatcgatcacacgctctcgtctcatctcttcttctccgtcgggtgatcgatctcactcgatgtgtccttgatttacatgttcttgtcctcttgcatcatgcatgctttgcttccgcgcccgggtgcaagtgaaagagcgtgggatcgtcgattttttgctttcctgcgacgaggttggcttcttgctttgttgcatggtgggcttagctcgtagcatcgtgttgctcgcggcgcggtgggttggtgattctgttcagtactgtcgtcgtcgtcgttgctatccgtgaccaggtgaccgcagtattagttaactctcttaactaagtgatggttagagcttgattagaaatggtatgcttttggtgctctgttaattctgtctatatacgagtccttggtatcataaatttacgtgtagctggcgagttgtagctgagctgtgtttaattgcatcataatttagatgtaatgattatagattagtggtaaaagtaagattcgttctgctcatacaattgattaatatttaaggcattgtaaggtttttttatattccgacgaaaactttagttcttgctgctaatttctctctttgtttttttaaagaaggcaaaagctttgccttgtatatattaataaagcaggagaaaattagtgagatatatacagggttagccgaaagagagcaagaacccgcaaaaaagaagacaaaaaaaaataggtattaagtgatatctcccaaaattacaaactcctgcaggattgaagccccctgctttgacccatgctcttccttcctccttgatctttgtcaaaattgaggacggcgccgatgcattgttgcggaatattcttgcgtttcgttcgcaccagattttccacgggattaaaatcaccaaggtcctgaggggcctgcgcggggtgcttggggactccgctacgagggtccaacattgatcgactgagtgacagttttcccaattgtccatctgaaggtcagtcctggtccatctctgaatttctgcccatatcctctttgtgagtctgcatttggccaggaggtgtaatgccgattcgtcaacagtgtagcaaagtgggcaaatcttttggttttgccatcctcttttctccagcctttctgtcatccatactctgttttgcgtgaccagccaagagaagaatttgcacttcggcagcgcctaggccttctagattgactgatagaagacggatttggcagccccaaagaattgaagtcgataggccgatttgccgagtgctgcccatttgctgtgaggttccatcgaatgctaccatggctctcgctaatttctctctttgtgacttattttgctaatgtggttcgtcgtcaacaagagtacatgtagctagctgggattgtttgatttcacgtgttgtgcccaagtgttacggatgaattgcattctgttttaattttatattaaattatggaagatcatgccatgatagggtttcggactaaggctgggtgcatatatagaacacctcctagtctccaacttcttgtgcttgctagggcctagggcactcaaggtcagacgtgtgaggatggcatttttgcatgtgtgcacccaaatcttcattttagcgtgggactgagcaaattcaatatacatgtagcttaggatatgtgttcatatgtagctagcccgcaaattcaatatatatctccaaaattaaataacacattttgcatgtgtacacccaaacccaaagttttaatttacaccacaaatggacctttaatttgatacgtagctagcctgcttgcgtgtagttgtagtttaggatcgatttgccactcacacaaattttacttcatgtaggaccatcaggtctcatgtgcatgtgtgtgtgtgtgtgacacatttgtgtgtctctctgtgtgtgtgacacaatatatttttcatacttacaaattatatttggacacatgagctatatagctgttctctagtacatacaatgttgatcaactctactaattttttccctagatggatgtcaagttagctcaaccaaagccatcagccggtggcccacaactcagtccaggtgaccagaagaggaagatttttgtcgacagcttgccggcgtccgtcaccaaatagcagctcaaagaatacttcagcaacttcggcgaggtcaaccgggcaatcgtggtcaccgaccttaacacgaagatgcccagggggttcggcctcatccagttcgcgtcggaggagtccacagcgagggcgctcaagaaggacagacacttcctctgtggccagtgggtggaggtgagccttgcaatgcccaagcagcagaatgcagcttctggcactagcaaattgtcagttcaggctcgcccattttatctggcgacatcatcaaactttaccgccgccccaaccacgtctcacgtttagcccatttagcctgatataactgtttgacaagctaaccactaaatgtcttacccactatttaaaatattgcactccacaccaccaccccaaccacagctcacgtttctcgctctcgcctctcgttgcatctatatgcaattcaaacacgcatgcgccacgtggctatcaaccgccgaaacggctaacgccagcgctgaccctcgcatcccctctcccctacctggctctgcaggttgtggtccccactagcgtcttgctttccccgagaggcaaagacgttgggcccaagcccccaactgtaagtcatcctcaggctgctttgcctgcgtgacgaccacaccatatctctcctcgccttgttacaaaaacacaagctctgcgttcgcgttgcctcgcacttacacaactggactgcatcagtttctgatcaccgcgttcgctcgatcatttgcttcgtccgagagatcatggaggcggaggcggatacgacggtgaccgtgacaatggaggagcagcagcgggaggcgacggacagcgagggggaggaagctggtgagccacaggaaggtgttcgtgggaggggtgccgctggggacaagcgagtctgagctccatgcccacttttcgcagtccggcgcagtggccttcgtcgacatgcccaagaacaagtagacgggcgccgcgcgtggcttcgcgttcgtgcagttcgtgaaccctgacgccgccatcgccgcggagtccgaccgcaacgtcctccgctggcaccacggtatacacacaccccagatctggtcctgtcatgcacacacatgctctcatcttctcttctcttcttcgtcgggtgatcgatctcactcgatgtgtgtgtgtgtgtgtgtgtgtttgtgtgcgcgacactttttcatacttactaattatatttggacacatgagctgttttctagtacatacaatgttgatcaactctactgttttttctcccatatggatgtcaagttagcccaaccaaatcctcccgttggcggcccacaactcagtctaggtgaccagaagaggaagaccttcctcggcagcttgccgacatccgtcaccgaatagcagctcaaagaatactttagcaaattcaacgaggtcgaccgtgcaatcttggtcaccgaccttaacacgaagatgcctaggtgggttcggcttcatccagttcgcgtcggaggagtccgcagcgagggcgctcaagaaggacaggcacttcctctatggccagtgggtggaggtgagccttgcaatgcccaagcagcagaatgcaacttctggcactagcaaattgccagttcaggctcacccgttttatccaacgacatcatcaaactttaccgccgccgctaattatcccaacgtcgttaatattgtccatgtggtgacacctatgaattgtgtcgtcggcagtacttttaaccctcatattggcttcgaggtacctgggatgaaactgagtgatggtgtgatcaatgttgtcactgctaattactcctaccagtacccctaccttggaggtggtgaggttccgcctcaaaactcagcgatgtatcttcaagcagcacattattatagtggtgcgatgatgtgaagctattccaatgcgtgcctaattatcaagtcacagtgtcacaaaaggggtgtgtgtgtgttggggggggtgtcattgagatatataagttggcaaatcctaggagcaaaatatatttttcatacttactaattatagtggtgcgatgatgtgaagccattccaatctatgcctaattatcaggtcacagttctgtcacacaatgtatgtggtttagttaatttccttcaattaattttcttcgatcttgcttgtttgtttaaaagaactcatggtatttagtttcaactatttgctctggcaaagttcgatgtactcacttccctgaatttttgggtgtgtgtaatagtgaggtagggaagaattatgatttcttaattaactatctaaatggctagatatatataatctctatagagagactttcaagttaagtttctaacggttttgggtgtcaggtgttttcccaaggtttatgcacctttgtttgttaaacttcatgcatgtcgatccagctcatttttgtaagaacataattttgaaaacatgcatatgctttttatttatgtcattcttaagtattcattttcagatctacatatgcatatgtttagtattcggtacttaagagtgattatatggtccttaagaggtacgaataactccttttttctcaataagggatgtaaatcacttcagcaaacataaaagtggacattttatgttgtctatggacatatgcatggcaattgattgtatttatgcaaggtttctaaataaacaagaacaatgcatgcatactatagtgaaatgcagatcaacgtgtgtgctaaattaataggtccagatagattaacgtgttcaattaatattcagattggtacatatatatctccattaatatttcttttgtttaaaatataaaggcaaaatttgactacatattgataaatatattgttcttaagcattgttcacaactttattttaactctttttatgtaatggaagtaatgaacttccactcgtcgctacagcaaattaaactatgtatatgcatggatcacattgccattcataagtttttaccagttaagatacatattatgcgctaccaatgcccatttatctactagtcaagtgtatcatcacattaaatttcagatattacagttattgctcaaaattgacaaatagtcaaatgagacactttcgtgttttttttatgatcacttgttaacatttcgttatacttgattaacaaaaacaatgcgattgactatattcttttgttgaacagataatgattgtgggaatgtggccgggttcgctcttcaattctctctattattgactggctgtgaagactgttcttccaagcgatcgatatgggcatctggctagctgtttgaagactagccaagttgatcatactgttgactgaagccaaaatatttcctctttttgttaattacatcatttatctagaattccttattatgttggctactcgtgctgcatggtctaggatcataaggaacttttttctttttctgaacattgagaaaagaacatgctaatatatatgttaatctggagttgtctggcgtgtatgcagctggatatataaatgtacatgcaagaactgtcaacatggattaattagcaataacatttgcatttctcatgacacattttgaagccttttcttcttgagctattgttatggttacctaggaggcagccagctagcaggtattgcttctaaagaaataatgatgatacatgatccatatttcatcttataactaattagctaccattgctatctcctggtcctgcaacgacccatctgcaggtataactaattgtcaatgcagcttgatgaacaccagtaagttcaatcatatcggtagctccttcaatttgatttaattcactgcagcatcttaattcgtggatatgatcgtatgattgatcgatcaagcctttcctttcatctgtgctagctagaattgtagctctgacatgcatgcttcatgtcattttccctctttattttgtgcttcacagacagttaacatgcattgttcgatctgtcatccggtggcgcgcatgtctcgatcggtgtttgctagatgccatgcacacgggagaacggggagatcgattgatcggtcgtgcatgtgctcggctaaaccatcgacgagcttatctgaatccatccgatccatgtgagctctggcaaaaaagctagtgtcgaatctcactttgcatatggcaaggctgcttcgatctctaggattgccgttgtttcatcagcagcagtacgttcgttccaggctatcgataggctgtcaagtgtcaacatgaatggttgctatgttctgtttggaacgcagcaatttcacaacaaaaagaaaaacaaattaattcgatgcagtacgaatgatcaaagcttcatcactcagtagtactccctatgtgtactgtctaatctggttatagattattacggaggatatcttaggacggagagagtgcttgtgtaaaaaatcataggaaggatgaaaccaaatagatgacgacgacggctgttactgtatagcacgattcttccagccacttttgatggttccatagtttatattcttcagtttatcagccatagcaaattaaaacgctatttttagcattgatcttgatcattgtatattactagaaaaaatatccgtgcgttgcatcctgaaataaaagttacaataaatattagaagtttgggtttaatttttatgatatatatcccttaaaaaatcatatttttacgtggacatggtaacttgttgaaaatagtatattccttgactaccaccttcaatatcaacacataatttctgtgatagatatccctcttcccaacttctactctcattttccgcacacacgcttctcaaactgctaaacttgtgcttttttaaaaaaaatctatatgaaagtttttaaaaaatcatattaatctattttttagctaatatataattaatcttgccttaatccatggctttgttttacgtgacagtgaagggttcacaaaccaacaaaacacagcctaagattttatggaaaaaaaaccttctcgtaaaataaaatggttctagtagtatatcatatactcctattgcctatatgttttcactcgctcctagttttaacgtgttagagttgttaaccacgaccattttctgttgaattaaatcgagaaaggaagaaaatgttgcaaagttaatgaaatagagaatgttgaataaggcagcaatgtggaaactggaaaaaaggaggtgcttgtttgacaacacaccaaactatagtcggggagagagagaggtaagtaaggataggattgaggaacatatataatcgaaagcagacccttacatggaatgcaaatatggtcatgtatgtttcaggttgcaatctagttctagaaatagatcctacgctaacatgaattgcgcattgtgcgatatcatccggaccctcaaatccaatccacttatatagaaaagaaaaccactacagctttaacctaatcacttcaacaatggcacctgtaggactggaccagaagcaagaacaaaatctgatttattcaacttaaaaaataaaaagcttaccatgtatttgtatgccggttttaaaatctgctcaacaattactacaaataaattatggaaggaaaatatgttggggtgcttgtatatgtgtatcttgtttccagtttccacatgtgatcagctttaacggaaagaaagtagcgttagaattggaaacgatatgttgcaacggaaaggaaacaatagggaaaggaagcggagttcgtctggctctcgcgtctacctgcgcattgagttataggaagatggaaagaacgaaaataacggatgaagaaaacaatatgtgcggtgaaaaattgtaatgacggactaaaaaagatgtggcgaacaaagagatgcagactttttaaataggttagattagattttttttcagtgttaactttgtagaccacgtgtatataaatgttaattactccatccatttcaagttattaggcgttttgactttgttcaaagtcaaactactttaagtttgaccaagtttatagaaaaaagtagtaacatttttaaccaagacaaatttattatgaaaatatattcaattattgatttgatgaaactaatttagtattataaatactactatatttatctatataaacttagttaaatttaaaacagtttgactttaagtaaagtcaaaacatctcgtaacatataacataagacggagggagtactgcgaaacgatgacatccaagtacgagaacgagagcgatggtgcaaacaaaaaccaagacagacgtacgtacggcacgcaggcaggcagcagagcaaccaagcaagcagatgagacgtccttgtccagttgtactactactctatcgggacgatacgcagtggagtacgacgcaggccaaggccatgaatgaatccatgacgtgtgatttctcccggggaaacaaacagggtcccttgatttgtgacagatcaactaaagcgatacatgaggcatgagctcgatctctcgagctggatcacttggatcaacaagtgaactacgtttgtggttagtaccatatacttattccgtctcatgatagttgttactctaaattatttagcaaaaatgactatagtgccccctattaaatggtatagggttaggagtagaatgaaaaaaaattgaattggaggttattgatgtgtcaagagttactgtaaagtgataaactttttgggacaaaatttgaatcctaaaacgacaactattttagtacggagggagtatctcaaaggattttcagaaaaaaacaattttgaggaatttttaaggattaggggtgaaatatcagcaggcagataaatcccatttcggaattattgattaatagaggtataatagcgtactgcaagtggaagacatgtaaattatcattagtataataacatgctgcaagtggccacaaacatatctgcgtcaagatgcaggacaataatcgtacactaaataccctctctatttgcatccacatgggattgttgctaatgcaagagacaaatccccggtacttaagcctagctgtccttgccaagatagcgacacagcacaactcaaacagatctttctctgaaaatgtgaatgtatattacaaaggctagaactagaagtactgaagtagtataacccagccatacagctttcatgtacaattgtacatcatgatattcctctcatgcataattcatactacataattgcaatcttgcattcacaaaatacatgcatagagtgatccattgctgggtttctcattactatctttcatcaaaaggtgtactattgagtaccacagtatgcatccatagtgatcggccaaagtacatttaaaataacagtatctccatttgaaggtaaactgtcaagtaagtagaaacaacccattctaaccactgagaattcttacaaaagaattgagacatcaaagaccatcattgcaggccgactccaaaagccatatatctacacccccaacaattcagagtctccgatgaattgtaaccccccatcaatgggaccagagcttcttgtctttgcatcaatattgtatcgttttccctttaccagaacttctctttgattgcatatccccctccaaagaaaaaaagaaaccgattataccacatgtattctatcactcgacttgctcgccgatcaagtcgaggccgacaaccaagaatgagaccccttggaacagaaggaagtagaaatgtatgccttgcaccgagagcaggcttcgagctgctgctgttaatagaaggaaggagagtgccagctccttctggtatatcctattgtgttttttctttttcgaatcctttttcggatgggactccttcgctagggaatcaaggttgggtgcagacccaactctctgttgcttaggctgcttctcaacaagagaaacgagatcgccctcagaagaacggcccgatttcttggtcacaacccactcgtaggcgctcccgagctggaacaagccagaaatcatggcattgaattttgtcactgacatggtattctcaaacagaaggtagggaacaataaatgggaaggatttgggtgctgggagaatattcagcaaggacatggttgctggaatgtagcacaccacccatgcagggagctcagcttcagggacaaacattgtcatgggaaggatgatgcagaaaagtgtgaaggaatagaagggcaatatgagtttgcgaaggagaaagaaaaggaagatgaggttgaacttcttccatactccaatctgcagttgaggtaagtaaaaatagttctgatcagtttcaacgactaaatatgtataaaacattgacaaatgctgttagtgtaaaattttgaattccatcgtagctgtgttttgatagaagtgaagttatctacagcatcaacaatttgccggttagcaatttatttgcagagtaattctatttacacccagtctttttttccagatgaagctcaggttagcaatttatttgcagagtaattctatttacacccagtccttttttccagatgaagctgtttagtctgtgtttgacgtcatgaaacatttgactaaatgagctgcaggtccattttactagtgaagaaatcagtctatgaaacttatgctctgtaactaacttgaagcgaaacaaggttcatgtaactattagtctgatgttgctcttgtaatgtactggtagatagtaaaacaatcccttgcaactatgcatcctgcagatgtttattggcaaaacaactgattgtgctagattatcctactgaatgcagccaaaatcttctcaacagaaagaataagggatgaacctaaccatgtagtggcatgctttatatgatgttgtcaaaaatagcttttggagtatgcctacgagagaaggtccatacctttgatttgatgatgtcgacaaaacagagtcgaaacaactgcatgggaccagaatgccatcgatgttgctgctttctgtatgcttcatatgactctggcagctcacactggcactgaaaggataattgtgtgcaacaatttgaattgtcatcacaagtttgaatacaacacagaacgcacataaaacacaaggaaatgtatgcaggtacctcgacatcattaatgtacagaaacttccaccccttgagatgtgctcggacagcaatatccatatcctccactgttgtcctctccatccatcctccagagtcctcaagtgccttaattctccatactcctgcggttccattgaacccaaagaaattgaggaatactccattaacctgctgttccacctcaaagtggaagcacagattaatgttttgcagtctagtcagcaagttctcgtctttgtttacaaaagaccatcttgcttgaaccaatccaacatcttcattgccctggaggtccaacacacaactagtcagtaaatataattttcattgccttggacacatataagaatgtaacacaagtccacaacatcagaaatatttcagctataccttgaaatggggcacagttcgcttcaggaagtctgcttgtggttggaaatcagcatcaaagataacaacaaactcataatctttaacataactgcagttcatggctgacttgagatttccagccttgtagccatcacggatcacccggtgtcggtacaatatgcggacaccctctcgctgccatttctccacttcctccttaataagtgcagaggtggcagcatcatcagagtcatctagtacttgtactaagaagtttgaccttggccaatccaggttgcagacagcaccaatggattgctggtacacctgcaaagatagaaattaaaaggaataagctaaatttaattgtagttctaacatgggtgttctgttagccttttttgaatgtcatgaacatagaacacatcacaaaggaaacaaaagtaatgctactcccgactcccgagcttagatcagtataacatcttatatctataattgtttttctaaattattctttatacattttgttgacgagaattaaatgaattttgtaaagatacaaaactttgaaacataaaacagtgcctttaaagcccccatccccccccccccaaaaaaaaaaaaaaaaaaactgaacatgttcttaacttcttattcacatattcaaatccccaaattaaatctacaacccaccaaacgcttcatatcaggaatacccataggccagaatgtagattatgtagtgatcgtctactttgagtcgtggacaaaaatcgaaaccgtttcatcccagcatgtaaccatcactccaatcccaatattgaagtatgcaagtagcagccaaattttgcctcagtggcactacgaccaagataccccaatctaaatctgccgaattattcctatccacttgttgagttcccccccaattgcagttcaaagaccgaatctttcggtctctgcaaaccacagatgcggccatggcactcaacgcccaatcctaaaaatgcaaccttgcgcaaatgccgaagcaacaaacaattggaattagttatgtttgttctcgcagctcacctccttctcgttgcacattggaatctgcacgaggaccatggggaactcgtcggcgccggcctcgacgtcgtccgaccctttgccgccgccgccgccgccgctagccttgggcacaggcttgattcccttgagcttgatccataagcagccgaggcagaggatgaggcggtcggcgctctggatcaagaagaggacgacgcaggcgttggcgaggaactggagccccggcgcgaggtactcgaggcggacgcgcagccaggacgcgtacgcggcggcgaagaggccctcgacggcgagcaggtcggggacgacggcgtgccagccctgggcgtgcgccgcgacgtcgacggcgaggaggagcacggacaggaggaggaaggcgcggaggaagccgtggaacctcgcgcgcagcgcggggctctcccccggcggcgccgcggcggcgtcgtcggagtcggtccgccccgccgccacccgcctccgcgcggccgccgccacggacagcgccgcggacgccgcgcccgtcagcttccccgccgcccggtgcgccttgagcagcagcacccacgtgatctg

SEQ ID NO: 7427 - DNA, 35895 bp, Oryza sativa
tgatatgcacacaccaaaatcaacacatgattctgctgggggagctgcaactctcacttctccggggcagaattttggaaaggcgaagcattcatattcagaaccatctgatctttatggtgctcatttctcgagggatgtgatttcagtttcaaaggaactttggattggttcactgggaaatagtgctgcagagtcactagttagatcgaaatttgaggagtttggccccttagcaaacttcttattttatcccccaaagaattttgccttggttgagtacgggaacataatgcatgctgttcatgcatatggatgtatgcagggttcctctgtttggggtggtggtctccaaataaggtatttagatagacttataggcagcaagggatttgctagtggtatagctgttggtgaaagtcgtcatatttatgttgctaaagttaagaacaaaaaagataaagatgaggtgtttgatgaattaaaggccgcagggttgaagaggccatgtagctttacagatatttccagtgaaaatgctttgcttcttgaatttgagacagcaactgatgcagctgctgcgaaagcccatattaggcgccagcttcatccagatgtctgttcccaggacaagaatacttctggtcatgaactttttgtgcggaacatagacaattcagtccctgacatggagtttatcaatgcattttcacgatttggtgaggtcataaggtggcagttcaataagcttgatgggaactgcttgatagattatagatcacctaatgctgctgccactgcaaaatctcacctgcatggtgcaagatttgggctgaagtcaattagtgttgaatcgagatctgtgcatgataaaactttgtcgccttctgttccaatgctagccccgagtgtttctgacagcagtcaccatgagatcaggttagctcaaccttttcttatcttcttaatcctgtacagatataaccatggttgatggttgcaacagttctaaacttgtatattttttttatcatagctcccaaagtgtgctaagtcggtctgttgttaatgcaacttttctagacctggtcaatgcaatttggagtcatcccatgatttgtacgatcatatgcagtgggtggtattggtttgcatatgccatcgatctatttgtgcacctgttttattagcatgttattttttttccagctatcttgaatcttgtgaaaatgcactgttagaatgtaggatgctatcgctgatttgacatacctattttttgctgatttagatcctctgttggatattttgggtattgggccatttagtacccatcctttatttttggtgctgcagcctcctatcctgtatgtgcaactatgcatgtatctgtatatactttggcgctcgtatgtcaaatactgatataatgtcaaacttccaaagtgctactgacctaccattacatggttgttccttcactgcttagtccctagttgtttgctggtgccttatgtgcattgtatcatgctagtggctgctttttcaaatataaagcttcatacatatagccggtatttccattagctttgcctttgattgcatttctccaactgcatgaaagtctttttataggttttacatgcactaatattgacgtcaagcaggcctgtggacaaaaatttcgtcatcttaggctttcatatatcagtgccacctgatgatcgtgaaattatttggttaaggctgcaacctgcagaatgtaaaaaatatatggtctctgtaacatgggttttttttttccatgtgggtatgtcaagcttaaatattttccagaatactgatttgtatgtcttccctttccattgagctcatggtagaacattatgtcaactagtgttgtttgttatgctgctctttacgatctgcttatattttagtaatttgtatacctaaattaaggttttgagtgcttgaaagtcatttgttgcttgcaccttgggagtatcacattgctgctgtatgcaattgattgtttaattttacacatctatgaaacaatcaaatctgcaggaatccaagggtttcagggtataatgcaggcttcacagtaccaacagagcgaccaatttatggtaagtctagtattctttaatttaacaaattttgcgagtttgtgcatgagttggctccatgtaacagtatggttgacatgcaggtccatcggctcccagagctccacaaggcatccttccatgcccacctgtttctgcacaccgtggtcctgtaataccaccgccacctattcaaacttcttttgtccgtcctgtatatcctggtccaggaagtccgtgggaaaatactaccccaaatccatccttcagtcacgcttctcctcgaatgatgcctggaagtagcttccgtatgaatccacctgctcctcttccttttataccatcttctgttacccctcttacacagtttcctggaggttcagcacagcagtctgagaaaaggccacctccacctccacctccaccaaatgtagcccccccaccatttactcgtcaagatataccacccccaccaccatctccaccaccactacctattactcagccaccttctgtgccaccacccccaaattcccctcctccgcttcaacctgctactgacccttctgactcacaaaagcaacgttctcatcctcgatggcagggctctctttcaaaaagtggtttacattactgttcaatctatgcaagtagaatagagttggatgcttgtagatatgaacatgcagtttctgaaccgacagggtaagagatacatcaatccagcctacacattctattattacaacattacatattctcctaaaacattcttgtttgcacatttaggtggccttcaagattagatgtgacaaagcgaacggattaccaacatgtgaagacaactttctccaatactccacctagcaaagtaagactctagaaggccatgtactatttcagaaatacttctagcctagtgtaattttacagtttaagtagtctcaccataattcagtctctttttttctgttggcataacttttctgaagactgttcttgtattttcaccaatcatgctttatagttgtgtgtttataccatgtttcatctaaactgcaccatgagaacatttctacattttgtccttgatatatatgaatttaggtgccaggatcctcagcattgatgcttgttaatttggcacaagttcattgcataagggatctccattttatcatcttggttttatttgagatgattgagctaaaattaagtaataagtgaatattttatacctggatgtaagggaataactattttgagattttttttaataaatgcagtgctaatacttctatgttgtttttaaattgaaattcttgatatttaattcagctaatggtgcatggtcatatctctgaacttgaaatctggcaaatagcatcttttgctatttagttcagttcactatgtatgcatgaaaagcagcagatcgttaggaatgggatggtgctactagaagttaccccctattaagccataagccgtgagcagctaatttatagccgattgtgcggtcaatgatgataagccacttgtaggttagcatggctatgtttcagatgtggaagttgatatgtcaatgaattttctttggagtacaatttaagtacttgctcattgtggggcaaatgcgtccatataacgatttatctagattaaacagaaaggtttttaatatattaagagtaaatttcacattgggcgacatattttgaccaagatttcataatggactaaggttaaatcattgttttcacttaacaccatacatcttacataagttttcagtttggactaggggtgagcaaagcaagggaatgtgagaaaacttcatatgatttacacatggataattataaaaggcaaaacattttatgttttcttccttatttttagtgtgagtggtaattaactcttttctagtattttatttttattcatttgcccctatgtatatatcattttgtgccacttttaaacatgtttgcatcattattttagtgtgatttgctgaacaaagttgttttgtgattttctatttctttctaaagatatttatcttaatactatggaactaaaaatgatgatttgaactagcttttctctgacaacttccattgatttgctcaaccctagtccaaagtgccaactagtgcaaagatatgtggtgctaagtgaaaaggttgggttggcccttgcccattgtgaaactttggtcaaaacatatggtgcagtgtgaaatttactcatatattaatgatggggctgatgtatttcagtgtggtgcagagagaaaatctcgagctacttttatctatcgcatctcgcaggggaataatgtttactgtttgttatttcactttgcagagagaggtctgtcggctattaccctgttcgaatggtgatcagaaaggggtatgattttattatatacactgccaaccccactacctgaatatctatttttatatgaaaccacattaacccttcactacttatgtgtgtttatcttgcagttccgggattttatatcctatctgaaacagagagaatgcgccggtgtgatcaagattccatctgtcaagccattgtggtcaaggctactatttatccttcctcccacgcctgaggcctgtgggatgctagaacttccgccccatccgaccgaatgcctaattgcactgattttgccaaaggagacgactgctgaagcgacctaacatgattgtcgcgtagacacattccgtaacctcgttgcttccagtttcgtgcacagtaaacaattttgcatgaatgatactaagttcctacagctgcttatgaataatatgcttccagtttcgtgcacagttaacaaattttcatgttttcttttgacgagacaccaatactgtacttattccttttgctgcataactgatatatagttgctacaatatcacagaattgaccggtgatccggaatttttacacgcaaagatcactacagggacatgatctgacgaaccgctccgtgttctcttcgctgcttacttcaccacatcggaatctaggtcgaggacgaaggattggtgacttgcccggcgaagaccaccacgccggtgaggtcctccttgatcaggaacatgaaggggtggtcggcgacgaagtccacgacgtgaaccggcgccgatggcgccgcgcagccaagggtcatgacgacggcggtcgccgccgccgcctcggtgccttcctcgttcacctcgacgaaggactcgtggtagacggccgacacgacgatcttctccgcctccggcgatgactccaccatctccgacaggtcggcgccggggtactcgaacggcaggcgcagcccgagctgtcgcagcgtctccgccgcgttcgtcttgtacgacagggtgaacctcggcaccatgaaggcgcccacggggaccttctccgtcagggcggcggagctctcgatcagcgccgccgggtcggagcacagcttgcgcagcatgtcaggcaggccgtggcgctcgtcggggaggtagatgtacatcgagaagaggcggccggtgtcgcggccgcggccgcggccgccgcgcgcgtacgggagcctgaggaccttgtagccggcgcggcaggcgatgtactgccacttgccgctcgacatgaacggcgcggagacatggccgccgtcggggaggtagaagacgtcgtcgctcgtggaccgggcgtcgaacttgctttcccagtcgcccttgaagtagagcgcgttgccgaggacggccggcgtcgcgcggtccacggcgtctttgggcaggaagtccttgatccggccggccgtcgcgctctcgaaccactcgttgatctctcgcctcgcttcctctagctgtacgtgcatccatcgaccaagagagattatatcgtaatttttgcggcaagaaccaaaatatttcgatggatggatgaatcacatggagatggaggagaggtttgttagtcaggcgcgggggctcaccttgtctcggaaggacaccgggcgcgcctccgcgcggtacttgtcggcgacgacgcgcgcgtacgcggccttgaggcggagcgcggcgtcgacccagacgccgttggcgaaccgcaccttgggcccgccgcggtcatcgccggggccgctgtcgtcggcgagggagcacagcgcgacgtgggacgcgagcgccgcgtgggcggggccacccgcggggccgaggaaggcgatgatctggtcgagcgtttcgccgcgggcccccgcgccgaggagcgccagcgccgcgtggagcgagagcggggagacggccaggtttttgtcgccgccgccgccgcgtggggcgcgcgcgaggtggccgagcaggcgcatggccatggctgtctcgtcccggacggcctccgcgagctccatggctgagcggcctctcgagacggtggggtttttcttggatttttggttgttgttgttgttgtgtgtgtgtgtgtttgcgttgcggcgggtgtttttttctctcttttgtaccgtggaatggtgggattgggattcggttacattccccgtgacatgtccccagtccggaatggtgagtgtgttgggcgcgggaggttgtgccgcgtcgcgtggatgggacgcttcgggataatgttgttgccaattccagggttccacttccacatacggctgtgtttttttagagagaacagtgtacaggtggttttggactaggtccctcgcattgacatgaaaattgaaataaaatccgtgggctgtgaagatatggttagttatactcccagtccgctctaatccatagagttagccatacctactacactaataaatacccaggtaaacagtaataatcctttgttactggtacatcaatcgactgaccaactcttctcaaagtctttacacggcgcattaagcgatcagcagattcagaagcatattgattgactcaattaggtaaaccaggacacaaccatatatccaatacatccatcagttacaggtttttaccgtcaggagtagaaaatgagtagtacatgaacatcaaagcatcatgaatatagcgaatgagattccgcgggtactttgagagaagaggactaaatgagttattactgcagtcttgtacgtcaactaacttgcgaagtgctacagaagaaaagctaacttgcttgggtaacagccaggagttgtagtcccgaaactctctccactccacagtaaggatcagcatctgttgacagtgttaatgtgtcattctggctcaaggagaagtcacccggttaaggagacgatttgagcgtctcaatggagttggcgtggtaacatccttcttctccacctttgcagcattttcctgatgcagaaaacaaaaggaagtgaataagtagcactgctacccacagctcgatattgtgtactaaaacaaatgcttgaccattatggaaacatattaatgtcagcagtatgatgataaaagacttatctaagcatctgaacactatgtgtagcctgtaggtgtaaagataagtgtttgaggacactgaattttacctcctttttcgtttttcgagcactagggcttttaattgctgtagtttccttctgcatcttcaccacatcttttctcagagttactgatggttcctgaactgcaacatccccagcatgttcatttgatcctttccgggagcttcctcttgagctacttgcatccacaagtgagaactccccaagcaatgccaccactggaggtctcgagctgtcaatgtctctacggccaacagaatagctgtctggaatcctagcactgccagcatcatcttggtgaactttctgaggacgattcccggaatcaatctgcttgggcagtggaaattgcacagcattattgaggttgacagatgacactggtatgggctctggcaatggcacctgttccctgaagctggcaaataggtcaggcttgtgcaaaggtgatagtgtagggatcttcaaattgacaggcggttctactttgggaactgtcagttgcacaggttgtagcacagattgtggtgaagggagcactggcaatcttggatttggagctaaaggggattgttcaagcctacgtgttgacactgatgcacccttaggagacctctggaaacacttgagcatagcagctgcaattgcaaatgctgcaacagaaaagcacgccaagatctccatcaagtgaagttttattgaaggccacagtgattttaccatagctactattgcctttgcagctgcagctggattctcatactccaatagctcggttgcctgatccaatctgtcattttccaggccctctccatcataccctacctcgttgttttcttgttctattgtcttctccatggaggccaactgctgggagtgttgcgagtgatcctcccctgcctcctcctgatgaactaaccctgactctccctccaccatatcagcggtgtaggttgaaccaatggaatctgcagtgacattttcattcaggcttacaacttcacccaattgctcggcattctcagaggttgcaaccatcaattcactcagttgaaaatcttccttggaattctgcacatcctccacggctctgtccccaatttggcatgtaaattctccgaatggaacatttgggcatgaatctgccaaacccatcgcagcaatcgccatgaagtttttacgagaaccacccatggggccatacagttgggctgcattttcactgccgttgggcacagtttgatctgtagcttcttcaaacacatgatgtgaacccatcatctcagttggtgctcgcaactccagagaacctacttgatgagcgctagcatcatgcacgctcccagttgttccagcaaaatcgagccccatttgtgaggtaggaaagggagaggagctcatacaatagatgtagcagcaagagcaggccgcggcgacgagcagaagaagcagccgccgtgcccacccaccacgaggagacggaatctcaatctcctcctcctcggcgtcggcgcggtcgagaccacgaggagacggaatctcaatctcctcctccttggcgtcggcgcggtcgagttcggcttcgccgcctctcaccgacgacccggaggacacgcactccgagggggtgggggtgggggtggccgaggtggcactggacgactcgtcctccgcctcgcgctccagccggaggaggatctcgcggcgcttctcggggttgtagcgcaggaactccggccgcggcgtggtgtagttcgtcttcgggtcgtacggcccctcgccgcggcaggagagcgacggcgggctcgtcgcgggcttcgcctgggagaagaactgcggcggcgacgcggcctccccgctcccgtcgcctccgccgttcctctcacccagcaccttcttcctctccagagacgcggtccactccgccacggcaccgagacgccccggattctcgctccacgccctcacgttctcgtccgcctccgcgtcccttcgcctcgtcgccatgggacttcctcgcggggaacctgcacacggcgcgtaaaagcggattgagcgacgaagcaaccgaaaattgaggggaattatacgcggagaggagacttagattagattagatccgggcggcagcacccactcaccatgcggaagaactcgcttgggcaaatccatggcggcgagggggttgatttgatggttcggagcggcggcgggtgtcgattcgggggggtgggatgatggggagatgggaagagacggtggcttggggatttgaaccggtttggatcttgccgaccgttggagccggcgatgcggtttttatacgcgcgccgtgtgacactcgtcatgagtccggacgacggtcgagccgcacgtgttgtgtcgtgcaagtagccgagtaggagtacactcttgtcttcggagaattgcagagaaattgctcagaaacacaaggattctattaggagaagtttgcactgtttacatctcatcctaaaatttttcaccctatcatatcaaacatttgaacacctttataaaatattaaatataggcttaaaaataactaattatacaaattgcgactaatttgtgatacaaatcttttaagtctaattgctccatgatttgataatgtagcactacagtaaacattttctaatgatggattaattaggcttaataaatttgtctcacgatttactgacggattctgtaattagttttttttaatgtccaaacaccccatgcaacaccctatataaaactcaatgtgacacgctaaaactttataccccttatctaaacaccccttactcctactttatccttcctaaaataaataaacatttttttacaacagctaaacatccattacctacctttagaaaccaagccttcccaaaataaataaacatttttttttacaacagctaaacccaaggcaacagtacacacgctgatttaagtaaaagaaaaatagtacacacgctgatttaagttaaaaaaaacactacacacgctggggttagcagctaaccagcaagtctcatggcctgtttagatactctaaaatagtaaaacttttgatattttagagttctttttgtcattttagatctaaacactaacagcaaaaggtggcaatttgatatttggcatttgctagttcatggtagcaaattttgctaaaaagtgctctgggaccacaccctctctctttttctctctctttagtgctaaaatgacaactttaagatgcatttaaacactaactagtatttttgcaatgccaattttgttgtcaccaaaacttttgccatttgctatttcccattccaggccctcacaaaaaaaaaagggagctcctcccccaccaaagtttatatcatataacaacctagtagggagtatatctgttcacaacatcgacacaacctcaaacccagcctatagcttttaaggcatggccaacgcaagggatacgctcaagtagatggggcaacacccccccaaaaagctaattaatttcccacggtgcaagttgcttcatgtggtagtctcgttttttatttcagcccctagtgtttttcactttagtactcacaattttccaatttactagcaatgatgcacgtgcgttgcaatgggtaaaggtaattttaatcatgtatactggtggaacaaaaataaaggaatcataatcataataataatattaataaaataaaattgcagtgacctttggtcaaaaagataaaaatatataattaattttctattaattccattagcaaaaaataatataatacgaagtaggaaaagttattctcaaattttagcaattttcaaaaggcttaaatagagcaaactaattatataaatgaaaacaaatttaatcacctaaataaaacaattagacctgtaattgaaaatctgttgccagttcagttaaacatgagcctgcgggtgtgtgtgatatatatctctcactcgtatgtcgtgatcttttttttttgacatagaaaaaatgcacgtgcgttgcgatgggtaattaaaattataagaaatataaaaatattatatgattaaggtttagttttacatgatatgagctctttaagaaaatatatttataatgaaataaaaaagttcaactgaagtgacctaaagtgaacttgttttatacggagcgtacacgtggtccatgaggcggcccaatagtgtgggtggcctgggaatagaatcgggtaggaacaacttaaatgacataaagtgaacttattccgtgtgggcggcctgggaatggcgttcggcctgacacgagagaagctagagccgtccgatctgatagacggtcatcccgacctatataaaagttcaacagcccaaaccctaaccctaaaacatttcccctcccccctctctcaaaacaatgtggtggcggcccgacatccgacatccctgcgacggcggtggcggttcagcagcgacgacgacaccctccccttccggtgtcggcgttttcttggtgttcttgaatctgatcttgtattcttgtagtagtgttttctttagaatttaggtccaaatttgatacggtgtctcatttttttctttcttttctttttttattttttgccatcggagagggattaaagcggaatcgatcgcacgtgcgatggaatttttttatggatgaaaactataacccataagccatacaaatttttttaattaggaatatatagatattgaatcggactttcttttttttttcattttttcgcccttttttcgttactacggatgtcaaaaacgtctttaattttttttaccgcgtcacatataatcagattcgatttttttcgcccgatttctttttcacgcttttttttcacggatggacgatggaaatactttttaatttttaagtagtagatatagagatacagatagagatagagagagaaacggaaaacttttttcgcaacttttttttttggaatcggacaaaaaaaattttacgcttgttttttaccgcgtcgatggaatcggattcgatttgtttttttaccacgccatgtcacatataataggattcgattttctttggaatcggacatgtactttttttttttgacccttttctttaccgcgtcgacagagtcggattcatttaattttttttccttttttcacccttttttaccgtgtagaccgagtcagattcgtttctttttttttcctttttttcgtccctactttttttttgatcggactcattttttttcccttctttcgccctttttatcggacatgtttggtttttttttcacacggtttttttcgcccgcggatttttttcgtccgttttttttatcggacatagtttttttggtccggtttttttcgcacggtttttttctcccatggtttttttacagacgatggaagcaactcttattttttaagtaaaaaaaatagagatatagaagtttaaattttacgctaaacacctaaaaatacagaaattaatataaaatctctcctccctccccctttttcccaccaacaccccaaaatcccctctccccacgccgtcctacttcaccattcgagctccgccgagctcctccaccctcttccctctgctcgagctctcctcctcggcggcatcgcggcctctcctctcttcttccctccccgacggcgactctcctctccctctccatcttcttctcggggtaggagcaacaacgacgcggggcaacggcttggggtgaggcatctccccaacgcggctccttgcccgttcctcgcccaaaaacaacgataagctgatgaaactacctggccctctactgcgtgtcgcggcactctgccaaggtgtggtatcgatcaagctggcgtgaatattcgtctcaggaaggatgagaccacgctccatgctggagcgttggctatgacctcagaaagaatgttgtcggttttgtaaaccctgactaatgaccttagctcaaccagggcacccgtaccctctgcaagacactaagtagcctcacgaaagcacgacctcgactaaggcgaagtcacggactcttggcatggcgagccaaagcaactcgtggcatcggtgcaccgatcagtggaagaagacaaaacagatactgcccctagctagaggtacaagggaattttttttactagtactcatgctggcttcgtgttaaacaaagcacagctaaattgctaaggcgtcccgcgttcgtgcaccatatacatagatcgaccgatcgaagcagacaaccgtacgacgccgcgccgcgcgcggcgtgcacgcacgcacgcacgcacgcacatcgatacgatcacgcgaccaaaacacacactccatctcacatagtcacagccggcctcccacaacccgcacgaacacgtacacaacagcacacacacgaacagacacgatcgaacccgcggaggcaaatttcctcgtgacgacgcggcgacggacggcgcgcgcggaacacgcacgcacggcggagctatagcttagtcttggctcatcatgcggtggaagtcgtggaagtcgagctcgccgtcgccgtcgtcgtcgtaggcgcttatcatggcctcgcactcggcgacggacgcctcgtcgccgagctggctgagcacgcgctgcagcccgcgcggcgtgatcctcccggaccccttcaccgcctcgaacgccccgaacgcgcgccgcaggtcctcccgctcctcctcctccccgcccttccgctccacgatccgcacgaagtcctcgaacgccagcatcagcccgccaccgccgccgccgctctcgccgccgcccgccgcgccgtcgagccccatcgccgcggcggcggcggcggcggcgccggagtcgtcgcccatggacgcgaagaactcgcggagctcgtcgccggagatccgcccgtccatgtcgcggtcgaagtggccgaagatctcccggagctccgccaggcggtcgcgctccctcccccgggacgtccccgccgacgacgacgccgacgaggagaacgacctcgcgccgacgcccgtgggggactccggcggcgagacggccgtggccttgcactgcccgcacgccagcaggctgggcaggctcagcttgaagctccccttcggcgacaggcgcctcgacggcttggagacctcgacgcccgccattagcaagagagagctggatttatgcgaagctagctaagctttcacttacttaggattcccgagcttagctagtgaggaggcagcgtgagtgtgcgagcgtatatatagcggaggaaggcgcgagactcgcaatgcgaagtgctgtattttacggcggccggcagcacgcagcaggggaagtttcaccctactttttctgttttttcttgctttccgtcagaaggatcgaccgatccaatggcccatcagtccatgcatgtttggcgagttagtcaccaatggtcactagcaggtaacagccagaaaagtttgtttgttttccgctctttttaatgagaaatgactcgttctaaataacagaaagtgattgaggttccgaatgaagtgacaatcactagctagaaatcaaaccagaataaccatacgtagaagcataaatatgtgttctttctagaagtatcattatgtgttctttctttgagaaactagctgcgttgcaacggatatttttaaagataaaagtaaaagcaaaaattacaggtttatagtatagttagttaattaggcatataatttcatcttcacaagcaaccctacggaaatatactgctagatcacctctttttatctatttccacaagttatacgtacggtcggataatacaagattagaagcttataattcatctgtagatgaaaggtgaatttaaaggttttgtatgtaaccccttataatttcttgaattaataattctagagtcattgacatgttgtgggtaccttatgtttatgatagctagtttgagtttctggtgttggtgtagacttggacaccaccactaacatcatttaaaatagtatagatatgaaccatggcaagttattactaacttattaggttggaagttctcatggtgcatttcttggaagaccatttgcttcgtggggaactggtttcccccccccccccctaaagatatgtccttatgtttatttttgtttgtaactcccaaatacctataacaaaatcttaaaaatgataatattgatgcattaatgaactatcacccccaaaagaataacttaaaattttcttcataggatgagaggagaaacaatctacacattgagtagtagaagtattattcattcgttattttcttcctcgcaaacaaaagattttttttagcatgcagatcgaatttaaacttgcatattgataaagtgatactccctccgtttcatattataagacttcctagcattatccacattcatatagatgttaatgaatataaacacatatgtatgtctagattcattaatatatatatgaatatgggcaatgctagaaagtcttataatatgaaacggaggaaatacatcgcacaattatctatgttattattttctaaaccatataaatgacatacaaataatgtgtgtatatcccctcataaattaactctcccatttatgcagataatgaattgtttctgtggtttcggcatctccggtgggcagcatgtgttcctaacatttgcaacagagagtgcttagcatagtatgtggagttgtggacatttggagtacactaacatatatagatatacacgcgtaagataccaatcagacaaaaccacaaaatactgcgctcgagtgctggttcgatcagacacccctgaaacatcgaggacaccgctgtaagtggtgtgatgctcatgcaagacgcaagccgtgaatacaagaggaatcatgcatggatattacgtgattattcctcgtataactatccctctccaatacagagctgcaattcgaaaggcggccggcctcctataccaaattgctgccgtgattaattatttacttcctaaatctcgcaaaatcccaatcagatatcgccacaaggtcgatggcacaaagcagccgcccacgcgctcaatttacctgatcctcgcacgcatgcatgtacatgttgccgatcaaatggccacatgtttatcgcaattgaccatgcacgcatacgttggctgcgtttgttcccatctgtcaggtggatgcgcagcaatcacacaacactcgtacccaaccttttttttcgttttttctgaatgatcaatcgcaagttgcatgcgtcgccggggggcgggttcaccaccgatctcacaattctcacctgaaccactactcgcggcggccggaaaggcgagcagaggcccgagggagataacgtcaggtgttcggtcaggccgtgcaggaggaaggcgagaggaagcttcctccgctagcaaaagaggaggggagagacgactcatgggctcatggcacgggcaacgcccacaaaaaaattgcgatcccgcagctcgtagttgcatatactcttgcatagttgcatgcgtggttggttaaatttactggtgacgtgcatatagctttacgatgtgccggaagataaggttgtaaaatttgtcactgatcgcaccgtgataggtgctgctctagatatttactagtaccagtttatcacattaattatagagtgtatatatatagaccatgttgcacacttgcacttaattctttgacgttagtcatagagtatatgtatatatcgaacagtgtccattgacgtacgtttcttttctatttttgtattttgcggggaacacttgcacttaatttggcttctaagtaccactcgaggggtttagaaacgtcaatggacactgttcgcctaatcgaggggtttgaaaaaaagcgttgttcttgtcaatggacagtaccctagcctagatgcaaaactgcaaatgcacctatttagaaaaggtacttttaaaaaactgcttttgagtgaaaaacttcaaatctaatctttatatgtaagatatataaagattagaatgtagttacgacataactaggatgataagccgctctcgcggtttcacgggcgcgtgtgtcgcagttgcgcagacatggtgcgtatggctggtgtggacccggagtgatcacacagcatggcacatacgctggcactggacacacggacgtggccaagatgggacgttcctggcctggggttgatcgacgggggcgtcaatctctcttaaggggtgaggatgtaacatcccagcctagggcttaatagaattaatagaatactcatatcaacaagttgtaactttttttccggaagccaatctccaaagaactcccgggttaagcgtgcttggcctaaagcaatttgggatgggtgaccgaccggtaaattcttcccgggtgcacacgagtgaggacaaagaaaagacatgtgtaagcgggcccggcctgggagaggcgggacgttacaaaatggtatcagagccgactctcgcggtttcatgggcgcgtgagtcggtttcatgggcgcgtgtgtcgcagttgcgcaagcatggtgcgcatggctggtatagaccgggagtggttacacagcatggcacatgcgttggcactggacacatggacgtggccaagagaggacgaccgggagtggttacacagcatggcacatgcgctggcactggacacatggacgtggccaagagaggacgttcctggcctggggttgatcgatgggggcgtcgatctctcttaagggggcgagggtgtaacatcccggcctagggcttaatagaattaatagaatactcatactaacaagttgcaactttttttccggaagtcaatctccaaagaactccagggttaagcgtgcttggcctggagcaatttgggatgggtgaccgaccgggaaattcttcctggtgttcccgggtgcacaccaggctatcagatgtaagcgagcccgccctgggagagtccgttacagccgcgaaatctgcacggctaatattgttatattttttttcctcaaataatacgtatatttttaatttttattattaaaatatattaaaatagtaattttgtattaacttaaccaaactaaccaatatataatattaatattgtattgtatatacgtgatagttattaactatttttaatttttaatttagttatttctaaattgtatccatatatggacttttgtctactcttacaatatttcttactttttagttgctctctattatttataaattttattcctatatagattctaaacccttccgtcaatgatctttttttaagttatttctaaattgtatttctatatgagctctatactcttatttaatatttttttaattctaaatctcagttatttttaaactgtatattcctatataaactcttctcctaatatttcttatttttaaatcctaaattttagttatttctaaattgtattcctatatgatatgaactctagactcttctcctagtcttttttattttttattttgaattttagttttctctaaattaatgtttttaagtctggcttacaattagttttaaattcctctatggactctagaatcttcttataatattttgttatttttaattatgaatttccattatttctaattgtatttctatatgtactctaaacttatcattcaatattcgttattttttaattccgaatttcatttatttctaaattgtactcatatatggactctagactcctttttaaatattttttatgttttaatttcgaattttagttatttctaagttatatttttatatggattctaacttctacttttagtttccttattgtttaattctaaattttaattagctctagatagcatacctgaatggactctagtctcctcttacaatattctttttttttttaattttgaatttaggctattttaaaattttatttctatatgaactttaattttctcttagctctaaatcgtatacatgtatggactctagtctctttttctaatatttcttattttgttccgagtttaggtaatttttaaattatgtttctatatgaaatttattttttttctccgattaatatgagatttctatgccgtgagagcgaatgcggagtttttttatattactttaataagttagtgtagttacaatataactacacttacagtatagtacactatagtacaatgtacctacatgatgtataactagagtgtagatttgtggagtgtaaaactagtgctagcacagtgatgaggatggttcaatggagtgacagagcaagcgggattgatccccttagctcacgtcatccctgttaatttttttcccaatctatctatgcacgaatgtcaggatggatcaatggcccaaaaatcaaaagattttcccttcaaaaactgtcgtaagatgtatagcaattccgttcagaaaatactctttcgcattgtatcctggagggaaggcacgcactgaggctattcacagtgcacgtagatgtcattctctctcatgcagccagctcagagactcccctccacctaggcatagcttggagcctcgccaattttggctccccgttcttcgtcagaatcgcagctttggggcccacaagagaagaggtgaagaagagggagggaggggagaagcgtcgatgccgatgttgtcgtcctccccaatctgcgccggccgagactcaccggccgcgccgccccccgatccatgcctgccaccgagggaggaggccggacggggagaggaagcggcagtgcgccagatggggagcttcacccggtgcggtcgaagcttgggccacgccgccgcatcgtcgcctccaggcctgacgaggagagatggaggcgtggagcttggtgccgccaccactccgccgatgctcaaacgcctgccgccgccgccgctcgaccgccccgccccgctccggtcgccgcctcgctttctctgccactgcctcgctaccttcggctggtggggaatagatagaggagagatgaaaagtgagggtagacagtgggacccacttaaaggagtatgcactgtgtagcatgtagctaacaatattcctgggtgtttttgagcttagttggcatacgaaggctccataaaaactcaccgcgcactgctaatgcccttatgcacagcattggccttccgatcgaaaaatgtaccgcctctaggtagggataccgaggcgtttcgtgcgacgtttactcgtacgtcgtccaacttttgcccaacacacggggagaaaagtgctcatcagctttccagttaagttcggtctccgcgcgtgtctccctttggaaggtcgctctttcactcgtttgccggagcgcgcgcccgcatggcgagctgattcctgattgtgagagtttttcgtctccgcgcgcggctggcgcgtgtgctggcctttggtaagtttcggcgctcccctttttgccgggactactgagcatgggagctgagcctgggatggactactgagccgctggctctgaagggaacttgccttgttacctgttctgatgcttctcgcgctgggcgtggttaaagcggagctgcgcctgcaccggaacgacgttttgctttcgtgctgctggtccaaggggaagaaaaagttgtatgtccatcacgacgaaccaacatcgtgatttgttcggggaaaaaaaatctacctcccttacccgtaaaaaaagtccaccaccctttactgtagaacgagcatctgaatttcctcactccaccacaatatcaaacataatagcatataatagcatatcgtccaactattaaaaccgattcaataaaccttcccggatggttttgacaggggtttcatttgacgttacatttacatggcgatacaatcaaccaaaaaaaataaaggaaaatgaaagacaaccaaatgagggtggtaaacatgatggtagagctagggtacattcggcgatggcaacggtagcaatccaccagagagacacccacgcgagaataccgagtatattcctcgcatcgttgtgccagtcgtaggtccacaaccgtgcacatcaccgtgcggcagaaacgtctccacatcctccgacaagctttcaccgtgacaaatgttgcatgctagcatacacaagtcatgcctagtgatgagagagcaaagagtgtggtggaatgggacaacaagtgcagcacgagagtcgcatcaatgtaggtgaagcgacgcatgtgagtaaggctgagatgggcgctaacaccatgttcgcaacttctcgtctcaacagcaacaataaggtaggccctgagttggcctacttatctggtgtcgccagtagtgccagcgactcgagcactgccgccccatctccgtgttacctttgccacaaggtagtctgtgagggagagagagagaggaggaagaaatacgttatgtgaaacatgtatcttttatttttctaactggactaaaaaactgcccgtgcgttacaaagggaagaaaagacaagaaaattgagaagaagttgagaaagatttacattatttaattaactaaaatacaatttttctggaatactggggtatttctaactaggtaggtaaagtaagcgtgacaaataaaattgcatgctgatttaacttttgttaaattatccatgattaatgctatgttcttatgtgagtgttgggaaccctcacctccgacacgaaaaacggagaaatagattaatacgtgattaattaattattagcttaaaaaactttaaaaatgaattaatatgatttttaaattaacttttatatagattttttttgcaaaacacgtatcgtctagcagtttgaaaaagtgtgcgcgcggtaaacgagagagtgaggttggaaacatagacttaagaacacagcctaattacactctctgaatttttcttggaatttttagaggccaattgctaattctaataatacaaacaccatgttagtatttatttaaataaaaatctaaataaaaaccctcttttctatatgggccatttatagctcattttcctcctcaacccgcacaagagccagcccaccttcctcccttattctctcctccacctcagcccgtgagcacatgttcggcccagcaagcaaccgaatgtctaattggtctcccctgttctctctcacactgtcacgtggacccatcgcgacagtatcatccctaacctccgtccggactccctcgggtgcctgacgccgcctgaaactgcctcctctgtaaaatccagccgtacccttggagataatccaaacttaattgagaggtttctatcctcatctcctactctttccgttttctcaagaatcagagcaaatccgcttcgtatcgagctcgaaattgagttctatcctaaacaagcgaacctacagtttagtcatccgtttcgtttggaagaaaataatgtagtggatgatgacaacgatggacgaaaaatcgttccggaagccttacttatttttaattaggtataaatagattatcgtatcggataatatcactgtgtagagaaaaaaagataaattgaactggttttgacatgtaaggatacggcgtgtctagtttaggcaaaaaaaatgggactcctgattttgtgggtgaggaaggaaattcagacttggagtcatcactagctggagtcagcacaaggaggtaatatagcctttattctttgctccggagcctgccgcgttgcatgtgtttgggctagcaggccgctatgtgtttgggtcggtaaagagggaggcctacctgagtcaagagggccctagaagtggccggactccgaacagaatcgcggaatcattgccagtccgtgttgtgaacgatttcggactacgactccgtgtcgtaaccaaccaaggccctataaagccacgtcccccgaggcccatcgacgctatcgtgttcgcctcaatcgaaacgcgcaatcgccttcgaggcttcgatcgatcgttttgttgctcggcgcccccggagacgtacgtcttcctcccgagagcaagagagacgatcgttctacgcgccaatatcatcaagatgtcgtcggagcagcaggcgagcgccggccaaccggtcctctgtgccagtggctgcggcttctacgggaaccccgccaccctcgacatgtgctccgtctgctaccgccagcactgcctcctcaacggcgccacgatggcgacggggccctcctcttccgtggccgccgcgagcgccgctaccgtcgcgaccggcgcagttacgtctgattcctgctccgtgccttccgctgaggttaatggcgccgcattctcctccaagaacaaccctgagccggcgacggtagtagagaagaaggcgccggcgaaccggtgcgcgtcgtgcaagaagaaggtgggactgttggggttcgcatgccgatgcggggctacctactgcgggacgcaccgatacccggagaagcacgcctgcggcttcgacttcaagggcgccagccgcgacgccatagcccgcgccaacccgctcatcaagggcgagaagctgaccaacaagatctgatcgccgtctggtgcaaactagccatagatgcattttaaattgttaattcagcttcagtaggctcacaagtcaccactcccatgataacggtgtcgttgatccgtgtaatgaatcgccgtaccttgtcttatgcaattacatcagttaatttgtatctcttctctgacgatccatggtgtatcggtgtttgcttaggccatggtcgtacgttgatcgaggtcgcgaaacccggtcgtttctggcgtgcgcggtgcacccgacgccggttaccccagacgtacgctgtcgtgagctcatatctgaacactagacgagcaccaagctagtcaggttgtcacggccagatacagtggccttgtaatctgtacttgccgtaagtgaacatgtcgcgcagccatgtggtcgacggagtcgaacagatctgagtagctgaacattgaccaactttatctttattctgctctgctgtaaaacgatcatactacattcatacttaccgcagcccatgcacaattgcaatggaatcgtagcaaacaatgtgacacgcgtagcgttctattatatctgtagtatgtgtagttagaatcttttcgcttcaacttgcttcttgaatggttggcagctcaacaccccctccccacacctttatccgctcctctgctagcatggcctgccgtccaaaaacatttgaaaaaaaaattgaaactaagccgagacgatcagcttcgactagtcctttgatgaagcgagctcactgtacctctttctgccatttggttctgtagaggatgacaagcagaataacagtctgcaggattgttccgatcagcatccccacccaaatcccctgcattggttagtacacaacggttaccacatctccctgcaagaaaatcatcactgaaaaataaaagtttagaccgccggctttgtctgtcttactgttgcattaaggctcagcctgaagccaaaaacggctgcaataggcagaccaacgagatagtagcagccaatgtttacgaaggcaaccgatgactgccaccctgccccaatcgccacccctgcaatttgtgccatttaccaatggcacaacatagttgcatcaacaagtgtcaaatcctgaagcaatttgagcatatatttcacttgattatagaatggttctgtacctgatagcaccggctggatgctgttgaggaatatggtggctgcaagaagatagcccagttttgcagtctccctgacgagcacgtcgtcgtccgtgaaaagcctcggcagctgcttcctcgccacgagagcgaccagagtgaaaactagcccgacggcggccgacgtgaccacggcgacgatgaccgagaatttggctgctttcgggtggttcgcgccgagttcgtttgccacgcgaacactgacagaaaaaatgtgacaggcaaagcatgtgtgtgagctcagaaaattaccagtgagttgagtggaagcaacgcataggataagtgcgttacctcactgcagcgttaaagccaactgcaaccatcagtgtccagagctgatagttcatgctgtttacgacagagtaagttgaatcgtttaaacttaatgttcaatcgttgccaggtataaaaatatcagaacattgctaattgatgtactaaccatattgaaatcgcaccaacttgaatctctgggttcttcaggcaacccaccagaatcagcactgctgtgtaataccacatctccaagctgcaggcaccaattcatccatgaaaaaaatattttgctaattttcaccgtgaaatggaacttgaactgcatgtacaatgctacgaaccacagcataacggcggatgagagggagagcttgacgaagccgccgaggctggtgaatgctttccgcgagaagccgctccaggcctccgggaacgacccgccgacgaggtacgcgaactgcgccgcgttgagcagccaccaggacacgtcgccgacgagcgccgcgccgacgacgccgtggccgagcctggcgacgacgagccagttgagcagcgcgtgcgcggcgagcgcggcggcggagatggccgtcacggcccacacccggctctgcgcctggtagaacttctgcatggggaagttgacggcgtacgcgaacagctgcggcgcgcaccaccgcgcgtaccggccggccaccgacgagatggccgccgactgccggagcaggcgcagggccggggacgcgaggaggtagagcgggagcagcgcgagcgacgtggcgaggcagatgacccacgaccgctgcaggtagacgcccagcatccgcggctgcccggcccccaccgcctgcccgcacagcgtctccagcgcgctccccatgccaagctgatcaaaacgagcgcgacaggcgccatgaacaaaatgcctagcgatgatcgatcacatcaatactgaccgtcctggcgtgattttttaccaggaggccgaaggcgaggccctcgacgacgccgttgacgacggagacggcggcgagctcgaccttgccgatgtggccgacgaaggccgcggtgacgaacccgatgaggaactggaagatctccgtcagaatcaccggcccggcgatgcgccacaggttcccggactcgccccgccagttcttgcggtggccagcgccagccgcttccgtccccgccggcggcgccatttcgctcctcagccccgtgcgcgcgccaccctcagtacggttgtgtgtgtgtgtgtgtgcacacgacgacgcggtacacatatagagcagagacaagccacgcacagtgtaacgtagagcagacaagccaccggtcgtggtcgtacgacatctttgtagctgcgtgcgtgcactgtggatgcggttgcacggcggatcgatcagcatgctagctgaggtgtggggggggggagagcgtttagggtcgcgcaacgtggacgatggagtaggtggccgtggacttacagggcggatccagaaaatctgtttgttagtatcataacgtgtatatcgatatcatagtatgctaattatacttagaacataatgttatagtatatggataaccagttttattttaggttttaccgaaagtcgtcggtgtcgcctgacaccgatgtttatactgtagatccacccctgacttccagtggatagagctcctcctgagttccgacataagcccgtctaatccatttccccgtgcaacgctgttgcggccagccgatgtacaaccgtgccggtgtggcatactacgacactctgcagaggcgtatttagttagctcagtagctctagcttgcacacgtgctggtgacctggtgtgcctccgagaagtttatcaacccccagaaatcttctcctgaatgctgaatctgagttgactaggcagctaggccgcctgacgaacaacttatgggtctttaatatccacggtgtcctcgttgtcctgtcattttctagtttctctttatttgggatacggtgcttcacgtacagctctcaccgggtgttcgtctcgtttggcgctagacggctgaccagcgctactcagcgcgttaggcgtaccaggcattcttctatggccagcattcctttacttgtgctgatcttctctagcacgcaaagaatcctgccaaatgcaagttcttcctttgatttgcattccaacagtgctcctggacggctgatctcctccagaaacgtggcatcgatagtcactcggccttccccttttgcgcccaggatctcgagacggcgaaccacatcctcctcgaccacgtgttcgctcggcaaatctggctttgagtgttgtcgcctcctagctgggctgccctctctcccccgtggcagctggttccaggactggtggccgtcctccagggcctgcttacctgagcacctccgtgacagcttcgactccttggtgctcctggtctcttggcaactgtatgagcgaaactctagggttttcgactccgttctctcctcagtttttgtggttctggagtccatccattcggaatgccatatgtggtctttaactggcgtcgccgtttttgaggatttgttaggagtgtagcgtggcttggctccttcccgctgcttgaagtctgtttttagccaccgtagtttctctaagcttcagtttatttttcatttgctttttctcccttcccctaacataagccggtctggctgattgtgttgtgtaactaaaattctttttcttctaatatgacgtgatttttttgcgcgtatgtgaaaaaagagtaggcagctaggcctccgtggatatctggggcaatgcaaataaagtccgcttacactagcaaaggttctgaagatgatccaggtaatctggacactggagaagaaaggccgaattgtcgagggctgttcaaatccccaccggcgtaaaaacagatcccatttcgatatgcacagttgagaacaaaaaactgaagatattgggacgtggattttcatctctcaatgggacatcctctcatagtttgcatatcatctaaatagttataaaaaaattgaaaaaaatgacaacatagattaatacagaatatattactccacaagcatgcaagaccaaattcaacttctataaattgcaacaaaaataacaaattaaattgaaaatagttatttgtaactatatttgttatttttgttacaacttgtagaagttgaatttaaacttgcatatttatgaagtgatatatttcataaatttgcataaattttacaacaggcatcctattccttgggttaatttgatttggacctcttattactctgataaattaccacatgctattcgcccaagaggttccttttggtggaaggatgtgttgcaatttctagatattttcataagtctgtcaagttgtaaagtgggtgatgggaaaacttgtttgttctggagtgatttttggaatggtaaagtcaggtcagctgtttaccctagaattcactcttttgccctctctcacaaggactctgtaagcataacttctactaaaagcatagcacagctttttgctctgcctttatctgaacaagctttccaggaatatgaatccatgagtgaagcagaccccttaacttattatctggtgataaagatgtttgggcttatgtctgggggaatggactgttctcttcacagaaaatttatgcaataaatttcatgcatgttcaagcccctgggtacttaagttggatttggaaaagcaaatgttctatgaaagttaaggtgtttgcttggcttctcctaattgacagattaaacacttatgatatgctgcagagaaggcactaccctcctgaaaattctaatctagcatgtgtcctttgtccagctcaagcaagggaaacatctttccaccttttctttcaatgtcaattcagctcagattgttgggcgcaactgggaattgtctggaacctttctctcaattttgatgatatgctgctgcaggcaaagatctcatatagatccactcattttgttgaaaaaattctctatgctgcatggaacatttggaagcaacgaaatgctttcatttttcagaatgtaccaccttcggttgtttcctggaaagctctctttaagattgatctttcccttttagtctttagattaaaagtttttgagagacaagccttatctcagtggataaaccttttgtaaatattttgtattccttcttttaatttaatttattaactgtggaggcttcccctacagtgtttcccttaaaaaagggtgatatatttcatattaatctatgttgccaaaattttttatattttttatgactatttaggtggcatgctcgacacgaggaatatcccctgagcggtgaaatcactttcccgagatattgccactgaactaactcataagtccagtcccagtatttatattgccacagcccacaggtaagtcacagtaactttccggcccaaaagaaacggaccatatgaacaggtttttttttttttgagagagaccatgaactagacttgagttcagcttgctgagtggctgattcaacgccagatctcactgcaacaatcaagcttagtaagattactactagtccattaatccgaattagttggataatcccgagaaaaagaaacacggttggataaacatcaaactcagagctgagaggcctatggattatggagctccatgtacaaattattttggtgatggctacatggatctactattcagtatgccaacagccgaccaaaatatctgaaagcatccttaggagtctcgagatatttactccctctctccaataaaaaaaatcaaagtatttggtgatgtctggattcatatctagaatttattttttttatgaaacagaataagtatgttccaacatcatctatagtactcatgtttcaaacaaattttccatcaaatgaaactgagtgtataaatgcaaaattgatattactgttggacctttgatatgcccgagaaaatagccaacttttagggatgaatctgaactcatccctagaagttgctcttttttttttacagagcgagtacaggctagcaaaaaaaagtacaggtcaaattgctactgttttatggaactacaaatgtctaaattatactgcacagattctgcactcaatggatcaccagctaaaaaacaaggtaaaaaaaagataatcttagttgatttttttttgcattattgaatagtactgcaagttcgttttctgatcggggaagaatattacaagttacatacatcgccattaaggtacataaagttttattaccatcttggtttatctcagatcaccaaatgcaaagcaaggtagatattatggttatttggtgactcggattaaacaaactatgctgaaacagtaagaagtaagtattcagatattacttcaagaaattacttcaagttcatatagtacttgtatgggataaaataaggccatgtgcacataaagagaacagaaagtagaaaatgtccggtacaatattttaaattcagaaacaaattccaagtgctgatttcagatacaaccaatgatgtattgatgtatatgcacaatcaagaatccatatatgacacaaataatgcaagatattatccttgcgacagccacaggacaaggttggaatgcaaatgcattatgaaaagataacaaggattcaaacttcacttaaaaactacaaacaagacttgcaactgcacaagtaatatatcgagaagcacgacaacattatcagctaccactcattatcacagaatcctactagtaactactgaagcatcatctttgtactatctctccacactgatcaacccgtgggagctactacctaatattgacacaataaaaccgtttcatacaggctcatcaccgaggattggccatagctaactgcacacatctaaaacacaatcaagctggcaatcacaagaacaccaaccagaacaagcaataccttcaagaacacatcaacatgctggccctgcggtgcctggtgcgggaaaccatggccatgccagccatggaacgaatgtccatacccgtaaggaaacccagcggcaggtccatacgccgccgcctgcgggaacccatgaacctggaagctcagcaatgggaaaagccccccaatggccgccgagaaagtgtagttcccccagcgaccgccggccacaggggcgccggcgccgcccatgaaccacgggtcgtggtgcggcaaatggtcgtggtgatgatcaggctgggaagccgtcgccggccgctgcccggccggccggctggggatctggacgccggccaccgacctggagcggggatcggtggaggccttgccgcggccgtagagggggacgagcttctcctcctcgaggccggccttgcagacggggcactcgcgggagtgcgcgtggacgtggagccactcgtagaggcacggccagcagaagaggtggccgcagagggtgacgacggggtcctgggctagctccaggcagatgttgcactcgaagctgcccgagtccttggcgccgccgccgccatcgacggcggtcgccgacgactcaccgacgcggttctccatgagtccgaggtccgatctacaaaacgcgggaacgtaccaaccaactcatgagctcaagccatgaatccacgaaccgatcgacagaataggcgctcgatcgatcgtccactagtatccccaaatttaggaaatctcttttctacgcacgcagcaaaatctaccatgccagacgatttaattaattaattctcggttgcgtgaaacaacatcactctctttttgtctcttctacaagcaatcccgaacaggtaggatcgattcgttcagaaaacactcacccgtagattgaggaacagccacgcaccgtgtaaacgacgcggatctggaccggtcgatcaacagcaagcgacgaccgcgatcgagcacagcacaagtcaccctgtcgaaacgagccactattcacccaaatccacgcggagtactccggagatagcgtcgaccaagcgcccgcgcgcggtgcactcgccggccggcgcgcggcgagccggggagcagacgctggcagctaccggcggcgaatcggaggaggaagggttggggatcgtgggggaactcgagtggtggtggtggtggtggacgcctcggtcttcgagtggagcgagccttcgagtgaaacacacaaacgcgtggcgtggcgtggcgtggcgtggatgctgcgactgcgactgcgacggttgggaagcggacggctacgagcccgtctccgttcttcctactgcggggacgaaacagacggtcggacgggcgtggtcgtcccgtcccgcgtgggagcccctcggcccctcggggcaatggcaagtggcttgataagttgatagctgccgtccgatgtcccgaagcttcggccaaagagcattgatgagatacgtgccattgcagaaaagggaagacgactatggccgtgttagttccttttcaatttttttaattatacggttacatatttaaattattaaacgtggactaataacaaaacaaattataaattccacccgtaaactgcgagacgaatctattaagactaattaatccgttattagtaaatgtttactgtatcaccacattgtcaaatcatggtgtaattaagctcaaaagattcgtctcgcaatttacatgcaaactgtacaatttcatattcgtttccactacaagaagtggattaaattttggattttcgtggcacgtttttcaaacggctaaacggtgtgtttcgtgtaaaaactttttatatgaaagttgttctaaaatatcagattaatccatttttcaagtttataacaattaaaacttaattaatcacacgttattaccacctcgttttgcatgaaacacttaatcttcatcttcatcttcaggagattcaaacaccaccttaatgctccatgcatatgtgtagacatttgatgtgatggaatttttggaagtttgaatggaactaaacacaacctatttacgagaagagtttagaaagtatatgttcctttcgatttcataattctgaatagccaacactgtccctactcctaaatttctacttcgggctcagtttagttattgagatttcaaaaacaagttctccaaattaatcatttgggttaacatagtccttagacccacaaaatatgccttattagcatgccaagtcattctcgaatgcaactatataaatgaaatgaccattctacccttataaaccatatagaaagaaagaaaagaaaaaaatagaggaaaaaagaaaacaaccaaaatgaacaagcaacctgttagttcaagtcagtctccacacatgctcttacgtattaccaggaataccattacaataatctgtaagaatcatttttactttcaaaaagaacatgccaatcgaaataaaggaggatcaaagttgttgattccgtccgtcatcggtccctgcccgacttgagataaaattggatgacaaatcaaactcgtatttgaaggcctcattatttggcttatgcttattcttataagctaaatttaaactttagaacttaattttggattcgattttttggttttttattgtactttattttaccataatagtttttgagtcactaagaacatatatataaaatatttgcacacatatattattttatttagtaataaatgattcggataagcacatgaataaaacgaaacaatgggttgtgattatttatccaccgacacatatgtacaaattaaattggctttaccgttgcaacgcgcggatatcttttctagttatattagaaaatcaaggttaaatatatattttgtagactgtgtcattgtccaaaacatcaacaattatatatggaaccgggcggagtattgtaacgccccgattttcgttcgggtttaaaaattattaaataatgcattttctagaaattaaataaaagttaaatcaatttaatcaagtgaaataatgggagaattaaaattttcccttaaaaatcattggccgggaatattttgcaatattctttgtgccctaaaatactctccggatttttccgtgaattttcggagttcaagaaataattttaaagtcataaagttcattaaactaatttaaataaaaagaaaacaaaataaacttccccttcctccctttcgggctcggcccaaaatcctctctccttcccctcccgcggcccggcttgcctccccttttggcgcaagtctgcttttcctccctcccggcctcccctctcactcaggccgacaggtgggacccgtgggccccacctgtcatccccaacctccagcccgggccggcaactgccatggccgcccgagccgcccacgtcgccgcccctccccgcgcgtcttccgattcccgcgcgcgtgtgggcgcggtccaccccacgtcatccccttcctccaccatttcccccacttctcccctccaaaaccggcgccaaactgcccccactcacccacgtcgccggcgcccctttcccccttcaaatccgtcgccaaccggcctccccgtcgactctcgaggctataaaaacgatccccgggctcccctcctccgtttccccctctttcccaagcttccccatgcccgaaaccactccgccaccaccaacctccctccgccgccgccggttgccatctccggccggccacctccgccgccgtagccgtccccgcgccacgccgcttgcgccaccggcctcgcgacgcattggcgcacaccgtccgcaactccgtttccccaaaccacaatcaaaacaccgattccatcgctcacccgagcaccgccgccgtttcgccgccttcggcagcctcttgccgccgttcccgtccacctcaagccaggccgccaccaccact

SEQ ID NO: 7428 - DNA, 43111 bp, Oryza sativa
attcctgcagcccatatatatatatatatatatatatatatatatatatatatatatatatatatatatatatatatatgtatatatatatatgtgtggactctagactcgtcttttaatatttcttttcttttaatttcgaattttctgtaaattgtatttctatatagactttatgctcttcttccaatattatttatttttatttctaaatttttattatttctaattgtatttctatgtggactctaaactcatctttcaatattctttaattattaatttcgaatttctgttacttctaaattgtattcctatattgactttaaacttttcttcccatgttttttttaaaattttaaattttagttatttgtaaattgtattctatatggactctaaactctacttttaattttattatatttattttaaattttagttagttttaaattcctatatggactctatactctacttctaatattccttattttttaattccgaatttctattattttcttaattgtatttttatatgaactctatactctacttctaatattccttatttttaattccgaatttcagttatttcctacttgtatttctatatggactctatactctacttctatattccttatttttaattccaaatttcagttatttcctaattgtatttctatatggactctgccttttctttttcttcgattaatgtgaaaatttctaaaccatgagagtgaacgtggaggctcatttttctatttctttaataatataatagattttataaattaatcctttaacttctcaatattaaaaacaagcaaatgtaaatggataagcacatataaaattgaattggggttgatattctctatagcaaaagagaatgggtaacacattttgtgaaaaatatatttttatttatttcagatagtataatttctttcatccttagcaaagtacaggaattcagctagtcataaaaaaagactcaaaatttatacaaacaaattactgttatatacttgttgttgacggatcgttcggaaagggcccacctatcccgtaccgaataagaagagaagagataaaatttgctcgtgtgacacaaacaatttttttctttttaccaaatcaccgagggatagagttttcccacctgaattcattccaaacgcgagaccaagagttacgaaggtttacatagggattacatcataattaagagtggaggggggtaggagaaaatggcgttgatggtgtcgttcaatgccacaaacagattttgattttaaatatgagataaacccttgagtcctacttgaataaaagggataaatcacagaggagagaggacatttgcgataaaacccaaaatctaatcactcgatcaattaatgtctagccagtgttgatagcgctacgagggacttaatatctccagccagtgtcgatggcggacttcgctaccctaacagaaacggtaaatctaattgaagaggcctctccaattagtcttaaccagagacacccacgtgttaatactttatgagttttggttattattaatccattaagcaagtaggggaaatattcctatcatctatgcttcaaataaaattttctcttaaattaatcatccgatttacaatccgattacatcattgtgttcgtaataattaaatctttacaataaaatctcacatgattatactttgatgaaaaatcataaattacttttatgatatgtctaacttacttttagatttcagtaagttacttcttagacatataaaagtaaatttagtaaagcctaaaagtaatttacctaaattatagaagtaacttataacagaaagaaagtaactttaattaatgcctttttttcattgaacaaattatcatatatatatatatatatatatatatatatatatatatatatatgttacttttagatttgattaaaatacttcctatacattcataatgctctgaggtgattacttttattattattttagttaattccataatttgtgctgattaatttattttctagatagagtcatgtttttatctctacaacggatttacttcaaatgacatgctaaagttacctttattttgttctaagttacttttataatatatgtaaattaattttaggttttactgaatttacttttatatatctaagaagtaacttagtgaaatctaaaagtaatttagacatatcataaaagtaatttgttatttttcatcaaaatataatcatgtgagatcttgttgtaaagatttaattgttacgaacacaacggtataatcggatcgtagatcggatgagtagtttaagagaaaattatatttgaagtataggtggatggtgcctctatatagagtggtagctggtttagacaaatcagctgcgaccagcgcgcgacctcaagtcgatcaatgtgcgacctcaagtcgatcaagctggtagcctagctggtacccccgtttttcctatacggtgtaactaatggaagaataaagatcgcggcttcagtagcttcacaagaaaactagttagatcaatttcgttttagcagagatgatcgtgtaagactaaggctaaatcaaagtgaattggactcttaacacttccatccgagcgtgcaaacggcaaacatcagcagattggagggccaccagaaaggcacatttaaccccatccctttctccccttctttgttccttgcttgccgaccgagaactctgatcgtgacggggccagaacaaaccggcacgtacgtacactgaccggccgcttggactcggatgagctaattaatcaatcaatcagtccgatcgagagtttttattttcaattaattcctatcttccgttggactttgacgctttgattagaaattaatcgagtttgttaatttgccacgatcggatccgcggttgctttcagtgtggaacacacggcgctaattaagacttaaaaccagtagtagatattaattagaaggtgctttaattagcttagccactccagctccaatgcctagcttaaccacaattgttctgatcacgtcattgctgcagctagctagtactacgcctgatgcctcccaggctcccacccctctactgtgttctgccaccgttgacacgggacatagcccaataaaccaacgaccagatacatagttaattagaagttaatttttttttaagacagagacaaagtatgtatctatcttgacgaaacatgtgccacttaatccttgattggagaacacatcaaaatgggcaaaataaacgtacatgcgtacgtacgttgagatagctagtgtcggtgacatggggccgggggtatcgtgactagaggcttgggtagccgcggtcacccacgtggcctgaccccctcgggggggggggggggggggtcgggtccgagggtgacgtggccacccctccctctgtctccccgaggggtcgggccgctcccgtttcggccccgagggctggggcgccccgacccactgtggttttggcgccacgtgtgtgggttaggtgagcacagggggctcacctaaccgcatttatagcaggttggacgagcgcgccacgccgcatttaatgcggcgcagcgcacgcttatccggtccgtgaccggtcgcggtgtgtgaccggtcacagaccggtcagatcgcgggttaggtgccaacaggcggcctgtcacacgcctcgccccgtcccgtcggaatgatgagagcttcctggctctcgtccctagccggagccggcgtgctaactcctggagttggtatgtcagtcccggtcagatccattccaggcttcagcgcaagtatggcaaggaagtcgctggccattaaatgaaggttgaaatgggcgtccaccggaaaagcgggcgagcggggcaggaggcgtgtgctctgcttgtcagaggtcacttccggctgtagactagccctcattgtaaaaagcatgtttcccttcttaggcagcaggaggcccatgtggtgaccccggaccagataaaaaggaggcccaggcctaaaaagagagagaaaagaagaagaagggaagggggttgggactctggcgaaggggttctagagcctgaactctctctcgctctccggctctctgtattcattcacgcacagatccaccagaacacaggagtagggtgttacgcttctcagcggcccgaacctgtctacgtcgcccgtgtcttgtgcacttcctctctcgctgacgtttcttagatcgagggcgaagaacctcacttagcgtccccggccgaatcggcaaaggggggcctgcgcggtctcccggtgaggagccccacgctccgtcatctggcgcgccaggtgaggggcgcgcgtgtctttctaagccctcgtcctctttcgtgtgcgccaagcttctcccgctcagcccaatggccgaacgggcagtggcgcacagcctctctccgaacgctagcggcgacgacggggagcagaacccgcgccgtcgggctcgcaccccaccgtccccctctcgccgaaatcttgggcggggggaggcgctcggggaggtcgaaggatccgcgaattcgccgcccgcgggcgacgggggaggacggcgagacggggcgcgtcgccgcctcgtctacggcgatggcggcacgccccagggcgcgctccaggctacgggcgcgctcctgcgtcacccgcccgtcgtccccgatccagagactccagcccgacgttggctggatgacgtggccgacttggtcatgacggcgcagcagcgcctaggcgccagcgggcggtcctccgccaccgaggcctctggcgctgccgccgccggctccatgtcgtcaaggcggagggcgcggcgagcggcggccgttacccgccgttcgtccgccattccctcgtcaacgcctccaacccaagaagatgtgcgtggggggctggatgcccgcctcgatatcgagcgccggcgcgacgctcgtcgcgccgcccacgcaacggagggcgcttcctcgtccggagcgccacttcggtccgggcacgggggccggccccccgtgtccccggttggcggtgccggctgtcgagcctttgtggcgagccttcggaacgtccgttggcccccaaggttccggcccaccatcaccgaaaaatacgacggaatcgtcaaccccgccgagtttctccagatctacacgaccgggatcgaggccaccgggggtgacgacagggtcatggcgaatttcttccccatggccctgaagggtcaggcgcggggttggctaatgaacttaccacccgcgtcggtccactcttgggaggatttgtgccagcagttcaccacgaacttccagggcatatatccgcgcccaggcgaagaagcggacttgtatgcggtacaacgaagggacgatgagtctcttcgctcgtacattcagcggttctgtcaagtccgcaacaccataccgtgcatccccgcacacgcggtgatctacgcgttcagggggggcgtgcggcacaaccgcatgctcgagaagatcgcctccaaggagccccagaccaccgcgcagctttttgagctcgcggaccgtgtggctcgcaaggaggaggcctggacctggaactcctccggttctggtgtggcagctccggccgcccctgggtccgccgctcggtcagggcggcgggacaggaggaggaagaaggggtcggcccgttccgacgacgagggtcatgtcctcgccgtcgagggcgcttcgcgggccccccgaaaggggaggcctgcgagcgacaaaaagaaggaggccggcgctcccagcagggagcgcccgaccggcaagtggtgtactgtgcacaacacctccctccacgacctcgcggactctgccgcgcggtcaaaagtttggctgagcggacgaggaagtgggaggaggagaagaggcaggagcgccgtgagggcaagaccccggcggacatgcccggggtccccagggaggtgattgagcaccgtcttgccgtgcggccgggcgcaaggccggtccgacagaaagtgcggcggcaggccccggaacgtcaagccttcatccgcaaggaggtggcgcgacttctggaggccggattcatccgtgagatcatccatccggagtggctggcgaacccggtcgtcgttcccaaggcgaacgacaagcttcggatgtgcatcgactacaccgaccttaacaaggcatgtcctaaggacccttaccccctgccacgcatagattagattgtcgactccaccgcggggtgcgaccttttgtgttttctagatgcatactctggttgtcatcagattcgcatggctagggaggatgaggaaaaaactgcattcattacccccataggaacttattgttatacgacaatgcctttcgggttaaagaatgcaggtcctacttttcaacgtactactcgaatttctttgggtagccagataggacgcaatgttgaggcctatgttgatgacttggttgtgaagacgcgcaaccaagagaccttactctcggatctagcggaaactttcgaaagtctccgctccgcccgcataaagctgaaccccgataagtgcgtgttcggcgtgcctgcgggcaagcttctcgggttcttggtctctgcccgaggcatcgaggccaaccccgagaagatacgagctatagagcggatgcgcccccccagcaagcttagggatgtgcagtgcgtcaccggctgcatggccgccctaagtcggttcatatcgaggctgggagagaaggcactacccctatttaagctcctcaaacgctccgggccgtttacctggacggaggaggctgagcgggccttcactcagttgaaggcgtacctcagttctcccccagtcctggtcaccccggagccagatgagccgttgctactctacctggcggcaaccccgcaggtggtcagcgcggcattggtcgtggagcgcgacgaggacaaccctcactccgcgtatccccaccctgtgtcgactcgacccgggagagagcagggaggagaggcccccgagccgaacggcggcccaaggcccccgacggccggagctggccctccgcctgcttgtccgacggtgccaggcgcccccgacccccaggatggccccggggccactgcgggaaggccgcgcctgtcgccctctgaccccgaggtcgtcggcacagaagccgagtacgccccgcgtggcctctcggacgaagagcgccctagagatgcggcccctggcgaagaggatcggccccgccgaaaggtgcagcggcccgtctacttcgttagcgaggccctccgggacgccaagacccgataccctcaggcccagaagatgctttacgctattctgatggcttcgaggaagttgcgccattatttccaggcgcatcgggtcacggtagttacgtcttaccccctcggccaaattttgcataaccgagagggtactggacgggtggtgagatgggcaatcgaactctctgaattcgatttgcgctttgaaccacgccacgcgatcaagagccaggccctcgccgactttgtggcggagtggaccccagctcccgagcccgtctccgcccccgaggccagctcgggcccctcgcagctgcctcacaccgcctactgagtgatgcagttcgacggctccctgtctcttcagggcgccggtgcgggggtcacgttgacctcgccgagcggagacgccctcagatacctggtccgcctcgactttcgggcgaccaacaatatggcggagtacgagggactccttgcaggactcagagtggcagctggactggggatccgccgcctcctggtgttaggcgactcccagttggtcgttaaccaggtctgtaaggagtaccagtgctctgacccgcagatgaacgcttacgtgcgccaggtgcggcgtatggaacgccatttcgacgggatagagcttcggcacgtgcccagacgggataacgcggtcgccgacgaactctcaaggctcgcttcctcgcgagcccagaccccaccgggcgcctttgaagaaaggcttgcccagccatcggcgcgacccgaccccctaggggagacggacgcgcctgaacggcccccgaggcccgtcggagtccaggcctcgggacccgaggggagcgctcccagctcccctagattgattgcttggatcactgagatccaggcgtacctcgcagataagactctacccgaggaccgcgaagggagtgaacgcgtccggcgcatctccaagtgctacgtgctggtggaagggaccctctatcggcgcacggctaacggagtcctcctgaagtgcattcctcgggaacaaggcgtcgagcttctcgccgatgtccatgaaggcgagtgcggagcccactccgcctcacgcaccttggttggcaaggcctttcgccagggtttctattggccgacggctctcaacgatgcggtcgacctggtccggcggtgcagggcgtgccagttccacgccaggcaaacccatcagccggcccaggccctgcagaccatacctctttcgtggccgtttgctgtctgggggctcgatatcctgggtccgttcaggcgggccccgggcgggttcgagtatctgtatgtcgctgtcgacaagttcactaagtggcccgaggcttatccggtcatcaagatcaataagcactctgcgcttaaattcatcaggggcatcactgctcggtttggggtgcctaaccgtatcattacggataacggcacccagttcactagtgagctcttcggtgactactgcgaagacatgggcatcaagctctgcttcgcctcccccgcccaccccagaagcaatggccaagtggagcgcgccaacgcggaaatcctcaagggcctcaaaaccaagaccttcaacatcctcaagaagcacggcgactcgtggatcgaggagctgccagcggtgctctgggcgaaccgaaccacgccaagccgagcaaccggagaaacgcctttcttcctcgtctacggcgcggaggcggtcctcccatctgagctcaccctgaggtcccctcgggtcaccatgtattgcgaggctgatcaagatcagcttcgccgagacgacctcgactatttggaagagcgaaggcggcgcgcggccctccgagccacgcgctaccagcagagcctgcggcgctaccatcagcgccacgtccgggcccgatcactctacgtcgacgacctcgtcctacgccgcgtccaaacgcgtgctggactgagcaagctctcaccaatgtgggagggtccgtatcgagtgatcggcatcccccggccgggctccgttcggctggccacgggcgacggcacagagctgcctaacccgtggaacatcgaacaccttcgccgcttctacccctagtgggggtcgggtgtcatgtctcgggctcgggccaaccctgcaccccccctcccgggcgtgcagggttggccgggggctaccacatgcatatacttaccttttttctcttccgtatttcaataaaagcattttcgatttcctgaggactgtgtctgtgccatcatttccttttgaagaatcttggcttgaattagcacgctcgtgctcgaccctgccctcggtggcccgggccggctaaaatcgccaaacggggcccagaaccgagccgtgccccggggcgtggtgaactccgggggggaatcggcaaaggcccacaatcgggtcatccataaccctcggtcaccgtgctcccggcctggccagtctcgacacgaggatctccccaggcactagccccgacccgcgccgtttgaggctgggacctgggcacgagcccttgttcaagccaagacacagaaggaccgcggcacagaccatcctcgtctcatacacacaacaaacagaactgacgcagaaatttcctctttacttgattgcagattaaatcagtctatacaagaagggggcccgaaagcctcggaagaagaaggaaaagttattaagattggcgggggcctgggggctcactccgacgcgcccgggtcgtcggcctcgtcgtcgctgtcgtccgcaccgtcatcaccgccctcctcgtcggagtcgagcgcgaacgcgagccgaggggccgtaccctcgaagctgtggacgatgtggtcggcggcgtcccggacctgcgcgcgcgccgtcctcggttccgggagggaactcttccagcgctgcccacggggagaagtcagggtccctggcctggtagcttgccagtacgagctccaccgccccccgggtgaggtccctcgaggatgacttgatcgtctcctcgagctcctcggggagccgctcgagggccccggccatctctgagaggcgctgggcgaggcccccctggttggcggcgtacttcgcgtaccgcccgccccagaggcccgcctgccgcccggcgcggtctagacgggacacggcgtcccgaagcatgccgggccctacctcgctcgccaagcggagggcctcgacctccccggcggacgagtccagcgcgccctgcagctcggcgatggtgtgttcggcggctgcgaggcgggcggctaggtcgccgtggcccgcggccgccccgccgctgtgcgctctcgcgtccagctccttcgcccgcgcctcgagctcagcggcccgctgatccagtgcggccctctcggcgcgggcgccttccagattgcggcgcgcctgctcctcccgcgctgcctcgcggaggaacaggctgtccgccagccgctgcgccgtggcctcggcctcctcgagagctcgcccccgctcggtgagcgcgtcctcgcggaggcggagtgcggactcctcttcggcgcaggcggcctcgtgcgccgccagtgttgcctcccgggtggcgacggcggcctcgcggtccgccaggtctctctccttcgcgtccagggcgcgggcgcgctcctccagcgccgtggcgcgagcctcaagggcctcttcgcgctgccgggacgccgcctcgttctccgccgcccgccgttctcgggcagcggcggcgtcaaggactccccgggcggcgtcgagcttctcctctagctccgccgcccggctcccgtattggaggcggaggtcgtcccgcgcctcgtcgagcacggcggtggcgatgagggcagtctcccgctcctcctccacctccctggcgatctccgccaggtccctacgacgggcctcgagctgtgaggcgtgccggcggtgtgccttgcggcccgcctccaccatggcctccaccgagcgccgcccctcctcgacgcgcgcccacgccgcgtcgagctccgcccgctccgcctgcagggcctccatctgggcacttaacccgtccagcaccgtactgttcgcggcggccaaggcctgcaggaggggctccgcgctcagtggggcagcggaaggcagaggggagagccccctcggtgtgggtgccgcgcggctcggcccgccgatcgacgtgccggactcgggggcgtcccccgaagctggctcgtcccaagcgtcgcccgaggggtcgggcccgagcggtgcgcccgcggcctcgtcgtgggtggcctcggaagtcatcgtcgcctcgggcggagtcgggtcgggggtttggcaggccgcctggtgtgcgcgcgccgcctctgcctcccggacggactcccaggcccggcggagtctggcctcctcccgagcggcctcctcagcctggcgaacccggacggcctcctgggcagcctcctcggcttcccggaggcggtccgcggcttctcgccggtcagcttcccgcctccgggcctccgcggtcgccgtctcctcggcctcagaccgaccggacttggaatggcgggggggggcgcgacgggatctcgctgaggcagaagaaaaaccagaagacaaaaagaaacgggtgagtgaaaactcgccttgggagatgggagaatgaatacggccgcggtgggcgcggggacgaacctgcggggaggtcggctaaacgaccacctcgggggcgagatgaggttcccccggcatggcacgatcccccccatcttgcggggccgtttcttctttcgctccccctcgggctgcggcgtcggcaaggcaccctccgggcgcctgctgctggcacgcaccgcccctccccctcggggaggagatgggggaggggtaccctcctgcttcctcttcccccgggcgtcggcagggcggctgccccccgggcccccgtcgcggggcccagaagcacgaccccctcccggggtagattgttcccccctgcggctcccgcccgcgccatcgtggccccggggggcccgctcccccgacgccccgaccacctgcatgatggccaggatcttggcgcgctctggatcgcagcagagggggaggaccccttgggggatgagggatgcctccacggagctgagattcagcacccgttggaccaccatcctgaagtcctcagggtcccagtcccatttgcgcccctggtgggtcctcatgtagtcctcgggcccggtgtactcccaggcgccccgggcgcgccgctggagcggcgcgatccggcgacgaaggtagtcgccgaacaccatggcccccgtgagcccctgggatcgcagacccgccaggcggtcaagaacggcgtcgtagccgtctcccagatctaccgccgcccgccagctggaggcctgcgccgggggctggctcggaagtcggaggcgcgcttcgtcggcgaggggggtgtagaaccaatcgctcttccagtcgtcccactttttgcggaggacgcagggaatgtagcggttcagcacctgcccccgcggctggaagtagcagccaccgactaccgtcggcggtgacaccggctgtacggtgaagaaccaccggaatagccggagagatgggcgcaccccgataaacatctcgcacaggtgcgcgaagatggccaacgtcattatcgcgttgggggtgaggtgcgccatctggagatcataaaactccagaatatccatgaaaaaaatagagaatggcgggaccagccccgccattgcgaaagagaggaagaagacggaccgccccgggtagtgtggcgccgggcgtccctcgcccagcgcgaccacctaccggccggtggcagattccggcatgaatcggcgcggcagcccggcctgcctctcgctcacgatgcgggaaggcggcagcacgctaccatcgagcggtgcggagccccgtgccatgacgccggcggaggaggagcttgagagcgagcgagtgcggcaagggtagggcacaggaaacgaagagttagagcacaagtggcgaaggcaaggggaagagtggcgagaggaaagaaacgaatcccttccttggcgtctttacacccttgccaacgctatgcccggctcctcgcttcccgcgcccactacctcgccccctcgtttctcgcgcccacgcctccactaaccccactcgcccgtttgcggcgcacgcggaagatgtgcggccgtggcggttgagatggggcagatcgtgcgcgcattaactacgcccgccaaccgtgaaaagcgtcatcatcatgtctccaggcgaaacgaaccggctcgtcccgattcgcgcgctgctcgagtaatgtagcggtcttaaagaggccgctcattattgtcggtcggttttcccttgccgatgcgcgcgatttgcgaccgccgggtttctgcccgcctgtagggaccggccccacctgtcaccgggcctaaggagtggcgtcacgcccgagcgcttccctcgaggggggcgatcgccctggcgtaacgccgggggctactgtcggtgacatggggccgggggtatcgtgactagaggcttgggtagccgcggtcacccacgtggcctgaccccctcgggggggtcgggcccgagggtgacgtggccacctctccctctgtctccccgaggggtcgggccgctcccgtttcggccccgagggctggggcgccccgacccctgtggttttggcgccacgtgtgtaggttaggtgagcccagcgggctcacctaaccgcatttatagcaggttggacgagcgcgccacgccgcatttaatgcggcgcagcgcacgcttatccggtccgtgaccggtcgcggtgtgtgaccggtcacagaccggtcagatcgcgggttaggtgccaacaggcggcctgtcacacgcctcgccccgtcccgtcggaatgatgagagcttcctggctctcgtccctagccggagccggcgtgctaactcctggagttggtatgtcagtcccggtcagatccattccaggcttcagcgcaagtatggcaaggaagtcgctggccattaaatgaaggttgaaatgggcgtccaccggaaaagcgggcgagcggggcaggaggcgtgtgctctgcttgtcagatgtcacttccggctgtaaactagccctcattgtaaaaagcatgtttcccttcttaggcagcaggaggcccatgtggtgaccccggaccagataaaaaggaggcccaggcctaaaaagagagagaaaagaagaagaagggaagggggttgggactctggcgaaggggttctagagcctgaactctctctcgctctccggctctctgtattccttcacgcacagatccaccagaacacaggagtagggtgttacgcttctcagcggcccgaacctgtctacgtcgcccgtgtcttgtgcacttcctctctcgctgacgttcctcagatcgagggcgaagaacctcacttagcgcccccggccgaaccggcaaaggggggcctgcgcggtctcccggtgaggagccccacgctccgtcagctagctaggcagctagcaacctactccctccgtcccaaaaaaaaaacaaacccttatttccgtgcccaacgtttgactatccgtcttatttaaaaaaattatgaaaaaaattaaaaagacaagtcacgcataaaatattaatcatgttttatcatctaacaataatgaaaatacgaattataaaaaaaatttatataagacggacggttaaagttggacacgaaaacccaggatttgtattttttttttttggacggagggagtagctacatctatgttccgtaacatggtaacgattgattaatagacaagggaatcgctcgctgctccggtcccatccggctaaccattggtttcgccggcttaaaaaaaaatctcctgattatagcgtagttaacttgtttaggaggttggggattcccccctatctaactcgaggctaactaagcagagcttagcttaaattagctcgtattacttctagttgcaagttgcacatacgtactccttgcttatgcagcagagagaacaggcaaccggcagcctcgcgtagctcgtcgtcctctgccaatcgcccacacgcattgtgtttaggcagacagagcatctttgtctcagatctccccccgagtaaactaattgccactgggattactgggagaagccaccacctacctgttcagacttcagcgtcacctgtgtgtcatggatgatgcattcatgcttgcatatgtatatgctctgtaccctgaatcgtgagacatacgtggtgcacaaaatgcaacatggatggatcatggatggatacatggttggatgcatgcatgtcgtactggcttggatttgcatgtgtgcgtccaggtgctggcatatacttccagcagcagctagctacgtgtatagaattgaataatgtttgtagattttgacttggtgtagagaagacggacgagagccagctagctgcaaattccaacagacaccaggtgcagtgggaaaatactagtgtttggttcaggcagagcgatcgatcgatcgatcatgacgccgttcctgctagataggtatcgtcctcttgtctctttccagataattaaactagcctagttgacgagtcttttagtttttttttattaatgctgggttgctcgatctggattttagtttatctcggagaggggaatggaataggtgtcatattatatgtgtactgttcaccaatctgcagatataatagtagaatacaaccgttgcttgatttctagatgaaacgagaatgacaggcaagctcttgtgtgctggctaccacagttttgagagaagaacctaacttggtttctgataaaagcattaaaaacaagccatctgaactctaagaaatgtacaaacataaaaaataggtcatgtcgttttcgctttttttatcatatcatttacagagtagttcttaattaactgtagaccagagcattcctcattgagaataactctcaatatatgtatgtacaggatatacggagtatttttttttcctttttgaattaatatgttgctcccgtcatctcagtatcaatccagtatacttttttttttctgtagtcttcccctgttccacatcaaagaccatgccgtattccgttgcaaagacagcaatagcatggcttgataaagaaacatattcaccaatcaccagtactgcccgtctctgaatttcagagtcgaaagccaaaaggtaagctactcgattgactgtatccacagttccacaccctgctgttccccgcgagaacaagtagtacagtattgcccatgcattcgcggtgcgggagttccgtgcgcgcgcgcgctccgtgtacgcgcgcaaaaagaacggcggctctcgaggcttggcacgttggcacgcacgcgcgcgccatatgggcttgctcgatcgcgcggccccgatcacgtacgtgcgactgtgcgagcgaccgagcgagaaccacgcgtgccccggccgcccaccccgcgagtccacggcacactcgcctgagaaaaaagtgccaatatcgctgatccatccgtgggtctgcgccggctaaggttatggttgggtcaattcgtaaacatacttatacggttttttaataataaacatacttatacgataaatttacagatacaagattctttgcaatattactcatacaatagcagtgaataacatgtgagtccgagtctaaatatcagtgtctgctactttatcaacagtactgtagacatttccactagcaaatttaccatttatttttagtagtagtacaaggctgcacgatattgctgatactatagcagctatcgtgtaatgacagtacccaacacgtagtatagtagtgttgttaattgttttatatcctaaaatataataatttagtgtgggatgtaacataaagtattttagtaattacgaatgaatatttatattttatattagattgttatattttaggacatgacttatggagagttcgcgtatttgggatatacaacgacgtagatcgatcggtctgtgaagtgaacgtacgactcgtcggtctctatcgatctcggggtcaagactgacgttctgacaagggaaacctgaatgacctgttaaattggacgtggtgtactgtacacttggccagaaggggttgcgtacttgtgtacgtatttcagtatttctgctctcgatctctctctctctctctttcgctagttagctttgtcctttatattataggttgatgtgttgttccattccctgtacggctgagggtgcaaacgcccgctcttgttcctgtcaccatgtcccattcgatcgttttcctcctagtacagtggacacgcagatttactgtagatcctcgaaatggaccggcgcggtaacaccgatcgtaaatttctcagtgaaaaaaaaatgcaatgtaaaatcagttaaaacatgtggccaaaagatcagactctgctaattacagccttacaggggggctcagaaccaaacaaaaccatctctagccaccaaaattgactcacgagaggttaaaacttgattgaaaggaacaactcgatcgacagatcgatccgattgatcgatcgtatcctagctattagctagctagctactacttcatgagacgcgttaattgaaccgatgttaacgaaaataattgggtgtactagctagcacaagtcaagacacgggaaatagtgatcgtttctacgcctcgacccgatcgatggatgattcgatggacgacacgtaaaacacgtttggctcttcgcgatcacagaaaggggatagataggccgacacgcgcggtacaagctggattagtacattattgtctccacatgtatatatgataatatgattattgctgtagcccgtaggtctatccagccgtacaagtaccactatgtatatatacgtacgtaccctgtggatcaaccacaaattatttttgtgacgtgctaattttataaagaggttttggaaggatttgctaattatattctaacgagcttatatggaagatgagtcgacaaatgcagccaacacgttcacatgattaattacgtccagcccggcagtctatatttcgacgtgaagttaattagctagcagaagatcctatttgtgggtcgtgtgtgattagtaaactgtctgtgtgtgtgtgtgtgtgtgtgtgtgtgtgtgtgtatgtatgtatatgtatatgtaatactgaacacattttaaatggatttttagttagagccgtgttagattttaaatggatattttggaacactagcccgtcgtcagtcatcactttactaatttgaactgatgtcgatcgtgaaaaattttaaaccgatgaaagggtagaattcctagcataaagaaacttttcaaacttacattacattactttaacttgcaaataaaaaattctacaatgctaaaatgtcaaatattcttgtggaaattctcttgtccgtcaatgccccgcttgttccatgcatgcatctccagctgccggctcacttgtattaaggaagaaaaatcccatttctcctttcagtccctgtccacttaccatttccttaataccctcacactagcacataattctctctgatgatctggtcaggtgtggcgctgcacactactgtgtcgacacatacccaagcagcaacaaaacaccccctctcctggatttccattttcttttcgtccaaccttgataatacatttttataaacctattcatgtcgtatattacttattaatttctccatcagatgagaaattgccgttgattaatccggagacgaacaactacacaacccgaccggtcgggtaattaaaaccaatttagctctcgttcgtcagcgccgatggctaagctcgctgccggggcgcgccggccgcgcgtcccgtcgcggggcccgggcgtccgacgtggccgaccaggcgggcccacgtgccccctcctcgctcgggcagtgacgcccgtgtgggccacgccctgcctccccagtccccaccctcaccggcccgcctcgctcgcccgcgcgcgcgcgcgcgacgtgcatggcgcgcggcctcctccccccctcccgccgctatatatacccctcccttgcaaccgcctcctctcatcgcacactccaagctaagcctaagcgagcgagaaaaaatagcaaaagctagccggcaagcaacgccaactaattaggggagagagatattcatggctccggcggcggtggctgcggcggaggcggggtcgaaggcggcggcggtggcggggaaggccgtggcggcgtgcgagcgcgacgcggagaagctggagttcatcgaggagatgacgagggggttcgacgcggtgcaggagcgggtgctggcggcgatcctggcgcggaacaacggcgccgagtacctccgccgccacggcatggaagggcgcaccgaccgggaggcgttcaaggcgcgcgtccccgtcgtcacctacgaggacctccgcccggagatcgagcgcatcgccaacggcgaccgctccaacatcatctcctcccaccccatcaccgagttcctcaccaggtgtgtatagtagtgctagctaacccaaacaatttcttttttcaattaatccggcctttcatttgccggctcggctccgccattgactccaactaattgtttgattagtttttggtcgttgcttggttgatcgttcttgcttactaattggcgtgcgtgtgcatccagctcggggacttcggcgggggagaggaagctaatgccgacgatagaagatgagctggacaggaggcagatgctctacagcctcctcatgcccgtcatgaacttgtgggtgatccatctctgaatctctggccattatcctactttagccatctaactgttttctttttctcaccatgcctttgattgggacgttttcttgactcccggcaacagttgaagctacctagctaagatacaagtagccgtattaatttctagcatgcaatttttaatcttcttttaataaaaaagaaagaaatgatttcttaatctagtgtcattgatcgatgcattagtttaaggcctaattaatctaatctacagagacaaacctaaacctaaccgttttccgtttaaactttaccatcgaccgatcaagaaacagtacgtttaatttttcatatgctaaatataatacttgggaaatgtaatgaccggggcgagcgagtcatgcgtttgtagccttggtgacctcacaagggtttggctaagaaacaccgcaacttgcgagaggtgtggctaattaatcattcacgttgagcctaaaatataatgtgtttgtgtcttagacgctagaggtgctgctgccttgggtgtctctctactttttaggcaccgagattccttttctaatttgtaagacatctaacgatagctagctagcttcctaaaataagattatgtagcagctcaaagtcgctcgcatacgtaaccaggaagttggagtgtaaccttacaaacaaagcgacaaatcggctaccggccttgttgcgctaaaataagctaagagaaagggagttttcagaaccattcaattagcttgaagcttgaataaacacacacgtaaattaatggtactaacgctcatgctcataaaattttatcagcattattacgtgccctgtgtcaatcccacattaatgtatcccagctgaaaggaatggtgcaaccaccggtgtatctctgttaattagccatcacaatgctaaatctttcgtacatctgatatcttatcataggttatgtcaacatcggcctgaatctttaattaatccggcatgcagaactcagcatcagtgggccatcaattacactgcatgatcattgttgatcccttcctgcttaacgattcaacgacataaccaaccagctgctagctgactgaatgactgtagtagtaaactagtattatagctagatagtactgtactagtgattaatatgtttatctcagattaaattaactaaaggtaattaaataaaaaaatgacaggtacgtgccagggctggacaagggcaaggggctctacttcctgttcatcaagtcggagacgaagacgcccggcgggctgccggcgaggccggtgctgaccagctactacaagagcgatcacttcaagcaccgccccttcgacccctacaacgtgtacacgagcccgacggcggccatcctgtgcaccgacgcgttccagtccatgtacgcgcagatgctgtgcggcctcgtggcgcgcgccgaggtgctccgcgtcggcgccgtcttcgcctcgggcctcctccgcgccatccgcttcctccagctccactggagggagctcgcccacgacatcaggaccgggacgctgagcgccaaggtgacggagccgtccatccgcgacgccgtggcggaggtgctcgcggcgcccgacgccgagctcgccgcgttcgtggaggccgagtgcgggaaggacaagtgggaggggatcatcaccaggatgtggcccaacaccaagtacctcgacgtgatcgtcacgggcgccatggcgcagtacatccccacgctcaagttctacagcggtgggctccccatggcgtgcaccatgtacgcgtcgtccgagtgctacttcggcctcaacctgcgccccatgtgcgacccgtcggaggtgtcgtacaccatcatgcccaacatgggctacttcgagcttatgccgcacgacccggacgcgccgccgctgccccgcgacgcgccgccgccgcggctcgtcgacctggccgacgccgaggtcgggagggagtacgagctggtgatcaccacctacgcggggctctgccgctaccgcgtgggcgacatcctgcaggtgaccgggttccacaacgcggcgccgcagttccggttcgtccgccgcaagaacgtgctcctcagcatcgactccgacaagacggacgaggcggagctgcaggccgcggtggagcgcgcgtccgcgctgctgtccccctacggcgccagcatcgtggagtacacgagccaggcggacgcgaccaccatcccggggcactacgtggtgtactgggagctgatggtgcgggagggcggcgcgtggccgccgccggcggaggaggagggccgcggcgtgttcgaacggtgctgcctcgagatggaggaggcgctcaacgccgtgtacaggcagggacgcaacggcgaggccatcgggccgctcgagatccgggtggtgcgcgccggcacgttcgaggaggtgatggactacgccatctcccgcggcgcctccatcaaccagtacaaggcgccgcgctgcgtctccttcggccccatcatcgagctgctcaactcgcgcgtcatctccaagcacttcagcccggcttgccccaaatacagcccgcacaagaagtgatcactcactacactacacggtccagttgagctagacgacacaacgatatatagccttctactacaactactactaccagcactcagtcccagtgcttatacagtcggtgtcagtgtcagtgcgtgtgtaatttctcgtgtttaaggcagagggcatcagggccatactcctggatgcctgcttctttgatcttagatcatgctgtccagtggtagttaccatgtaatcatgtgtgagatgttatttctgaagtggaaatggcgagtgtttgtgatggggtaagctggtaacgtcattcttggccgaataacataataggccttgttggagtatctaccaactacttctgttgacccatatgtacttttttctgcttgtgcaaaaatgggagtgaactagtgacactgacaccccaggaattcaaccccactcatgttcctccatgagagtatgtctgttggtacagcgtcacccatgtctgctaggatacactacttatagtggagtatatgtttaaatcgctcttattattctattactacagcatgatcctttctgctaaagttttcaacacagacgtagctccctattttgtaatgcatgactctaaaataaacagtgtttttgggagggaaaaagttctgtaacttgctacactagtacactgcttacagcctagcccgggtttggtacaacatataattcccaacagacaaaagtatcaccttatgtttagatttgaacttttgatatagagaaatacgcaacacttcctgcataaattgaatcctacctgaactcatccaacttgcaacctctcacagaacattaatttaccagtttcaatcgttaaattattcatgaatattgtagtaggtacaagtgattctaattatggggctaaaactgctatagcttgcacataaaaggaaacatggcattgccactgccaatgacttgtgcaaaaacctatcgattccaatctaccacagctccactctcccatgtctgcttgtcacagaattcagtactaattaacagtcaaataagatatttttcttttttaaaaaaaaaactaaaagacgagctgcttgcactcatggcccgtttggttagggggagtttttaggagggattggaagtttagagggatgaggctattaaatgttttgtttggttaggagacatggaaattttggtgggatggggatggggaattgaggaatgaactccctccttttcaatacctgggtagggggtcctttacttcgcctaaacaaatctcagccatccgttttcattaatgacctaatctccaactaaactccctatcaatttctaccacctctaccaaacaagagactaggatgaaaaatcaaatttccatcttaatctcaccatcaattccctcgtgtaaactcccaatcctcttccctcaagttgccaaacaagccgtgatatttgggacaataaggaaatttagttgcttgcacaactcagataacacgagttggtgcttggtagcaatacagaaaatacggcacgtacaatacagaaaatacaacatgtgacccacattatggattacactagatagatgttggaataataaatatgattatttagatttataattactaatcatatagtggattgtgaatatgaccacgcattttgcagtagttaaggtgcctttgtaccgcttgggtcctgtgtaacaggaaggtgtccatcggacgagcatctcaaaacatctggaagccttctcaactttggtccttgtttcccactcaggcgttttggttttacatcctagccaaccattcaaatgtcacatactgaagttctaaaataaaattatcctacttaaaaagatctttatgaaggaaatattgtagactctagtgacttgcccaaaaaaaaaaaacctccattatttttagatcagaatgaatagcagctggattattgctagttcttactgcaatatgttaataaggttaaccaaagcataactacaaatgatatgttttttatctgtgtgccttgtgtatcctagttcttgtgatttgacctcagtagtaagtcagaaatcatcaggggagttctattttacgctgttttgagtctcttctatcactgagtcacgggtaatttgattattcaagcccatcacgaagtgtaaccaaccttaatcagaaagattactctataattgaatagagagcattatgggtagattataaatctaatcttcctaggccatcagccttaaatgccttgatggttacacaggagtttcaagtgtctaccaggaatgatatcgatttgttctgaacttgtaatacatggagagtactcattcacaattaattgttagcctatcttacatagttagatctaagatcagaccaaaggaacaagttataattgtgtcagtctagttctattactccctggttccctctagtaaaaaaaatttgacgttccaacatcaattaattttgactggagggagtatgatatattttgtaactaaataattacagattggtaacagatattctgagtaagggaaattgtgttcggttgttggcaccaaacctggtcaaatattgctgtagggatggcaagagttgccactgcattaggggagtctactattccagatatcctaccctcacatgggcagcatgatagcaaaaggtatacctgtatataatccgttaatatctgattttaggataatgttcagatcacataatattagcaggataaccaaaaatcctgtgtctacctgctccttggagtacccaaatctggaaaggtactcaatggcattgaggacagcacgcttgtaggcaactgatgcatcaagaaaatgctgcttcccagactcgtctacactgatgccctcaaagactaaccagtctgagaaacgtggttccactggacctatatcaaagataggattcacatgaagtggtgttggacctattggagtcaagtattccttcatcccacctcttatgatctcacacctacacaaaatgtaagaatgaaatcagttggttttcacaagaacacgagaagcaaatcttcatgatcagattattcacaagcactcagcatctcttgcacagtcaagtggaaatgtagtttctcaagtacgatataactatgatgcatgatttaggaataactggtgctatatgcattagtggagcgattctgatttccacaaccaaaagtgatgcaaaccaacacaatgtctcaattagaaatcattagagcattttaacttacattgatgacagaaaagaagcataaactactgcagtgccatggagatggaatattacagaccatcacaattgacttggtgagtggtgacagcagtgctccttgatccttaaattaacattcttgatgtgcccattcagatgaaaagtctcaagcaagcagctatgtctatgtggatgatctatgcaggtgttcaagtctagtatatttataggaattgtgaaaaacctaacaatacaaggattagttacattagtgttagtggattttgttcacctttaagtagttgtttgggtgcatcttaacaagtactcagaattatagacaagaaaaaatgtaattacttgagctcaagaaatccactcatttctattgctccacagaatgagacttcgccgtcaccctgggaaaaatgcatgtcaccagtactcagatttgctccatcaacaaataccgggagataaaccttggaacctctacttagattcttgatgtcacaattccctccattctcccttccaggaatagttcttgctgcttcatttgcgattttctgccaatcagcagtcccttcttgaatctgaatcatgcaacaagcattatagacatggtttgttcctttaaaaaaaatacaaacagggctctttaaccaataaccatgtcttagattgatatctatatgtaaaattgctgcactgacagtctggaccagatgaaaataataattgtaggtactgcaacaaacaatgtttcatttaatccttgcactgaagtaaaaccactaatctggcagaaggtcatacctttccaagtaaacagttctcaggggttggtaagttggcaagaggcctctgatgtagaacttcacagattttgattgactcatgatttgtctcagccaatattttttccctctcattccatatattgagaagctcagcagatggtgcagtccccactataccaggatgagttaatcctggaaatcggacacctgatatacacacaatggaactattgaggtatcctaaattgaaaagcttcatttagaacaacaccaaaaaaaaaattctacctggtatttgaggggagtatgcataaattccttcaaaataccaaatcgcctttcttgcactagggaagtggtcggttaagaatccaccaccattctccctttcaaatatggcagtatatccccattcgtcaccgggaagtggaccaaggttgcagatctctacagcaagaagatcaccaggtgcagctggaaccccttcagcatcaactattcttaagggcccactaagataatgagtctgtgggaatcaatagtcagtttcgctgatatcttgttttgtaataagcgctgtgataaaaaaaattaaacggcatctcttgcaggagcgatatatatacttacaattgtgagatccaggaatttgatgtcatctgcggagttatcatcactgactcttcctccagtccaatcgaccatctcaacacggaacaattccccttcagttacatctgcaacaggagggatatctggatgccagcggttatggagagggactttttgctcccatggcttcttgctcacatctataggaactaccaatcttggtgttggaagagccatgttctgttgcagggagggaagggatcagaggttcatccttccggaagctcatgcttctatataatgatagcatatccatagcaatgagtcaggcaaaaaacgacaaaatgagcaaagacaaaggaatcccaggaaggaatggtttcaaatatacactccatctcgaaagtgcactgaaaaataagtgataaatcctcttattaaaatatttccaagaaactaagcaaatcttaacctagcaattattttatatgtttggaagtacttaagatagtggtcacaatcaagtaagaattgtcctgctggtccctcatatctctataggccactcagagcttagatgatgagatattttctagttcagaaatcagaagtggtaccaaccaacttgggccgtcatattcatcggtgttttccacaggcacttcatgcatcacttatgctaccaaacatgcacatagttaggtttttgtgataaatattcaaatataatctgaaggagcccatgtccccaataggctccaattcaggctaacttgtccatgtccccaataccaggaacagtctaactttatcttcttttgcatcacatttacaactagacagctggatatttattcttcaaggcaatgtctaactaacaggggcattgagttctattggttctattttcatttaacagtattaaacaaccttgcaaaaccttcctgttacaagctaaaatattactccctccgtttcatattatatgtcgtttttacttttttccaggtcaaacttttaaagtttgaccaaattcaacacaaaacaaacatattatcaaaatatattcaacattacatttaatgaaactaattcagtgtcgtagatgttgctaattttttttctataaacttgatcaaaccagaagaagtttgactagaaaaaagtcaaagcgacttttgactagaaaaaagtcaaaacgacttataatatgaaacggagggagtataatggaaacactagtacaaatagaaactatacacaagggtaagaaagtcattcctgaagtagtactacagaaggcaagaaaagtcattgttgaagaatatcgcttagtcaaaatttccattaacattttgcctaaggaccataacctgtacaattagtcaattacctccaacaaaaaatggaaatagattgtatgaaatgggagttgcggaattgtctgatttccaccaaaattaaccactctttgttaatgatggcattgaattaatagagcattatcaattttgcttcccaagtatagaccccacatctcatgaagtgcatgtgccaaaagcactcatcaatctatctgtgaccaataaaaccgttatcttagtaaagaagcacctttctacaattcctgctcccgaatcaacttacatgatcacatccaaactcagaaggaaagcaaaggcatgattctctacatggtatatattgaattaccttccaatgttgttcctcactcaacatactccaacaaacatccatcagtagtatacttctttgacttgtcctctaacattcgaaggctccagcctgcatctttcctcagtcccttcttcttcatccaatgcaagatcccctgagcttcctgccacctccctgtctcagcatacaaatttgataacagaacataatgcgatgcattctcaggttccaactccaccagcctcattgtcacatgctcactcaaccatgagtcgccacgggccctgcagcctcttaatagcaagccccatatcactgcatttggctgtgatggcattgtctcaacaaccctaaaggcatcatcgaggtgtccagagcgactaagaaggtcaaccatgcacccaaagtgcttgatcccaggttgaaacccatactcaccttgtatggccaggttaaatattttcctcccaatgtcaacaaacccggcatgtgcacaggcacaaagaacacaaataagtgtgacttcatctggctggacaccatcattctgcatccgagagaaccactgcaatgccgtcttgccatcctgtgcaagagcaagtgctccaatgatagagttccaagtatagacattcctcttggccatctttgagaacacatgcattccatctgagacttttccacacttcccatacatgtctaccagcgctgtgcccagtacaacatccatctcccatccctgcttctgcacgtactcgtgaatccagatgccagtgtcgaccgcacaatgggccgcgcaagcgccaagagcagcaaccatggtaacgcggttgggtgcaacatgagcagcaagcatccgccggaaggtcgccagagcgtgaaaggtgcggcctcggttcctgtatgaggtgatcatagtggtccacgcgacaacctccggtcggggcatttcgtcgaacatctgctcggcgtgcgccaggtcagggtcgcagtccgcgtagcgcgcgaggagggcgttgcggacgtggaggtcgggcccgaacccggacttgaccacctggcaatgcacggccctcaggtcggcgagggaggacagggaggtgagcaggagagggaaggtgaagcggttggggcggacgccgcggcatcggaggaagtggcggaagagcgggagcggggagcgggcgggggcgcggccgagggagcggaggagcgagttgaagacgaacacgtgggggcgcgggtggcaggcgaagagggagagcgccgggtcgaggtggcggagacggccgcaggcgaggaagaaggcggagacgacggcggtggagcggaggagcgcgcggtccccgaggatggcgccgcggatgggcgcgagcgcggcggcggtggtgcaggtgttgatcgcgtgcagcgcgcgcgtgacggagggcggcggcggcgcggtggacgggcggagaggcggcgggaggccgccggtcatcacggctggcggtgcgtggggcgtggaagcgcggccgccttgaacaaccctggatgtcctgggttgatgggttcgtcctccgcggccgatttgtccgttaacggcccagaaggcccgttgcgcaagcaagagttgcccgtaaatggagtatatttgtcaccgttgtaaggcaccgttgcaactttgatcacggaaaataatttttagatgattagattatgatgataaataaaactttaaaacttatgtttaagtatgtaatacactttgataatttgacatctatttaaatatttagattatttttataaaatagacgaatggtcaatgtttaaatatagattgtgcttagcaacaaatataaaggaactgagagagtacataaattgttccagaatccagacacgattttaagcaacacataatttgtttgaacttaaatcaataggtcaaacaaattgtaatgttgttggaagaagtatatatatacgctgtgtttagatctaaagtttgaatccaaacttcagtccttttctatcacatcaacctgtcatatacacaacttttcagtcacatcatcttcaatttcaaccaaaatctaaattttgcgctgaactaaacacagccataatttgttttgatgatctagtagtctcacggattacaagtttacaacaagacggtcaacagcaccccggaggatatggcaatcgatgacgttgaatgactgacaagcatttgttctttgatgccatgatcaacagaaatcttacacataaccgcacagtaaaggtatatgtagataaggagacaacaaacaaagataagatcagctaaatatacttgctgcgttcattgaaggctcaccgtttcgaggctcctgaaacttgattggtatttgtgacatctgtggttggtgtttcctaacctgccatgaagcataagaacgtatgtaactcattccaacacagtataaccatattcatataggtcaatcctacaaacctttacaccagccattgataacaacttgtgcgaggctacgtaaacataatcagagttgtcaatccttttctctacaaaatatatgacttcagatacacctgactgcaagaaagataagtattatagttagtgttgaaccaatttcttcaagtgaaaaggcgcggtttactagtaaattattaataaaatgcaatgtgtttgtatacattaactaaagtttaaccggcaaagcatgcagtaaatatgaaacttttaagctaaaatgtgccgttaggttttatgaagtgtatgattgagatatatggtgttataatgcatttcctcaaagtgagagtaatttaaataggtgatgacaaaaatacattttaactttaagatactgattctatccagaaacaaacctggataataatcttagcacactcattgcaggggaacatggtaacatataatttctgcaaagagaagataacacaagattattcttagcttataaaggcaaattaatgagatgctttaagtttgtaggagattagaagtccaaacctgtccagccgctgaagcatggtttgtatttaaaatagcattaacctcagcatgaacaacatagctgtcagggtgaaagatgacggtcacaattagggacttagaattcaacatctaagccttgctataggagactatttttgtattcaaggaatgcatatgtagtgtagcacagtgtaaagcttagaggaattaacaccagggcttctcacacaaattttacgcaactggattgggtacaagctaactaaagtctaagagcatctttcccatccttgaggaggtactacgaggtaccatgagatacgaggtactatgaggtacgaggtaccatgaggtaccaatttaatctaaccgttgatttaggaggggtatgatcgggctaaacaaatttagggtggcgctaatccctcaccctcttgatggcgttttgcttgcttgctcgtggtggctcaaagggacccaaccatgtccgccgccgccggcggcaagagctgcacgggaggaggcgaggaggcgattgccgggctcctcgacagcggcagcggcgtccggcgagtacacgctcgtgacgacgagggcgacaagatactcgtcggcgacgtgccatgaatgaatgaatctctcgtattctccaaagctttgccacatctccgtgccagcgagtccgccgctgccgccgtcgcgtcgcatcgagtccgccgctgccgccgtcacgtcgcatcgagtccgccgcggccaccgtcgcgtcgcatcgagtccgctgctgccgccgttgcatcgcatcgagtccgccgcggccgccgccgcgtcgcatcgagtccgctgcggcagccatcgcgtcgagcttccgacgaatcgccgccgtaaccatcgtcaagctcccgatgaatggccgttgcaaccatcgccggccttaccctcttcccctctcttctctttgccgcatccccgtgccggcgtcgcatcaagttcgccgcggccaccgtcacatcgagcttccgacaaatcaccgccgcaaccatcgccgcggccgtcgtcgccgatgaatcgtcgccgcaaccatcatcaagctcccgacgcagcttgcagctatcccggtcctcccgccacccatcgccgatctgggccgctgtcgggtttccgatctagggttcgggacctatatgcccctgctcccgccgccatctctcgccgccggttagttcaacgctgctcctgccctgtgagatgcagagacggaggaggaagagatgccgcgtgcgtgcgtgacgcggaataaagacgaaagtacaaaactgccctcccatccacagtaccgcttcaatgggaaggtgcggtaccatgaggtaccgacgatttttgaccgtagggtgttgccagatcaacggccgtactgcataacctcaaggatagtaaaaaatcttaaagtctagaacaacaaggatcagtagatatgagcctgacacaggagcatagaagtaaatttttaagggccatatatagagttgtagactaatccctttagataatttttaagggtcacatatagagttgtagactaatccctttagattttttgtgcctcacaggtcacaagatagctgaaaataaaaaaaaatcgccatgtgcatgtctctgggaacttttttccccgagttattaacagtcaacacacaggatcccatccacgccgcccttccttttttgcattcagttatgctcttcattctttgaacatatcatcactcttactctatatggtttgtgaagtcagctggtgtatgcgagacttttgggctgggacgcaaatcatcagctcagcacatacaccacccaacagtttaaggttttctcctctctagattatgaaatcaaatactccctccgtcccataatataagggattttgagtttttgcttgcaacgtttgaccattcgtcttattcaatttttttttgcaaatataaaaaacaaaaagttgtgcttaaagtactatagataataaagtaagtcacaaataaaataaataataattttaaaaaaaaattgaataagacgagtggtcaaacattacaagcaaaaactcaaaatcccttatattatgggacggagggagtaggaaataaaaggcatttgcattaactgtttattttgaagaaagatccttgtcaatgatctaccacatagtttaagcttctgcattccaaataggtggcaccaagtgattatgtacatttagaactagagctcatggttatatctaggatatccatatttacaaaacaattatctcatcactgctaaagtaaattgcccgtactgatcccaaaaagcctatagagctacagtgtatcaataaaagatactgtcaatgtctctccactgatgtttccaaccagttgctctttcatgcttcccaggtggtgcttatcgtgttaatagtctataggcatttcctccttgttttttagataatggattattaacccggcctctacaccttagaaaggtgtacacagcccaaggcatttcctccttgttgctagaatattgacgttttgttgtatttgctcatgtttcctttaatatatttggcccacaatccttttgcatgttcacaaagaaaagggatagtgctaatcaaactagtgtagaaaataaattcatgacttacgggtattttgtctccaatggatctcccttggcagatttctgaaatgacaagcaattaggaaaatactagagaagtgatagatgttaagctatgggactcttttgcatgtggcagcttgtatgtgctaaataattacaaaatgagcaccttacatgaattttgactttgcactaacagtacaataattaatttagtagtccttgttacatacgaaaaaagagcttcagaaaaaatatacctttgcccagggtagcttattgtcagaacaacctctaggaaatccattataccctattcctgattgcattaagattgggttacactatcagaacaacatgatatacatattattaatggtgcattgcctgccaaaacaacatacatttcacagcaatgctgcagtctgaagccaccaaataaaagggtgcattattatatgtttcaaaaaaaaaagtagcatgtgttgaaaaaccaatatagctggatcaatgttaccaaaaaaaaaaactgaaatgtagcagcgagtccaaaagcaaacatgtaattaaaaagaggactgccatgctggttgtgatttgctgtgaagagccaaaaatgtaagactgaaatgtcatgccattatgccacaactggatagggatatcaatagtgtatctaaccagtaacaaatgcccctcaataaagcagtaacaaaatggaatttatacaaaataatatatcgacactggggtaggcaggtaacacgagaagaagtccgttgcacacactagcacagcactatctcagtacacaaaacagtactgcactggccaatcatgtggtctaatggagagaacaacaaacaagaaaaggatataataaggcagttcagtgcacttcctaagagtgaaaagcatatcaaatttgatttgtgaccataatgcttctagtttatgaaaaatcagtttcagatatagcataaaaatgtgtacagtgtccaatggttacatggattaaccttgtgtgtttttgtttttaaataagcagctaacctactaaaatgcaaaaaggctataaaatttcaaccctgaacaaggtattctttgagtttcaactttacctaggattatcccctcttggctaaccaagcatgctccaacctgcatacaacatactgatgaattgattaaatcattaatgaaataggtgaaataatgaactaatcaagcatgcacgagctgcttaattgagttaaagtttgctttatgacaacaacaaacaaatacattcaaaacaaatgttatccttcctcttccattacatgacatttgcaaaacgagcaagaaagatatacgtgaacaaacttgagatgaaatgaagcattactacttgacattttggtatagttgtattgccaaatgatcctacccaggggtaaaatttgccactctggtatgtatggttggcaaaaggttgaaagaaagtcatgccttattgtctaaaaaagattgaaagaaagtcaagtccaaataggtaggtgaattcttctaaagtaggataataaagggtagcatcatcccgaaaaaaatcatcaaccacaacagtccactgctctccgacaattttaatgattctccacagtatagtatcattgaggcatttctacaaacagtatgactgcatgagctcaaacacgttaaacgtcgacaatcgttcgttggaatccttacacgggcagtttagcaagcaacgaagatgcactttacctgccgattaggatccttggaccgcttggccgaaaggaacgcgatcgccatgaagtagtcgtcccaggagatatacctgcagaaacgaacgcaacaaatcctcacaagatgccaaaaacgagctttaactcggctacacctaatcaaagagggtgagccggtggggcgactaggactaacccttccctcttggcgggatcgaagggggactgcaccggcgggcgctcggcggcgcatccgttgaccgcgaggtgctcggcgcacggcgtgggcgggctccgctgcttggcagagctggccccgtaggatgacaggaagcgcagcgcggccgcggcggctgcggcgcccacggcggcggagatggacgctacggcgaggtccctcgccgaggccatcgcgctcgctcgagcggggcttgggtccggagggagactgcaagctgcggccggctgaacgcgggagattttggggatttttttcccttttcccgcgcgcgagataatccccttgtgtagtactatggtgctcgttgggctgggctgactagcaagtcggcccaaaacatccttcgcgtcggccgttgggctaaggatagcaaagttgcttcgagaaccctgctttggtgaaaaattctgataccttccatttgcaaaggaaattcgatatctaagcctctaaggggaaaaaaacgacactgtccatattcaaaatgcgtgtagagcctataaaaaaacttgcgtatggagtatttaacatgtctcatagcctctggctttaatgcacttttgaaataggaatgggaacgagtggaaaggattacagcacaataacaatatcccataaggtagtatgaaatattgcaaaaggattttgagggggaaaattataattgttccttgtgtttttcttatgtcatgtcaaacaactattctaattattttccaaatgttttgttcatataaacttccgagggcgagtaagcacaaagctaatactagcgatgatagtactatattaatctgtaaggatatctaaccgctcttattataattataatatgtgtctatggtcgctctgtctaattatattctagttttagaatggagtttaattctttctctataaaagggtgaggtatatatatgattatccttctctagcaccggttagctatatctcccctcattatactcatactttcttccctaattatctctctcttcccatcccctctatacagtggcggatccaacgcgagtacttggggcctaagccccctatcccatggagtagaggaagatggaagaagaataagaggggagatggagggataaggcggcaacgagcccctcgccaacctctctctttgctggtgtaagaattattagtcgttgtttcttcatttatttagaactaggatctcgatctgccctgcctctcgaagagggaggatcatcctattttgctcgtgtaagaattattagttgttgttttttcattgatttagatctaagatctccttttctcatcatgtaagaattactggttgttgtttattcattgatttagatctaagatctcccttttccatcatgtaagtatcactggttgtagttttttcatcggtttagatctaagatatccattttccatcatgtaagaattactggttgttgctttttttattgatttagatctaagatctcccttttctatcatgtaagaaatattgtttgttgtttttttcatcgattttagatccagcgccaggcagccgcgggcggctggcggaatcgccacaacgcatggttgctgtccccgaggatctccaccgcgctccacgagaggttggccatgctcctccctgaaaggagcaactgccttggctccggccacggttgggtcattgtctatgacccgatcttctacaagccgtagttccgcctcgtcgatcccctcatcggcggcgagccccagctcggcctctgcggcgtgtagccgccgcccggtggcaccctccaccgccaacaccaccgcccgcaggtgccagcaccgcgcctcctccagcccattgcccatcaccacgccgccgcccacctccccgcccctgtgcgctgctcggtaagagagaagagagaggagagggaggaagaggagtatgataagtgggacccacattttttgtaataaataatttgctgactggattgccacgcgtacgccacgtaggacaaaaccgctccggattgggctgtgggggataatttgtccggtattttaagtttagggtgagtaatatctggtttttgggtttagggcggtaattcggttgaccgcgatagttcagggggtaattcgtactttttcctaagtattttttttacccaaactaacgtaagcgcaaattttatcttaccagttcaccataaatccattataatcatgtaccccgtcccataatataagggattttagaggtatgtaacatattctaagactatgaatctggtcgcatccctctagattctaaggtagtcctactttctctattttataatgtaagactttttagatttattacattatgaaatggatatggcgtggagtgtttcattgctagtaggagtaacagattcctagtatctgtccgtttgccattacaccacacaggcacacatgccacacaccaaaccacaggccacacacgcctgaactgacggggtgtcatcaaacggactacggagttgacactgtagactcctctcccccgcgtcgccccgatcatggcgtcgtcggcggagccgccgccgaagaagcggaggctcgtcgaggtccatgtcccgtccccggccccgagcccctcctcctcctccgctcccgcgccggcctcgccacggtccccggtcccgccccctccgggcgtgccgccgccgccgccgcctcccccacaaaccctagccgccgccgcctccccgcggccggaggaggccgtacgcaagcgccgcaacagggaggagctgcggggcctcttcgagtgctaccgccgcatccgcctctgcgtggagcgcaaggacgcgcgcctcctgcccgagctcgagcaggtgtacctctcgctcatcgccagctctcgaggtgcatggactctcccctcccactcacgcttcatcaagatagcgcaattggaaagtgccgaaattcgtatagcgagtcgatgtggcgttttctcgataccactctacgctcgaagctagtagaatttagttctgatccgtctctaatctcgattgatggttattacttattacttgagcacctcgttcctatttttcttgctccgttgtgtgtttgtgttaatcaggtgagggaaagcagaaggcttgcatgggtgttggattatatcattagaggaagtatacagtggttaatggtgactaaaaggatgctttactgccagcatattatagtgaaatagatttatggatccataatccatatgagctgccatgggaataaaatatccagcaacaaatttcacatgattaacctgttctgtactcctgccccgtgtgtagtttgaaactttaatctacttggttaggtcttaggtcaacaagctgtgtacgtatttgatccaggctcacaatagagaggtatgtgcttgggagatgtactgtagggcgtaggcactacttatttacctgttcggaagtagttcctgagaataattcttagtcacatgcttgtgaccaacagtatggaaattattgttggtgtatccacaactggttcatcaccacgactgatttaaaggagcacctgtttgtttatcgatccttagagcttttgttggccttactagtgatgaactcctatcaaaatcagtgtccaactgtatttattgattgtatgcttgtgtgaatcataagcatgcatcacaaaaggataacaaatatattaaatccaggtttccaagttaataaaaaaacagaagcaaaagttgatcaaataatactgcatcactgatgtaaaactgaagtaagttcgtggggtatcgacattttgatcatcacatgttaaccaacaacatagaaaaaaactgcttagggttaaatgctctttatatttggaaacttaatctcacatgtttgagcttatctagctatgctcgaattttcttttggcagcattcatgtttctgtactctttcagttatatttttaccaatttgattaacagagaatggaacttttggaggttgaatatctctaggagagttattgtagcaacctaatttgccaagttatcttaagacgatgatcatataaaacttgaattgtttttcatttatcacttagcttttatttgtagcatcggactgaaagactctgatgttgtgaagttccgtgtgtttaatagagacattaattaatgtaatcactggggcatgtaggtacttgattacatggataaaacttcatatattgaaagcaattactgttttaccatgcttaaaaaccatcctcatcattttcccttaccttcgatgcaggttgtacaagcgttcaacgtattttagctgacttgattcctcaatatgcctcatactgccctactgcacttgaggcagctaccaaagtttccatcaacatgtataaatggaacctggccattgtaacaagaggggaagatgtggatggtgtggcataccagactgctagggcttgtattcttggcttaactgacatatgctccacagcatcctgtgaagcacccaaatcatctgttttaacaggaatctgctctgcagtttatattactgtcctcacattcttcatttcaacatttgatgggaaggatatctatcacataggctcaagaaaacttctaaatcttcaggaccctgtggagctgttagacattctaaagcaggattcagggggtgacaaccaacaggcagacgactgtttagttgaactgagagcactttcattgctatgcatatttcttttatttccagagaacatactagatgcctgttttgcgctgattgcttctgcagaagatgtaaacggagaaggattgtactttctaaagcagctaacctgccatctgaacagtggtatcataactgatgctctcgatgttcagggggatggaatctcccagtgtacaggaatggacgtagatcatcctagcaccaaagaatctgttgattccaatctatcttctcatagtgttggtgtttcaggaagttctatgttgcagccaaatgagtgttacatgacaatggtatggaccactattgattgatgaagcattttaacctttcggtcaagtacttttgaatttttcccattagaaatgatgatgggttctagcatataaagtcaattactaagcaccaatttgatagtggttatattagttgcccatttatttcgcatttcaccaataggatggttgggttatggacagtcaaatgagtaccgatgttcatttccttatccatgataaggatctgcacacacttaggctaaaagtaagccagaaggtttcaaagttataagctagatttgctataacaaagatatatatattatcagtgtgtttcaaagtgcctattttatgtgcaacttgttaatcactttcctaactgtgctgcctttctgacccttcattactgttgggtgttgcacgaggccttttggttagctcattcttctgtgtggaaattcatttcagtgaaagttggcaatggattcatttgagtgaaatgcatttgcatttttgctagccattattcattactctttgactctgtgacataaatattgatcaaatggtttgttttgtcattaattcaacaaattatgggggcaaggaaattttatgcgcccaggatgagtattatgagcgtatattaatatatgatatacagattgccaggcaataaacaattattttataaatgtgttatccttaaggggtctttttttttgcaatttttcacttaattatatgtggtaaaagactgttatgtagtttcactcattagtgttctttatgtttatttatctaatgttattactaggtttcacttgcaggccatctctaggcatccatctttgaaaggctggatattattgaggtacaaaaagctgtgtgattcctgtagaactgatgtggtttcagaggtatcatcgtgtttaaatgttttgggctctttaacacaacttgaagacaataaaagtcacatgggcagtgaatcatcagtgctggacaagattgatgaaaattcaggggggtat

SEQ ID NO: 7429 - DNA, 44876 bp, Oryza sativa
ccccctttgaccaattgctcctataattggaaaatcattattattttttttgcaacttgcattattagaatcacacacttaatttgcttggcctcggtttgcgtgccaaaccgacgaacctacccagtagtcgcactaattcctgtaggttgtactaccctgattccttgtcggtccacccttgtggtacttcggtatccgtgctctctgagcgcgtgtaccaaatatcccacatacaccgttgattgtcgaaaacttgggaaatgggtttgtgaagccttcaaaacctgacatgtggtgtcggtgtgtttgaaaataaaatgaattgtgaaaactcgcgatgcgggggttgtgcctatgtggcactgtcccgtattcgcatataaggaccgattcctgtgggaaactcatcgaacataatcaaagtgcaaccacaaggtggaatgggacaccctggctaagtaactagtcggttcagggaaacctcgcatgccaatagttgggaacgccggggtggggtcggttggagccaaaccgggttcctggtaaggcaagaacgagaagcttgctaacttaccgatcgagatggttggagataatttgtgactgtctaaaatggcctatgtttatgtgaggatttgatccttctatgtggcatgaggtatccctgggtcggcttgggaaaggctttatcgcgaatctctaacaccggccagtgtctggagtaagttcgtgtcttgtgggtaaagtgtacccctctacagaggttaactaactgttcgaacagccgtgcccacggtcatgggcggatgtgaggtggttcccgttgcgtagatttgtttgcatgtgctttgtgaaaagttgttgtggattgggaatcgtaacaagaatcagcctatgtggcagatggatgacctgagtggtcagaaacgaatctgtgtgattcgggatgtctacgggcatcatagactagtcttcccgagtggaagcggattgttgtgctgctgggcagctagactctaggagtacgagaaattgaaaaaggctctgggagccagttaatcaagtgaaatggctctgggagccgataagtaatgatctgacccgggaggtcggtacataaccatttgagttgttgaaaatcatctcttaagtcgaatcgagacgcaagtctcctttcgacccaaaattaaaaagaaataaatcacttagtgatttcaaaaatgatttcaaacaaaggatttgcaaaacaaccttgcctctcttccaagcttgcattaaacacctaaattcccgtgacttgctgagtacgaaagtactcacccttgctctatataaatatatatagttcctccgccctgaagagaagataaagtgaagtgaagatttttcgcctggtccccagccgtcgcctgtggtgttgggtgttagaccgttggttccgctgctgctgctgttgttggtgtttccccgtccgcgtcgtcggttgcattctcgggctgttctgagctgcaacctaagttaaggtaaataagtactctatttattttagtccatatttgtcaccgtgggtaccagcactatgtcctaggactggttccgagatcgcggtttcgtcggaagcggttcgcgccgttttttctacgacacgcttctatcaggtgccgttgtacggtggtgccggattgggatgtgacacggcccctccttacctcacacatgtcaggggacttggagaagctagacggtgtggcatagaggagcgtgacgacgttgaggggttgccggcaataaatctgcttgggtcgttgtttgataaaccatcgtatgttactccagttccctcctttatctcttgagacacacgcgtggcatcacgcttgcccaatgtcgttccttgcctatggtttcgtgcgcagatcgcctgcttacgcccaacgtataacgtggagaggcaagaccacttagagcaagtttaatagtatagtctattgattactccaatttattccacgtcatttttatcaaactcaagagacagatgatacagtaagtgggctataatctgacgcatcacacatttattttattccacatgggcccacatatctctctctgttcttcttctccaccagcccgtccaagacaacacaagaaatcagatcaatctaagatcaaaagatcaaaacttgatgtctaaaaaatcaaatcgaagcaagcaagaccacgaatgagttgtgtgatgaataaaatcacgcatcgttgccacgggaaggagctgccgttcaacatgagaacaagccgacctcggctggtagcgccggcgagaaggcctttcaccattgctggccgtggaccatggtcatgccctctcaaaccttgcttccatcgccatggcatgagcccgtgcataccactgctagatactagctggattcaagaggtgcttaccagatctaagtgaggaaccaacctcgagcgcggtggccacaagcgtcgccgaccgcggtgaaccatcggcaacccagctccacacagttgatgacggcgaccccagctcgacaacatcaatcaccatcggacgagctccccggcggccggcgggtgactcgtggactcatggttgcaaactcgcgacactgcatcaaccgacttatctcgcagctcgtgtatgctacctgctgggcccacaatttcttggagcgcacgtgccgctcagcgactaattagtcgcccgcaaacgcgctctctctcctccaacgcatcatcaaacctacgtggaatcgctatcgctagcaatcggacgcctattgtacctgctcttactagctcatcgcgatgggctcgtaaaagcatatgatgcattgttttccatgctatcactatatctggatcaaaggttaactctggtctctttgagttctttagttgaagtttccaactcatctttctcgttttccacacgcatgtttttcgaactgttaaacggtacatatttttttagaagttttatgtatagaaattgctttaaaaatatattgatcaatttactaaaactaattaattatacgctaatgattcgttccgtcttaggtgcgcgatgattagttaccaataacaagtgactaacacagcctaaggcatgaactgtcctggtgttttttttttttgaaaaagtactgtagaaaagtttcctagagatgaattgccctagtacgtcgcagtttgttcctttgtcttcattttcattttgctctgccttgttatttttcctggtttttttcttcaacaagcttggaatctctattatggctttcttaattagacaaataaatttatcctctaatctgattaaacaaatgtcgctcttatttgacaaatgacaagttaactacctgtaatatgaaaaagaatgcatgtacaacttttaggtgaaacatcagatgggaaaacgttcaatataccaagaaaactatccggtcgttcagcttggacggttctgaaccgttcaacgacgtcgagtcgtcgacgcaagcgatcgatgtatgtcagcagtgaccgaagatgcacgagctatcatggctgatgtacattccaattaaccagcacctaatctagcaattaattattcatccacatgttaaatcttctgaaaaacggttttctgtaatactactccgtaactaatagttgagctaagacaattcactattaatcggggaccccagcaacgtctataatctggaaaaaagatgttcttgtttgtagataatggatgagggaataatcgatgattcgtgctagcaaatgcgtactacactgatcaacatgttcctttgcatgatagcatagcaatgatcactacgcgtgacggcgtgagctttctaaaattaacatttcgcgagaaggaaaatagaatgtgtgtggtggctacaaaggcaacctgaaagtgaaaaagggtagagctaagcttgaagcataagcaggattggctacctgacgagcaaccaatccaatttttgcaggttatctactaagggcctagctaacacaaggaatcttttttattattttgcatattgtaggcaagtgttgtaaccatctacagtgccattgttggtttcaaaactttgagacagcaaaacctccataaacaaagaaactaatagctggaaactaagagtgagcaatcagtttcagacagtcggccatggccctaattggctaattatataccgtatggtccgtatttcaatgaagtgttctttggtgcgacttgtaacttgtaagtagtagttagtctcactaattagactgccctctgagttttggacattttttattggtgtctagatggaccttaatcatcaaaataattaagttggtgatactacattttggctagacaaataaatgtgaattatgttgattttgtgaccttatcaaactgtgctgtgcttctaaggtgaaaaaaaaatatatatccaaaattaacgaatctctgtacagctgtgccacttgaagttagtatggccgagtttagttacaaactttttcttcaaacttttaactttttcatcacgtcaaaatttttctacacataaacttctaacatttccgtcacatcgtttcaatttcaatcaaacttttaattttgacgtgaactaaacacaccctatgttccacttggtcccatgaaattttgacagttttggtaacgagacgaatattgtcaccaactctttcaagctctagcagactggttccacaaatcattgcacttgctggtcgccgtcgaaccgtcgatgtcccatgaatgacataccgacgaacgtcacaaaccaacacatgtgttgggatctgctgcgcctgtgatcggttggatgatagtaacaggcatccttaattgttcaatgtcactggagcaataggagcaagtttaatacttcatccatctacttttgatagtcatatttcatcttggcacaataaccaaggataaataattctacttatcatccatttaaacatgctactaattattcctcgtaaacaaacgatttattaatatttacatttctcgatgcccatgtaactaatcttgtatggaagaatagagagtcacgcattaaatccgagaaagttataagaggataggtggttggattgaaatatgcctatcaaaagtaaaatttttcatatttgaaaatatacctatcaaaagtagatggagggagtagtatagctaactactagctccaaatcatatatagttaatttaatatcttatttatataatagttacctataaatatatactacaccattaatacatgatcgcacatcttaaatacataatattttaaagttcgtgctgcagctgactataaatctgtagcccgctttccttctctctcttctcttatctcatccacatatgcttatagctgatttgtagcctgctattgtactcgctctaagatgggatccactttcttatattcttttgtatataacacatactatatgtatattacatataatcttttcttgatcttaagctaggacctaaaaaaattctactcaacatgaatgaaaaagcaccatgcatgttgcaaaaaacatgaactaattttttatttcttatgatgtagagttaattttaggtttggccatagcaatattctttgttttctcctgtcccaatgcataaaggtagaaaaaaatattgctttattccttaagactattttgcatataatattgtggatgtcctaagactgcagcggatacagacggatagtgataatatcatattcattttcatatagctagatataaaaataaatacgaataactcggatacgaaattaaatacaagttatcttgaatataaataattagaattgaatatgattggatacaaatatggaaacaatatttctcggaacataaaaaccatcaatacttctaatagaaacaaataccatgttttatctcctttcatatacaaagtttcatcgtggagtaaataatgttcattaagtccaacacatgcaacattatcagcacaaatatgtgcctaactgatattagaacaaataacatattataatttgtaaaagtttttagaagttcaaataatattaattgtgtaaaatagggttagtgtgatgtgctgctattaaaattttaaagaggtagactgatagtccagagttagaaagtgcttatcgccttatccaattagacaacttttatagtgaccatcgacagtgtcacgtatttgtggtgtcttatagtgaattacactatttttggatgttctatagtaaattttgtgttaccgaaatgaatcatgatcacataacacaagaggaaggaatttattttcaagttagaaaaaaaataagttgaaagaaaataaattaatgaagagaaaagcttccctgggatgctcttttaacggtgaccgctcagtttgttactcgtattcgtataagagaagttacttctgctaggagctcttccttagatgctccttgactcttcaagcctcatcggttggcctaataagtaaaagtataaatcaaaatttaaattttttaacttaaaattaaaatatttttaaagtaatttctttttaacattggcttttaagtcgctacgaacaaatatataaaagttttacatgttaatttttatatttactaataagtcattttagcttattagagaatatggataaccgatgagactcttggtacactacacagcaccaagtaatttgaataacgatatttctaccgatgtgatgtaatgtaaggcatgagcttcgttgcggttgactccacaaaatagtctaaagtcaacgatcaacgcccagcactgcacttctgcgaaatactccctccgtcccaaaatataaatatttttagcatagtgccaagtcaaacctttttaaatttaactattaacaaaaaaaataaaaaatcaattatataaaattgatgttagtagatttatcattaaacaaactgccattatatgtaactcttttttatttaaaacatcttatttttatagacattgtttgtcaaaataacatttcgaagactgtgtcaaagtaaaaaaaagcttatattttaagacggagggagcagtatatattattacagtatcaatttctctcttcagcaatgttcctgaatacatatacataaaaacatcagcccatcgcccatcaataattaacacttactctctctctctcacacacacacacaaaaagaagggcaggggcatatggcctgtacaaacccatctaagcttcaaatcgacaaaacattgtattttggaataagtgtgttttataactctcatctctttctttctcttgattgaatcactctcttaaccataaaatcgagtataacggctccatcatgttcaaaaaccggtgtaaatctactcctgcaatgttttagaaaatgatttttgttgatgtaacagtatgatcacgactgacttattcagttagcagatataacccacatgtcaacaacattttcatcatctcatctttttcctcacctctccctctccctccctcccacttttttgtaggcgtccaaagtcacgcgactaactggctattggctagtattcctgcatacttgtacttctcaaacattagccactacaattcaacactttttttataggagcaattcaaaccctcacacacatgcaaataataactagatgatgtcccgtgcttttgctacggatatatgttacatattggagaaatgataacatgatttagattgaaatattataacaatgatttgataatgatgatttagcatgtgtttgtttagttttagaataaaataatttataggcataattactatatgtttaaatgttgagctttatatgttcgatgggttgatgtggtatgcttacatggagatactagtagtgctagtaagtaaatattatgcttgtatttaagctttagatgtttagtggagagattcagcccttctacatcctacaataaggctgcaagccatgggccatggcccgtacacgcccaactttaggcccgaattcgcattcgatccgctaataacaatccagtagcaccgcgaactgtcatccgttagcaaacttcccttgatcccaacaaatttcgctcgaaaacactactctcttgtacactgcaggttgttcgcttcagagtttcagagcgtgtcgcgtgcaaccgtgcagtgaagctctccgtccccgaccgtctccgattttccagccgctttcgcgatctcctctcatccccctgttataaagccccactaccctccagacacgcctagcctctcatcgtctcgatcgatctctcacacgcgcgcgcctccattgttctcggatcaacaagctctccaagaacagcagcaaagatgaagccttcgtcttcctccgtcggcgtctgtaccctgctggtggcggtggcctccctgcagctcctcctcgtcgtcgccgtcgccgcctcggcgaagactgcaccggcgatgccagacgaggagttcttgggccgtctctgcgaccagcagcagggggccacgcggcggcggctcccgtggtgccagcagctgcacgcgaggcggcgccacggcggtggcggcggcggcgtcggcgtcggcaagcggcggcgggtgccgatgccgccgcccagccgcgccggcgaggagatcgacgcgcgctacgacgtgtccaagcgggtcgtgccgagcggaccgaacccgctgcacaactagactgatcgatcgatcgtgtatctgccgcttgcattgcatgcgggcgtgcgtcctcattgatctttcttcccgttgcgcgggggcggctgatcggcggctgggcgcgcgcccgcggtcagtccgcccctatagtactactgtactactactatactagcactactatactactatacctactactattcctacatacaataaatgaatgtatacacatacgaataaacataaaaatttattcatatgcatacattttttacctatataaaaactacatacatgtatatgttgtatacgtatatacaatttaactttgtatacgtgtatacaaactttatatacgcatacgtatacaaagtttgtttttttttttgacaaattgatccttgtagaaaacttatttcgaaattagtctttgccaaaaactatatccagatataggctgttggctcagcgccaaagttgttagcgctgaggttgttcctgtcagcgtcaacaggactggcgctggtattgcgccagcgtggcgggcgaggagcgacgtggcatggcaccaacgcaaatgtatttggcgctgaccccttatacatggtaaacagactgatgtcttgtaatgaattagttatgtactgctgcaatggtaagttcctttgcctggtgtaccttaggactagggttcgaatcccaggtcagccattttcgttttttttccttgttttttttcttcaaatcttcaatctccgtgcgtacatataaatgattaatgatgatttctgtttttgaaaaaaatatatacggtactaatcaccctattacccaccaaactgaaagaaaacatcggccaacgaacaaaattaatggaaaaaatgttgatatgtcaaggatttgaacccataatgtacggcatacaagtcaaaacattaaaagaaataacacattttttgtttaaattaatttttattaaaaagaaatatcacattcagtacagatttaaaaagtagaagaatggattaaaaaagtttagagtcaaattttaaaagaaatatcattttttataaaaaagaaattagaagaatggaaaaatctcacctttctagagcaatattgctagaggtgctaggaagtcgacgaaagccgctggaggcgatcccgcgtcgctcgtgatagcaattgcaacatgcctgcatcgggagcatcgcgtgcagcagctcgctataggcccgcggtgggagcagcagcaagctagcaagttggtagggttgtagcaagagcagcaacaatggtggacggaggaggtaccaccaattagggttggggggaaggggtcagcaatttctgaatcaccatgtaggatggcctattctaccaatttttggaaaaatccatcttctaatcgtgttattcctggccttgaatccaatggcaagtattatggatttacgggtgccaacagttttgatggtaagcatgtaattacgttttttaagttgtaaatttaataaaataccggttcaaaacagttacaaatagagattacctatacatttttcgaaagatttttatgatcgtatcacatagatttttaatctttgaattaaaatccaatagatataataaaaagcaaaaagcaattaagaaacactataatggacactaaattaccatatcctcaagcaaaagaccaaatccaatacaaaatttaaaatttacatgcgaagatttaaaaattacagtgtaacttacaaaagttacagtgtaactttcataaattacactgtaacttacaagaaaatgcaccgtaaatttgagtgagaaaatcgagtaagagataagaaaaaaatctttcgagtgagatatagcaaaatcgttacaaatatgcagttggcctttttttggaagagaaatgtcatcgagcccaatgggccatctatcaatggaggctaagtacgtactcaggcccaccgagaagaggagtactggcccatttcttgcggcgcaggcctccgtgttgcagtttatgggcccacccaccacgttcctcccttcttcctctccaagtccaagacgagactggaagccgcagaggagggagggagagagcccttggcggctcgcggcgccgcaccacaccaccaccaaaacacgcacgcaccgaacgcttcgatggggcggctgcgcgcgtgcacccgcctccgtcgcctcctcgcgacgaggcctcctcatccggctccgccgccgccgccgccgaggacgacgacgacgggccagactctcccgtgcttctccgctagggccttctcgtcggcctcggcggtcgccgtcgcggtgccgcacgaggcgcgcgactccggcctcgggagctcggcctactgggcctggatccgggcggcggccgagtcggccccggccccgcctccgcagcaagaggaggaggatgagggcctcgcgcgctgcatccccgtcaaggcgtacttcctctccaccaggtacgttggaagcatatgcgcgtgcttgcacgacaggtgtttgttgattttttttttcaaaggtgtatgttgctatcatattgtgctaattcaatcttccttatgccattttgatggatgggcacgactaatagatgcagaggactaaaatgatgttttgtttgtctgatttttctttccccctgtggcagcattgatttgaagagtttgcaggcggaccatgggagcgacgtggtacctccgtcgacccgatcattgaactacattgcactccgatactcagaattccctcaagaaatcatggttagtgattccaatttaccatcacatagttcctggtccaaatgcttttgaatcaacaaatttaagttattaactccaccttggtaatttgttgaacgcaattttgtgaaatctctctttttctgcactgcaaaatttaacttctctgcaatgattggctaacatttctgtaggacattggagttaaggacaacagattttgctatcgctatgtggttgtgttccaatatggttcggctgtgcttttcaacattgctgaccatgaggctgagcactatcttgatatcatcaggaaacatgcttcaggatggcttccggagatgagaaaagatggtattacacatgctattcactatcttgcttgtcatattttaccttgtgaacaaagacattttactcggtacttctagttttcttcacactgttccattatattgtgtgtacgactagcatataattcaattgccttctatgttagtgaaaattacattttgataaaatcccatagaactacaagagagtccatatgcatctgattgatattggacgtgatgcattcataggctggtaatatgtgaagtcatttagagttgagtagctccccttctaccccctaaacagttgcaaaagcttttctttcactgggacaaaactggctcatttgcaaagtagtgaagtagcgtgtaaggttaagaatttaagattgtattacatcctcacatgatatcaattctacaatgaccagattatgcagtagttgagaagccctccctgacaacatggatgaaaggaggtcttgactatatagttcttaaaagcctagatacagatggaattcgcatcattgcaagtgttcttggccaaagtattgctcttgatcattacatacggcaggtactgaaaaggggcaacttcgacaagctttttccatgtggtggtagccttgaaattttgttcttaaggttctaaaaaacactaattttggtaggtcgatgacatggttgaggaatttactgaaattaatcgtgtcatggagaagactgggaactttaccatgcaaagaaagaagctgttccaacttgttggcaaggctaattctaaccttgctgatgttatcatcagacttggcctttttgacaggtatctcttctacaatctaagtaccacattccctttttagatggttcatgtcttccgttgcaattgcataatttcctctcttttttatcatgtatggaagtaatctcattgtataccaatcctacgtgcattgtgacaagctatgctgtgggggaaggaggcatgtagtttgatattcttttctggtgtgtttaaaaggttaatgcattttagctctgaactgtaaaattggagtttacatgccacagttctgtgttataaaagcactttgttcattatacaaatgttatgttattgttttccctgatgctttgcattaaccctagctctgcaaatgccattttacttaaggaagcatactcatttgccatttaagtaagggaataattgaaggaaaggaagaattatatggcttctataacataaattatttatattccgagtgaaggtggcattttttgtcggaagtctcattagttaatgctgatttgccataatactccaccttttaataaaattcctctttccatatcatgcttagcttatgaaaattgcaaaacattttggtgtcctcaactggctgtttccagttgtaaggcttggaatttgccaactatccacatggtttgataagaacccaagactaccatgacaaaaaaatatggataaaagctgatctaaagggaattttacgacatcgtggatacggtctccttgcgtatcttatggcagccccttaaaagaatgactttttcttcaggtctgaaatcgcttggaaaaattcaaattatgctcaaatacttgagtatcttcgggaagaatatgagctgaaccaacgttttggaagcctcgacttcaaattgaaatttgtggaggtaagttcttcgatttgtgttcattttcagtgtattagctgatttttttaaaaaattttgagttcccattcgtgcttacactttattattgcaacagcacaacattcattttcttcaagaagttctccagaatagaagatcagatttgctggagtggggtgtcattatactgctgattatcgagattgtcatctcattatacgaaattatcaaggattccagcatgatgtcctgagagcacactatccaacatctttgacagccatccacccacatcaccctactgttatgctaacccacactctacttcccacaattgatgctaaccttagttgaaaggaagtaaaagctccctttcatagctttacttttgtgttatactgcctgggatgcatttttgttagtttatttattctgctggttccaagtatacctcacagctaacaagagcagttaattctttctccaaatcccaggaattcagttccccaggtttctacgggaagagttttggttttcctctttatgcatttcaacagatgttcttggtacatgccccatttgctgataccactgctgtcagggtttacttactcctgtaggacctatgttggtcccaaactcccaattttgtggtaagacatgagaccagcaggctgccggctattagaagggatgtaaaaatgatgcgaaaacgtcaaatatttaatggcatatcctctgtactataagcgtccctactactatatttgtctttgtattgatatttagcgagatgctatgatctctggttaaaccactcttcttaaattacctgtgctcaaggatctttgtagtttgtacaacccaggcgatacacagaagtgcttcagttctctcccactaaagactgcatgaatcctaaatcactactccctctgttgaacataacctactactattattatatgaaattctatgaatttggagactcccaaatatggcaacttatcgtatcctagttgtagaatatgttcaattcaggattaggttgctatagttttggatgaaggaataatagttttcaagttcaacatgctggagccctaccaattttcaggagtgcgcacggcctgaagtttaggaaacctgcgatgaatttctgccacattacggagatgcgcatgtccagatcatcgcaaccgatggctgcgaccgatcattacataaacaattccagtacacaaaaacgatgcaaaaaagatggtataaatctattatattatatgcaacatctccatatcatttcatgtgatatcctgcttctgcttgttcttgccacaaaatatagtgtaaacccgaataaaatattttctttcagttgtcccaaaatggatacctatggttgtctttcccctaatttattctttgatgccaggaaaccgaagctggcagtttacaatcgtaaacaatcaatccaatctcctcagcaagtaggctacttgaacctccttggttagcggcatgatcctgtagctgtacagttcagccaccaaactgggccttatcttgtacattggtggagcgccgttgtcttcagcgcctaaatccacctcctgtccaaagatcttagccttagcttccaccctatgttcaatagcacgctccaccgtttcataggtgaggaggtgcattagttgatcgcagtcctgaaattcccagataaaaataattagccgcttgcataatagactcaactttgatatgtacctaaagtaatgtacaagaaaacacatggaatttatttgcttcccatgataaagacagattatacagcaaaacagaacacaaacctgtgctattatcgcaggcatgtaagcttcaggagactcttgaaacttagcctctgccacaaacttaccatagtgaattcttttggagagcgcctggatgatagaacaggaaaacaagaacaggtgagcataatttcccaatataaaaatgcctaattgcacgagtcaccagtgaacaacagtatagtactaatactatgaaaatgacatctggtgaaaattctggcagcagaacatcttgaagcaatactacaacaagaaatggttttacaagaattattttgctaatgctaaattattttgagcaaatgaaagctacagcacagtagccagaagcagtacgaggccagattattagaacatttggtatactaactgtagtacctgcaagcagatcgtgtcacaaagagcactggatccataattaccatcacttccttctttcactaatcttggaagaagctcatcaaaatacattttccaaatctccttgttgatattaatagaatcagcaataggatgcaaaacctagaaaagacaagaacaaaaatatgaattttatccaaatttacttataacaatacaacagcacagtaatcaattagcaatgtgagtctcaatagatggtactccacttcgtatcaaaagttgtattatgttgcaggtggacagtaagcacgatatcccaccacagaaccgatatactagtggtcagtcaacaaaggtacatgcttgccttcactgacaaaagaagctacgcaagcccacacagaagaattcaacatctacgaatacataagatgcataaccaattcatctactgtcagttcagagagagagatagggagagagaggcaagcataaacccaaataataaaacctgatatattagtgattagtcaatgaaggactatgtttgcctatactaacaaaaggaatgctgaaagcctacagagaagaactagatgtctaagaacacgagtttatgcattacctttggatactggagaggtggcaacagtggttcaggcagatcctccggaaagaatgggtgctcatcagggctcttgtatctcccaacctacacaagatggccagaaccatcaacattttgcaatttttggcatacaatgaacaattatattgctagttacaaccctgctctacctgttgatgtagtttttcggtttctctaaccatgaattcaaccaaagagccatcaaatccatccacatggaaagcatttttatcatatatatcagcattgtagcaaaactgtgctctctctaagaggctgaatatgatgctgtcttcttgcctaaccaaggaggttctaatgttgtccaaggtcagtatttcactttgatctatcctctgtttctcctccctgcaaaaagtacaagagaaaagtattaatttctttgatgtaacacaaaaaggttttgtaggagtgccataatgacttaaccaggttatcaatatgttatttgtcccttgcaaagaaaaaaaaagttctttggtttccaagtcaattcccttttaaaaggtgcacatgtttatctagaaagttttgctgcgattcagggattgatactacagcagtcgtacaagaaaaataattcaccctttgttgagttttctacacaaagactttggtcaagtcaccagctgcccacgatttttggtcgaaatggcaaaataccttgcatgaaatttacatgtttaagcatccttggcatcacacaatgattaaaaccataatatggattcaactaatcaaaactcaaaactacagtatggctttaagtcaaagctggcaagcacaatcattagcacaatcaactccatgttgttaagaaatcatttgagagaaaatatttcccaactaggagaccaattctcaaccatcaactcgacatcaaaccattcctcatttttcttccgaaccagagaccacctcgaatcggatagtatacgattcatgaatccatcaattaaagcataacgctaacccggtctcgattcgcaaagcactaatgcacaaatcgcacagacgaagatgctatatgctactacaccaccaacgccaaacagagaatcacgcatccgattcattccaagaccgggcaggcataaggagacctcgcgagcagggggggggggggggactagagaagagtttcatacttggtcacgggggtgacggagttgttggtggccgcgagccgcgcccgccgcgacgacgggacgaactccacgcggctggccggccctcctcccccgcgggccatccccacgggcgcgggcgaggcggccctgtagctggagaccaccttgttgaactccatagctcgcacgctcgcgcgcaatggaatccggggttggtagggtggacgtcgtcgggagggagggaggggtgggtaggcgtgggggaaatgaaatgcggggcgtcgtcgtccgcgatttttgtaggcggcgggagagcgaataggagacgacgacgggaggtgaggtgacggcgcggaagggaggggtggggggatggttggcggaggcggaggacgggaggaggaggaggtaggaggaggtaggtgggtgtggggttggggttcgtgggaggtggtgtttggatttcgttacttaacttttatttcatggagttagacactaatttagaggattaaatatggactacttacgaaactaattatataaatgaaagctaattcgcgagataaactttttaaacctaattaatttataattagagaatgtttactgagcatcacatagactaattatgaattaattaggctcaataaattcgtctcgcgaattagttcaatattatgtctaagattatggatgagttttattaaaagtctatatttaatatttataattagtacctaaatatttaatatgatagggacttaaaacgtcccgacgtctcgtctcgtccggtagagaggccggcgtgagaaaactgcgaaaattgggggcggtagccggtaccaggaggacgttaggtgtgtcggggtttttcacttttttgctcccgtgttctcggcggaggtgaggtggcgcgggcgcacggcgtaccacggggttacggggttggtattgtggggtacggtgcggcgcgtggtgtgtggcgcgaggagggccgggagagcgtgaggctcgtcaccacggcacgcgtcagcttcggcctcgggtttgaggcgaggcggaaacgaatggccaggtccaggtctgaatagtttctgctaccgtcaactgagacaaaacacaagaggcaccaaaaacatgaaaagtgttttaaactcctgatgtctccgtttatttttttaaaattcttcgagtggatgccctctaatttattaaaacactatctaacatttatgatatagacataaactacttttaaaaaaatcaagtcaaaactcaacccacacgttaagatattatcaaatgtgtagattgaatttgaatatgatttttggtgtagtggtggactttaatatactcgttcttaaattatttaaaattatacttgagaaaaaaaattatatgagagcatattcccttgagagtgagagattagaatcatcccccctcaaataaaaaagtgctcctaccatgtgaacgacactagttttgctggtcgtgtaagggtattagttactccatccgtcccaaaataagtgcagttttacactatttatctccaacgtttgactgttcgtcttatttgaaatttttttatgattattatttttattgttattagatgataaaacatgaatagtactttatgtgtgactaatttttttaaaaaaatttaaatcaaatagacggtcaaacgttggacacggatttctactgctgcacttattttaggacggaggtagtactagtccacgaaacttaatttaagttaaaataaactatgaacctgttctattttgacttataaattagttcataggttagccgctacacccctacaactgtgtaccactccatgtttgtcgttaggattggcttttttagacataggggtacggattaagaagcaactagtctaacacaacggaatctatactactagtagtgctagtaggccattagctgtgcaaacactatgtttagtttatgtgctaatttttttaagtatatagacacacatttaaagtactaaacatagactaatgacaaaacaaattacagattccgtctgtaaactgcgagacgaatatattaagcctaattaattcgttattaacaaatgtttactatagcaccacattgttaaatcatggcgtaattatgctcaaaagattcgtctcgcgatttacatgcaaactgtgcaattagttttttttctgtccatatttaatgttctatgtatgtgtccaagcattcgatgtgatggaaaagttgaaagcttgaagataaaagtttgaatctaagggtgtgtttagttcatgctaaaattgaaagtttggttgaaattggaatgatgtgacggaaatattggaaatttatgtgtgcaggaaagttttgataggttgaaaaagttataagtttgaagaaatggttaaaagttaaaagttaaactcggcctaaacacggccaatatgtaaaagcatggcatcctgacgatatccgccgcttcaaacgtgggaaggttgtccctgtcacgacgacttggcagccggtcgtgcaagtggggattctacgacgtttttgcactcccttcttctcaggcacggcagagtttatctagttctagaaagcggcatttcaacatcagcaacaccaacactgccggagcatttcttttttttttttggggtcttcccttcttattttccctgagcgtagaaaattctgtggtttccagttttccacggaagtaaattccaattttccaatagatgtacgtcaaccctttgcttcctctccagctgcagagttgcaggtttgacgaatgcagcttatctacaaaattcccatcagagggaacacagttacagaagaactaggggaagtacagattgcaaatccataaggatcttctttagaaccgtatacgtaaagggcttcatggattggccactatatatgggtgtcaccctcaatcgtgaatctgcaaggtcagatatcagtatatcaaatgcagattgcctcattgcagattgctgtggattgttcaggttccgggttagcccagtcaccagtcttcactgacattagcccgctgtggttacatcagatagtaacaagctccttcatcatttcggaattcagtcggtggtaaggcatcggaaatggcatcaaaacaactcttgctgcctacctgaatgtatcacgcagggacagattatattaagtttgtggtccacttgccaattaaacgaacgcctcattataagtgaaaagctcacctttcagctatccgtgctgccatcatcgtcatcttcatccccagaagcttcataacgtggctgatcatacttctcacgaagctgcttgataggaatgaagtccccagcagtgtcctcgccaaaaaacagaaattcaatataggggtgatcaaatcttccctatttataaacggggacagcattagttcaatttgaccaaaaatgaaaaccaccaagcaaatgaagaactcaaactcactttctctgatatttcagcttctgcaagattttcttctgcaactgaaattacacagacataacatgtctcaaaatggcgcagcataggcataaaacagtaagtgaagatggatttgatcaattgactactgcatagcctactatcttgccttcttctgccattttacacaaaacaagattgctcattaaaagttacagatctcaagatagaatttccaccagtggtcatgtctatcaaaatagtggaaaagaaaaatcaataccatatgcaacaaggagttctggatcagcatatacatcaacaaggacctgcaagatttcagcaatgaatcacagaggatcactaagcatctcaattctcaaaagactaaattatgcaaacacatcagtaattcagtatgcatgggcactatcgtccaaaagaaagcattaattgcatagagaaacagtcaattgcaggctaataaaattgcatcatgaacggcctgattatacccaaaaaatccaaaagggaggagaaaaaggcaatgatgaatatcaccatctcaactccataagtgagtttgcaaattaagaacaagaacaggtaggtattattacacataatcgccatccatgatagataagtcacaactgatgctacatgaaggaaatgatatttctatgaactatgggcattgaggaactactaaatcggaataagtcaagcagcatttacttgataaaaaggttgattcggtcctttggacaagttttccacatttgctgtctccatccatgacttggattcacagcacacaggatccatgccacaaatcacagctctatatccttcagcaggtgatgttatcatgtaaaattaagaagagaaactaaagtgtgttcactgaagttaatatttgatataaagtgtgcttcaacacatgcaaatgttccatttaaggataatggcaattatgaaaaattaacttttcatataaagtttgaaaagaaattgtagtagttatccattttctgaacagcttcagaaataatgtgtgaacaacaatacgaagtaggtagtatagcagtactcaccgtgtaccttatgacgtactttctgccctagtcgaaatgcatattccacattttgatatgcaagggccttagcggagactgccagagactctgtctacatgatgtttgaagttaatatgttattaacacattaccatcacatggtcggtgcactacagttttgttgtacctcaagtttagcaatttcatcacgcagtgcagctgccaaagcataattttcactgtcaacagccttttgcaaatccgcactgaaacaaatggataaagctaagtgatctactgatctctcaaatgaaccaatgctacataacactggaacatcatggagaaatggaaactattaacataccgcacgcgtaaaaggtttatagctttgtcctgagcttcagtctttgatgagcctcttttagcttcacgttgcctaattatctctgtttcaatctagacgaggatattttctttagcaagcctcatacaatgaattcatttatcttcaagtgaaatcatttggtacctctgtgagtttttccctcaattgttttgccacatcaaattgctctatattcaatgcatactggtaagaaccaagaaattaatagttaggctggacgtgcatagataagtatcaaacatttgcatggaccagtagccagcaactaagaatgatgcaattatcatgatggtagatttcattagccgattgctactagtctatggaattgatccgtgaaaaaagaatcgttgccggctggattggtaactttatttgctttagaaaatgatggtaaggaagcaacaactcacctgtattcgggtttgtaggtccaattggaagtagaagattaagatgtcttcgttagcagactcactgcgttccagccttgcattactactgctacggtcatctcctccaaatagccatttagcgttagttctcactgtagtacccatttgccttctattggtcctcatatgtagttttttcacacaccaacgccatgagtacgctccacatgttattgaatttattttgtaaaacaacctcagatcatccactgcaagacaagctggtctaaaacatgatccatggggcgaggaaattgaaccacatgcaaaaatgccttgcattgtattggtatgagatttgaccagttcaattcccacaactgatgtagtccaatcaccacactgacagttgcaatcagcaagccagtggcatctccagctgcgcagagaacaaaaacattttgcttaaaactagtacaaaatgcactaggtaactaagaaaggctttgaattgtggcatctaaataattacaaactactattaactaacaaactaacaagtagtgcctggaaccctaccatatcgtaaatgtgcaataaacattttactatcttcttttttttttgtccgtagatactgatcaatctattctgaattattgaaggtaaatcgcacctaacgtggtccaggcgagtaagcaaagaaaccctcaaactctttggaaataataaagtgctagaacctaccagtacgctttgtttcgagtaatatctatcagtgctctctactatcacgcaaaaaaacaaaatcctcaaaaactaatgggttatacgggagaggtaaggggttgcccgcagcaagataaaacgccagaaaaaaaaaaaagctacgaaaccaatcaaagaagccacagttcatcaccaaccgaagaaacgaaaccaatccaacccttttcagaaggaagaaatcctaatgggactccggtctacgccgccggccatgtagcgagcgtggagagaaggatagataccttttctggccgaggcggcgcgcgcttcggtgggaggaggaggcggggaagcgtcgacgagtctcggcgaacggggaagaaagggggagggccgcgcgcttctcggccgtaactaccactggctcaaagtgtggcggtcgtcgacgggataccggatagaatgtgtgacctggatcaggagtgcatcgactgcaggttaagcacttgggtgaaactgaccgtccaagaaccagcgaacgtttaggattctctgacctcgccttctccttcccttcccttcatcaagatttggttacaattttggggcaattgcatctacgcccccactttcaaacccaattgctgttttatcttcactttttagggacatgtataccctctgcatccagcaatatcgtgcaggggaggacctggaacaagggacggggaggagggcgccgtaggcgccgacgtcgacgtcgagcaggatggggtcgtcgccggccacgggagcagtagcagcaaaagcgatggtgggggcaggcggaggcgggggctgacgacgatgcctcggcgtggaagccagcggccacgggagcagcagcagcagccgccgccgtcgcccgcacgccgttgccgcgcgcacgccctcgccgccgcccgccctcgccgcggctgccgcccccgagcgcacgcccttgccgccgcccgccctcgccgcagccgccgccgcgccgcgtgcaagctctcgccgcccgcccgccctcgccacggcggccgccctcgccgtcgccatcaccgcgccttccgccggagccgccgccggagccgcgcacgccgctgccggaacggtcgccgtcgctgcacggtgcttgacctgagcagagctgtgcttgcctgcttggatccttatgagaaagactacacaacggtatataccacttatccctcatgccgcgaccccacgtgccggcttctcccgagtatgtcgcatgctgctaggattattatcacacaggtttgctgtgtgtatcagtgtatagtcttgttcctgacagctagctagtacctagcatgcctaagtcatgcctttgatactagcctagctggttgttgtgcatgccaaatccctgtaatagctactagtagacctgtaccctagctatgtagggtacttattatggaggagcctagtagcctagctatgtgtctaagatgggttgcatctatttgttgtatcctataccatgcacggattagaccggacaaataattacctagattatacatggatacaatggattattctaattagatatgtcatgttgggctcttggttataccacatcttagaaactctagtatgtgatacatagatgctagattatcatatatgatatccaggtattgggtcgaatacctaggtaccaagtatgaaacctataaatacaagatctgatgctgagttatttggcatgatacctataagtaccggatctgataactaggtatggtgtctgatacctatgagtaccagattggatacccgggtatcgggtatctgatctcatacctatgagtatttgttccaatacctatatgtaacgggtcggatacccaggtaccgagtatgatacttatgaataccaagtctgatacctaagtatcgggtctgatacctatgagtaccggattcaatacctaggtcaggtttgatacttatgagtatcggatccggtatcgcgcatgatacctatgagtattagatcggatacccgggtatcgggtatctgatcttatacctatgagtactggatccaatacctagataccgggttgatacatattagtagaggatctgataccaaatatagggtgtgatgatacgagacttcagatgtgataccactaattctaatatttatgggttatatacttctattcaacagtcaaataaaaagatggaccatgcatagctaggccagaaagtacagccaaacttgctcacgtgctgctgacatgctttgtttaggctaatgctactagctctagtgcttaattctaactttactagttgaagcaggtgttagacccatatggacctaaagaggtgtagaagtagtgctgtattagagtatttcatagctattttgtattgtaggagaaaagagacctctcgtcagtcatcactagtcggtagcctccatgtgaaaggacagcacacgacacgctttcagagagaaaaagaatcggtgagtgattagtaagtataaattataaactataccgttgagacggtacaccatcccatagtttttctcgatccttatccattcattgaagggtacaacagtaaattaatatttcataaaaagaaatttctatttctctttgtgggacccagtgccaccgaacaggcccatttttaacccaaaactgtgggacccatctaacggggctaaaagtgagggcaaacggtgggttcatgttcaaaaagatgaggcaaaattgcaaactctaaaaagtaggagtaaaacagcagttgaggttcaaagtgagggcatggatgcaattatccctacaatttttggcccaaaaggaggaacgcggttccccgctcatctcgtcgcctgttcttcacactcgtcgggcactcgagcacaggcgcacggctgtcagatatggcaacggaccaccgatttggcattagggacacgggcacacgggcccgacgttagtgtctagcactccagcgtagatgtgcaccgagtgaccgaggccacagagatgcgctgactgcgttgtgctggtgcgcctggtgcctcgtacatacaatacaatagttttgagaccctcatacaatacattactccctccgttccaaaaaaaaacccattcgttgctttaggaagggtcacgttcccttctagattaagtttttttttttttaagaatagagtgtggttgttatgtcttttttttttcttattcgtgtgcagtactgtaatgcattagtactgtaatgcattaggtacaaaatgtctgatgttgttcgagggatgagttcatgagtacaaagaaggtggatccttcttttgcgacaagtagggcgacatcgtttggctgattataagcataagcaaatgacatattagcaaataaaaataatttgtgaatataacgtttatatacgtattcttaacgatttaaaaagcaaagcctacaaaataaactacgatgaaaaaaatcccaaaataaacttcatatttaaggttgaaatgcatattttggctgataaatataagcataagctaaaagataaggccggtagtatctatttgaactttgtgaacatctatttcatttgctacggcacaaagtgtatgtgctagaacatatttttctttatttcttcattaatttcttatggcacagtggcatgatagatatctttgagccctcgttcttgacagtactcaaaaccatatagtttttcctctctttctgcttgaaaatgccatcgatcgatctattgtagccgtttgttctcaccagcccttcgaacggcaatttgaagccttggttcaagatttttcaatagttcttcctgtttaaagttgaattcgaaaacatggaatgagcgtttgacatgtttcataatattagtttggagataagaacataacaaagaaaaggaatagcattttttcagtttataagtataccaattcatattctaaatattataaatagtgatttgatcttttttgtgtgtactacatctcatcttaactcagttcatctaaaaaatatatatattgttctattgctaacctctaaacatcataattttcccattcgttttttttatagcgtgtacatcttttcaaattcattgatgtgtacacaaccatcccgtagcaatgcaagggtatcagttagtttttattgtttctagcaggttttatccaatatcacatgtatatattacaattaagagtagtttaatttacacacacaagaatatatgtaagctataggggtaaacttaccatcaagagggacctatctttcaccacactcaaaatatatacagacaaccaacaaaaatctccaacttgcatgcatttgtattcaaccaacctcgggccatcctggcttaactaattcagacaagcaaacagtgcctgttggatgtggctagccaggctaagctcattcaggataaggcatacagcctaggctgggtcattcggtagcagaacaagcttccggcagcaattttttttttcggaaaaaaaaagattcttttttatgccatgaacgtagagaactttttccaccaacataatgtaacgggataaatggcgaatcattcttgtgtttctgaggtcaaatggtcaagtgaacttccagcaaacaaaataaggttacttattataatgtcgtaggactgttacttgtagcataacaccgagctctgcctcattgtctgctatgagattcagcaataataaccccatgaatcatttgacaggtgatcagctcatagcttcacaatcgtcctacaataatggtgataaaatatttgccaatggatgcttactcccgaaaatgataggccaagaattctatctggaagatcgtatgacggttccaagccaatcttctgagctcgtgtccccttttaaggctctcagtgaatgttctgtaccaacctgcatcagaagtcacacggaaaaaggaaaaaaaagggtcattgaaaattttatatacacaaagtcatgaggggaggaaaaagttaccagacctttgtaatatacacatcaactccaagcctagctatcgcagcagcttccaatattttggtctccattccgccagtggtgtcatgtgcagctacagatatctccactgcaatgcatatcagattatctttgttaggattacacaagctacaacatacagtttatctttattatgctggtcaaaagaacagtgtgtctttatcatgaatttcattagcccctggcttaaaagattatagctttgatcccaatactcatatttcaaactgtcactcctccataagtatagtatttgatccaaatcattgagacttccaattttctctgcataatgcgtaagaacaaatgatgtatttgttcattagaagttattaattgaaaaatcgtcaccggtagctacttaatcatgtgcctgttacgatctgataattttttatgtacttgaacttgttacaacgaaaatagttgcatcagttactcagtacaactgctatgagtaactcaaccaccagcgtacacatggaaggaagacataaattatacctcctttcttgttgcctttcaatgctggttttacaatcgaccagctgccattttcatccaccgctgtttaaacaggcaaacaacacaggtcagcctaagacagaaagcaaatggtaattgcatatcttttacttttcgtgtgctccctacaatttctgatgcatatcaaacaggaattccagtaggtgagtactgaatgctaacctatctctctgagaagtactgcattcgggtctgatggaggacgatcaaatactccatggacatctgtctacatctcaattttcagagtgctatgcaaaagcaactataatgaaggatgggcaacatatgcaaagagtggtgcacagaaatgtgatagaacaaggcctgtctgataagtgataacagcaatacgaacttcaagtattagaataaagacatttcatccatgtaaataatttgatgcacgcaccatctcacatacataatataaattgtcaagtcatggcaaaggtgagaaggcagcaataccagaaatacaacatattttggactcagaagctgtgcaagatggcgtataatgacatccccactcaaaatggtgcagtcctggtcatttaattataccacataagtcttgagaagtacacaaaatgtgtcatagtccagagagacctctatgtaagtgtaaattaggacatgggcgtgattcaatccaaaagctcaccagcaattcatcaagaacagcatctccatgcaaaacctggaagaaattttttatgttctttttaatgtagatgaagaaaacataagtagagctgtggaagtatgcaatgctttccctattcttgaaacatttcctgaacaaaagtttactcatagtatgttcaaatatctgaactaattcattatttaccagtacaaaatctcagctaagttggtatagaaaatgtattgcaaaataggatgcaacttagaagaattaccagtgcacataacatgtgtaatgaatatgttacatactacataaatattccagaaacgccatatttttcttacaatatggatacataagaagtgacccatataactacattacttaatataaaactttagtcgttgtaaattctagagaaataattattcaagattatgaagtacaataacttacagggacaaagccaacatggagtgatagcatgatttgagaagcatccactgattcaagctgtaagtgcaaaactggaaggtaaaaaatcaaagggcatctctgttgataggattagacatagatcttcaagaactttgcaatgtcaagtccatgtccaaagaaacagaagaaatttagttaattgtttgctttctcacatttctttgcttagtagaccatccacaagcaaacggtgacatcccaacagacggtattccttctacagaatcatacacagttcaaaaaagacatttacttaattattagctactgatgataaaccgacagcaatagactgaagcaatgcatcaagatcatataaaagatggatacatatagtggttagttcaggattaagattacataggaaaattgttcataacaaatgacaatggatccttggatggcacaacgggttaagtgaagaccgcacagtaaaattccagacaaaacacatatattctctagattataatggagcatgagtttatgacaaagtaacaaaaatgaccacatagatatcctgatagcacgaaagaaacatgattgtgattcaaatatgaagagtggtccttcatctcaatgttgtgtacctcttgcaagagctctaacaatctcctggttgagagaagtgacctgaattgtaatatgcagatcataagaattatttttcaagcatgcgcatcaaagaagcactacatatgttgacgatatactgggcaacaaagatatatctctgaaagtaagatggagaaaaaaaatatagattataatatgaacgtgaaaggagaacttcaaaaactagccttactgaaattcttgtagccacaaagccagccttcacaagtgttgaatgaagaccccctttatggactccagatctacttgcttggaagtgaccaaaagaccctgaggtagcagatgtaggtagtcagctattacaccaccaaaatcgtgggctgtatcctttaaactacaacaggccaattatagtcggccagtattacaggcatcatgaagtgtgagctattttctttattctcccctggttgcctaggactacattttcaaatcaaatctttattgatgcagtggaaagtcctaagcaggaaggatgctgagaagctggaggccatggctagcaaacttatggaagcagtctcctcccttggtcctcccagagctggagtagggtaagcactgatgctttttctgtggtgctgttggttagctgttatctgttgagttgtttagaggtgcctgagttgtcttttgcttttggtcgcttagcttcaacccctttgtatcccttggcatggtttggtttctgccctgtttctgtgtttttgtgctgaactcttgtaagtgggtctcccccaccactgtgccgcttctggctttctataaaagccgggcccgatggtctatgatctaaaactatattttcagggtgtctaccaatcaaaacagatttattcaaatatattccacgaaggtcagctacgttccgaatatagaccggttaagcaggtcgtgaacaatgtttacaattgcttgtcattgatacacattgagaatggtacttggttcacagtttcgcaccaaattttcacttagccgtagtagtattctgaaaccaaaatacagcaatcaagctgatcctatcgtctccagatcccaaccgaccaccgatcccccagttctgctcatgaactcatcagcaatacaaaatgacagataggcacagttgttagttcagatgaggagccatgcataccggcaccatggacgacgacgaagttggagtcgagccccaagcctcccatctccgacaagccctccacatccacgaccgggccggtcggatcgccgggccgtctgctccagtccatccccacaaccttccccgccgcgccgccgtgggacatggcctgccgcagctgcgcgcacgccgaccgcaagctcgccgcgtcgatgctctccagctctcccttgttcgtgatggccgctccacctgcgccatcgaagctgctaaagaggagcagagaggaaacaagggagcgacggagcgcgcgcgagtaccgagtttgacgatgcagcggacggggcgggaggcggcggggtccgtctgctgctcctgcgccgcctcctccgccatgggagcttcctctcctcgacctcgcgccggccaaggcctcgggagggagaggcgaatctggtgctgttcagtggcaaccggcacttctggattgcccagaaatgctgggccggtgcttcgcctgccgctccggcccatcaaagcttttccatccgctcgcggaaattctcggcccaaacctgctcggcccgatccgtcgccaacaagagcaaggcacgaaaccgcaacccttccgacctcaccgtctcaccgccgcatcccgctcgccggtcaccggctagacgccgccgtcgcgcgggctcctgggttgccgtgtctccatcgcttccttgttggcctgttcctgcgagcttcgccctctggcttcctccctgttcgggatccgggatcgtgtgtctgcctctcggctcgctgcgccgccgccgccgccggctcgtcccgtctgtgtgtgtgtttgtgcaggtcagtgttattttgtaattttactacgagctcagattcgtatacgttttaattttgtgtgtatgtgctactattcaacttgcatctgttcaagcgggtgacagtgttatgctgttgtacattagcattgtgcatttatgcatgcattttgtttgagcattaatttgtgcccgattcagtactagttttcctgttagtatttaccttttgtctctgactgttctaggattctggcttaaaagggataatctatgccgtcgaaatcgtggcatcagttgtcattcaattcaatccccttgttgattcatgtgcttgcagttgaaattggagtaaatatacaatgaggctgttgaaagcggatcagttgttcaggaaagtcattgacggcgggtggagaaagcaatctcgactgcttgggcttgacgttggtagtaagtatgttgggctggctgtttccgacgacaaaaataggatcgcattgcctctaaggtatgcacttcaaactattgtagctgaatattgtgttccttgatccaaaggtttcactgagatagtgagatgtttccagaacatatttagcacaagtgattccagtgtgtccataaaaattagaacatcactttctatgtgatgatttaaatgcaggcggttctatattccattcctctcatggattagtaggaatgttgagtttccaactcatttcaatggatcggcattttttgttgtacttcattcaaatcattatcatgttggattggaatcttccaactatcagaatttgtttcagtttgtatggtctctggcttttgtaagacagtctattattgtgctgtgtctgttgtattaggtccttctctttgattaattcgactatactaaacttcggtttgttagaaaataactgtagttgccttcaaactttaaggaaaattatttgcaatttacaatatatcgatacacaagatcttatccctactatcatagtgtacctttattatttttaaaaatattagtctttaacatatttaagccttataaggcttttcttcacgagaaattcttcacttaccattgttaagatggacggactgcacttggctaaagctgatatccttttacctacctaagcactcagacagagtggatctagatttgctgaagtatgcgtttatctagaattttgtggtcattgtctgcactgctagcataaggttatctcaggataacacccctgttttatcagatattgactctcttgaatttgcaacaatccacctgcctacctggttttttgtggccaatactatgatagtttagtgatgggatatatgatctgcatgcattcccttaaagaaatggattttcctattgggattaacaattgcattgtctcctacagtgtattgagcaggacaaagacaaacatcagcttgatggcggatgatttcgtaactttggtatgctgaatatgtttactgacatttaaattctggagtaatcagattgtagaatcacttaccaaaagatcgagttcttaatatgccatgtaacatcatcctacatcagatcgagtgcttaatgtgccatgtcacatcatcctgcatggctgcatcgcatgcctgcatactgcacaagcaattttgtagcatgtgtgttgaggttacgatgcatttatggaagccagggttacaggccttctctaatatgctgttctttactgctcaatttactcatgtcatttacatttccaaaatactcgagggtgacattgtccacaaagaaatcataaatgatttagcaatagaagttacagacagctcatgatgcatatattctttcattttagattctggtgaacatttaaaagcactcatgttttgctatttttcatacatggaagccaattccttttctttgtttttgtgaataggtctcaaaatactcccttgcaggctttgttgtcggctatccgttcaacttgcagggtcaatctagtccaaatgtaaagtgctcttgtgctgggagcctgggatagtgcacctcattttctcactatatgtttggtgatgtttcctttttctattaagcaggcattacaagtaaggcttcttgttggagagctctgtaaaactgggaaacttgatgatatgagttacacctattgggatgaaaattttacctcgaaggtgatggtacttttttgcccattatctctcaaacatgaaactacatattagcatggggtgcattactcatgtgaccattttatcctacttttcaagtacttttttatggtgaagtgttttgattgatctgtttatgtctccagtgtgtagaagcccttttacatcctctgaaactacatgacccagttgaaaccaaaacaatgacagataaatttgctgcggtttgcatactccaggtacatacaacaaataccaaatgacgtcattgtagacttcgttgtttcgattatgtaattattattgaaaaccagtactcatagttcatttagctgaacatctgcttagtgacattgactatcatactttgttttcctaaaaagatttttactttctgtgcagcgctacctagataatatgaacagagaattgagatctgcagataattctggaaaacagggtgacacctgagttccacaatgcatatattattctgttcggtgcacactaaaccaaagacaacggaatcagcatctgttcggtgtactgctgccttagtgtactgctgccttatgaaaaaggctgtgcagttcattgagacatgtacaaaactctgagtttatgctctcgtatacgcctgataagttttgtagatgcagacttgcagagctgacaattcgtcagctagcaagggcagcttccctgcctgcctgctagaggcaatttgttgtaggtgatgcacaagtactaggaatcttttcccccttcctttattttcttgcttatgaggccattggcaccgaaatgcctgcttatgcgcagcttgaacaatctcttccaatatgattgccgagcatgcgcgtgtgtatatgagcctctattgtgtttcgggaaaaaaaatgattgccgagccaagaagatgcaatcaggctgtcgagtcaaatcaggttgataatggcgtgctgcagccagattccatttcctatgtctgcatgcgcatgcttagacaaaattcaccgtgatgttaacaactcatgtcattcgacgacgggcagcttttgatcattgtcacatccctgatacttgtaaatcctcaataatgtttcctcagttgtgcatatccgtggcctgcaatgctccgtgcaattgttgaatctgtttccagaactgatagcgtaaggaattgtatgaccatgatccttgctgtctggttgcaaaagattgaaaattctactctacaaagcaagttaggctgacagagaatcttgtggatgggatgaggtaagttcacttatccaattagtttactactctataggagacaataggtgaagaaataggcacaagagctaatgtgcagacttgtgctgctgagatcgtttcagacttggacaaacaatgctatgtggtttacatggactgcgagtctgcaacagataaaatcaccaatctacagctgtaatctgcattgtccgtttcctagggttagcgtaaggaattttccgatgtttctcccaggatctcagtctcagtggctgagatcgctgctactacctacacatgcaaaagatcataaaattcgattctatcaagtaagttaggctcatgaggaagtttcagaatacaggtaactacacaaaggagttaaacacatcacacagcacaaaagaggagaaaaaagagagaaaattctgaggtggtaggcacatcacagcacagcaattaagcatgaaacataaggggagcaagcaggtcggcgcagccacttgtcaagttaacatagctctcacgtatgcctgcctgcttccatgccaaaagtctactacactacagctcaagctactatgtatctgcctatctcaagagcaggagacagtggtgagcacagcacgaaaccaaggtagccgaaccatgcaaagtcaacacagttgacaaccagcaatagctttgtgcaaaagagatttggcagccaaggaaagacaggtcaggagctcacatcaccattggaagtcagccactgatcgtaccgttgttatttttagggagccgtactgtctaatcagggggagaagagctgatgaaggtgtatactggcacgttggagatggcttgaaggtaaagaagacggctggttcacggtaggtgattcggtcgagcagccaacggttttggaccggaatgcacgagctagctcgatcggcattctcccttttattgtttatatattttcccggttgtttgtttgtttgttattccggcgatttcttgaccagagataagcagtcgtttatttcaaggtctgagtctttgacaatttgtttgtgtgttgattttgttttggaaattgtagactttgactgaaaagaacgaggttaattaatctcgtaatccagtcagagatgagtaattggcatagcgacggcttgcatgaaattagaagttttgttaatttcatattagcaactaatacgatctcctgcctgtttgcactttgcaggaggaaaattcagcaagagtaggaattggaggcagaagttaagcacaatgtagcatatatggagttatggatcaggaacacgtactctccaaaatgatattcagccacatatgcatagtttgtcctatttaagcttccatgaatactaaatataatatattttttcggtgcctacgaaaataatcaaataacgacccctgttggagtattagacaaaactcatacgtggttagtccatactacgtgcgcattattggctgatggccatagcaatagcagaacatgtccatacactgtacatgaaaatcgtgatcgaactctgttccctttactgttgggcacctgcagctgcagtatctactataccaccaaacagtactacccgtctgcatccaacgtgcaaacttcggtttgtccaccaccgggacatgtacctcgtgtgacagcgacaccaccaagcgatcgatcgagagcacgcttgcggtgaggacgtgaggtcgctcgcccggatgagtacaggggctcgaggccaaggagggggggaaccaaacgtgtgacgggaacagcaacgtctcgtgggggcagccccggtcgagccgaggcgcgctggcgctagctagagtccgtagcgtttggtgatcgatccgacggcctgtctccccgcgcccacgtcgtcacgcggtgagacgcgggcgctcggtccacacacgcgcgcgcgtacgtgcgtgcgccatggccaccatcgatcgcggccaccggctgggtgatagccggtgcgaggggaaatatccggaaggaggctacttcctctgtttcataatgtaagtcattttagcatttttcatatttatattgatggtaatgaatctagatagatatatatgtctagattcattaccatcaatataaatgtgggaaatgctagaataacttacattgtgaaacggaggaagtactatattacgagatctcattcgagataatatcagatatattgatacgatgttaaatctagtatcccatactgaaccatacccgttaggtctcagttgataccttattagtaacagaccgacacctatcgatactaaactttttacccattggtataaaccaatacccattagctatcagatctagccgagagaaatgagagaagaaaggatggagatggtagaactatgatgctctccatcctccctcaacacgaaatgaatatgacaacgatgtttcccatcatctctctgcggagggcccgccatagacgaggccgacacggagcgacctcccgtccgattcacccaccatccctcatccccccccccaccctccccccatttcccctcccactcgaagagcaacgcgtatagcagagaaggtgttcggtgcaacgtaaaaattgggtggcgaccaaggcgagcacgtggcgtcatggagcgagggcatgaggaggatgagtggggtggagcgaatcgtcacgcgaaggataccttcctatttcctaatgcatgggtacataatcccaatatatagcttcatttgttttttttttctcccaaaacaaattgagtctggatttgaaattttgtcttagcaacttaggaagaaggaacttgaggtttttcaattcttctctcgcatgtccatgcagtattcgaatcgatcaagcttaaaggtcggttgtggtcaagcgtaggcgtcgctcatctaggagtcttgttgggaggatcgtagtactcttttgatactttgccagtttcggtcaatggtttcggagtctttactccctttagagttttcttcttccctagtcgtttccttgtgttcccttaacaattgtctctggctgttgtattgtgtaactgaatttcggctttattctaatatattgacgtgtatttttttcgcgtttgcgaaagaaacgacttgaaattttgtggatgttattttaataggaactttttaaaattttagagagcttttataacatggtccacggagtttttcatttattcgatactccgtattattttttaccggatattttcccgggaggagaccctcgcgggcttttgtcatgccgctgtcccttggtcccgaggccgcagagccgtgctgtcccctccctccgatccctctaagatcgatcggtcgctcgaggccggctacgttagtctcgcctcgatcgatcggtacgggtacactcactggctcaccccactgcaaaaaagtcaggattcgacgcttcggccgattatcaccttgcgatcgatcgacaactcgggggttgtttcacgtgtacgtgttgagtccccgttcacgcgtggactagtcaggaacaggatacactacgtactacgtacactcagtggccttgacaatcagagacaatgtactaagccattcgatcacacctgcatgctgatcagcgagtcgatctacgactctctcgcccgttcgtcgtcgtgaccatggtggattaattagacgtgcaaattaataaggcgtcgctgtccagggtgccgggtgtcgacggcgacccgtggggacgagcggtcgtaccggagagagaccgtgccgcgcgctccgctccgcgcggagcgtggcgtggcgtgctgccgtccatgcacacggcgacgacgacgataggtgcatgcacgcacgcacgcacgcgagaggcgctaagctatagcccgctgctgcgaacatcgcgcgcgctcccgcggcggcggcgcggtggtattcggtcttcacgtcatggtcgatcgcgcgcccgacaccgccacgtgaacgatacgtcctgccgcgttccgtgtgtccatctctcgtacgtagcgccagcgtgcgcgtgcgtagcataggcggcggtagacggcgtacgtcgccgtatagcagcgcgcccgctcgcgcgtctcgcgtacgtcgcctcatcgcgtgcgtgtgtggatttagctagtctcggtagctcgatcggtctcgcgccgaatcaatcggagtcgtagcgtggcgcgtcacgcacgtagcggtagccgtgtgtctgggtccatcggacacgatcgatcacacgatatatgctactatagagaagctagatgcggacggtcgggctcggccatctttcgttttcacggggcgtcgttttgatcaggattcggttcggacctgacgacatgggctagctactacacagtagccgctaggcgtggatcgaaggatatctttgatggatgctataccgtgctacgagctagcgataggattgggggagttgtgatgggcaggaatgaaaagggcgtcttctttgagcgtagaggaatcaggcgtgtctgccgacagggtccaagcttgatctttgttaatgcgacctcaaattgtagcctgtagaggctggttcgtcttgctaatgttaactgagacatgcaggacgcgatagcatttgccgatttgcgtgcatcggtgcatgacaatacctctctctggtctggcttcgctggcaatgcttggctattgacgttaccaacgccctaacgataaggatgctctcttaattctttacactttgagatagagtacaatttttttttagaacatgagatagagtacatgacttctcaatgtaagactctgttcaagataagttcatctgacattagacggatgatgggtagagcgtcacctcaacttacaaccagggttttaaatctctcgttatagctgtcgctatctcccgctatagctgtttgagaagggttctagctatttactctcatgtacaatttagccgctatatctttatttagcccgctatagctgccgctatagctatttgagaagctaatcactaaatgccttagcctgctatttaaaacattgcttacaacacgttctttgaggactcgatgtcttccccctgcgtctacaacccggagctttttccttgcgctttagcggcggccaaccaaaaatgtgcaaccgtgaaataggcagttacaccgtactatgtgttatgtctacagagagattgaaaacaaatcaccatatcttgtcggagtacaagataggactggcctccctctcaccctgtcagaagcttcgtttcaagtatggtgagagtcctctcgcggcggttacagttaagatcaaaattggaaagggttcaaccccttcgttctggtggtactggcaccaattgttggaaataaacactggcgtatttgaggggatgtttttcacggtgaacactatggtcaatcacatcgtgcaagaagggaagctttggttgtagcgaaacctagtcccttatgaattccttttggcagttagaattccttatgaattctctttttccttgttgctttaagctgatcggttgcctttctttcttagttagcctagtgtgctcttcccctctcccggtaaggcggtaacccctaggacttgacttagtgggtggcagttataaaaactgttttttcttgctaatatatcgttgtgcaagccttgtacgggtttaaagaaatactccctccatttattttttatagtcatatttcgaaatctgaaaattttatttttgattggcatatttcaatccaacaacctatcctcttaatgattttgtcaaatttaatgcgtgactctccattcttccacacatgattggctatatgagcattgagaaatgtaaatattaattaatcgcttgtttacgaggaatgactagtagcatgtttaaatggatgataagtagaattacttattcttggtctatgtgtcaagatgaaatatgactatcaaaagtagatggagggagtatcactttgaataaaatttagtccaacttagagatcccaccaattaatttttttaatgcttcgcctaaaaatatagaaaatcgacaccaatatatttgtctcaaaaattaccgtcgtaatattaataaggttttataatatattttattataaaactgattttcaaataatatgaagtttaattaaatcttatttaaaaattaaatatttatggaaggggagtactactacacattatatacaacctatatatatcatcttcaattcacagagaagttacatcgtctcacttgttaattactactccctccatctacgtttgatagtcatatttcatcttgacacacagaccaaggataaataattctacttatcatccatttaaatatgctaatagtcattcctcgtaaacaaacgattcattaatatttacatttctcaatgcccatatagcaaatcatatgtggaagaatggagagtcatgtattaaatccgagaaagtcattaagatgatatgttgttggattgaaatatgcctatcaaaaataaatttttcagatttagaaatataactattaaaattagatggagggagtactaattaccactcgacacatgtccagacaccagaatataggccaagaaaattcacgcacgggatggactagcagcgccgtcgtcttgctcaaccaccgccagttgcagcttgcagcactacgaatgaaatcaactcatcagtgacgacgccgtcgctgaaaaggctaggcatgatgagagaccagccgatttttttactgtaactacccttctttatcgtaccggtccacttcagggaacctccaattatgcccaggaaagcagagacagtgctgccacaaagtcaatctagcgacatacgcgaatgacttctaccgggctaatcaaccactagctttttcatctaccgtttcgaactaattgaacaccccttagggcacctgcaatggttatctataggctctctacaagagatccatatcagcatattttcctacttggaagagattaaatgaagagagagagcaaagctatctactaacctagagatagtctatagagaaaaacgagacaatgcattagagagctatagatacccatgtagacataccattgaggtggtttactattaatctagtctattgctgagatgcacatgttttatagagaacaccttactttaccattgcgggtgctcttagctagctactcctacctcattcgttcgatcattaattagctaatggataagtcgcgctcatgaacacacggctgcagccaatcacggtgctcacgtacctgtccatgttgacacatgcatactgaacactatacataatgaggttaataattatggttacgccttaatcttgacttgtgtacatctcagtgcgtgattaacactgattaaatatggtgggttgatgggatacatcatacttacatcaatactgtagtgtgattgcgaagtcatgcgtgcatatatgactccacctccagagtttaaatcttgatgccacaagtagtatgtatacatgcatgggttggtaataagagtatatttaatgtgtttcttgaaagaattttagtagaatatgcatctttaatcgtgtgtgttaagagatgtgtttgtgtagtggcggatttacaagtttccttgagcacgagcaagcttaacagctgctgatgtaacctccactaaaagaagcaaattaggcactgttattaagtgataatccactggctaatgcgggggagcccaggcacatgcccatggtgaccgggccttcactccaccactgtatttgtgaatgtaggagtacgatgttacatgtgtagtgtgtaatttatactaaaagaatgtagtgataacaccgtatctactttcattgtaaactagcacggttgcatttgcagattgcgcggctagtatcattatattttctctcatataatagcatatatattttttcattatattattcaaatatattaaaatgacaacataattttaaattttgcaataactttacaaaactactaatgtgtactattcatattgtattttatatacgtgttagttattaattatttttaatatcaaatttttgttatttgtaaatatatatatatatatatatatatatatatatatatat

SEQ ID NO: 7430 - DNA, 17202 bp, Oryza sativa
aattgcaatgcactaagttgatttcactaatgatattctaagagaagacacttacccagcacagcacaaggaaaattgaatgctgtgataacaccaacaactccaagaggattccacacctatttgaatgagctttagggattagctttcttccacatgagaaacagagaaagtaaatctggagttaaaagaactggtttgtgcctacctccatcatcatatgattcgggcctgaaaaaaagtagaagacagcattagaaaatcttccagtatacttatcaaacagagcattgatgaattttacaatcccataagtatgaataaatggcaacattactacaattgagaacgccatggctcaaccttctatcctaaccacaaaaaccaatggtgataatttgggcataactctgtaaaatattgctgtctaacggacaatcagcgaatatcttatcattactacagaaaatcgtgtgatggcacattttgataagtaatggtggtatggcatgtcaagggacaggattttgtatagaacagtaaactagaatggcaagtatattgtgtgttcaaattagtgaaatggagaatcacttaacatgaaataatccagagagcgaattagtaataatggagtaaaattgcttattctaatgaagtactaatttcattagaaaacctggaaacctaaatcaattgaggtattctttttcagacagaattaagatataataatatttgtatctcaaccaaatagagaaaatatgatcagaagtatctgctgttatcatactttgaagcgggcatcagatataaattaggaaagggagaatgggcttacgttcagatggtatgatggacccatttagctggcgacttaggcccacagcataatcacacatgtcaatgatttcctacaaaacagaggttacatttatgtcaacataatcatgccttcatggtggagaatcaatagtcgcagttaaatattcgatcatgaaattatctcaataatggccaaattcttaggcaagacattcgattggcagaaagatgattaacagagagaaaaggaaacacaactgcatatcatgttaggggctaagttggtaattctagcaggcaaggtattgatgataatgaagcattcgtgatgagcacaccattaatgttctaaagataaatcactgaatattctgaagaaacacaatatagtggtcatttcctatcctgagtgcaaaaaacaatgaagctctgagtggaagaactggcggcaattatacctacctgaacctctccaatcccttcaggaagaattttccccatctcaagtgacacaagcctgcccaggtgatggagctttgctctcaatgcatcaccaatttgcctaacaatttctcctcgctttggagctggaatctggacatattaatatgtaactgttagtagttttacaataaaataacttaaaaaaagggatctcagctgcgcttcttccacatatttgaatttttgcatcataacagtgctgctagcttctatacatcatagtgtgcttatacatacatgtgtattttaattaaattttgatatcacaatcttataaattaaaacatgtatgaaatatgaaatcgtagtgtgcacattgcacacagtctctactttatcagcattttaacatcggacatactgttactttgccatttcccattttatatcagatttttggtgttcctgaatcatataacgagtccataccaccttctcaaaggaaggagatcctctgatgtagcaccatgctacggcatagggctatagtaccaggaattagcccttgatccttgtcgtttattaacggactaatggtaaaggtgagttgttacatcactttcgctacagtaatgattatcatgtacagtaaattaggtacagtaccgaacactgtttgctgcattagagcgctatagcagactcagattcctgtaaggctgtaaccaaaagctgaaacccccaaaacacccaagttacagggttttgaggcagcatttccaaacaaataatatcgcaacgtttcgaattgcacaattgctggtttccacacagtcagatctctcacgcagcagaaaatagcaaatgacacacaagagcatagtacgagcacttcatcatccgaacgaattgatatcagcactccaacacagcaagtcaagtgaaactcaccgccatccaggtcttggcggcatcgtagcaggcgcgcatgccctcctcgtactcacgcgcggacgcctccacgacctccgcgatgacctaaaccacaaaacacccaaaaaaaaatcccccatcaaaatccaccacaatcacacacaccccaaaaatgccagggcggcccaaaccaaatcgagcgcctagaaccgagcggatcgtgtggggggagacgcgcctggttgttcgtcgggttggtggacgtgacgacggggcccgagccgccccaggcgccgcaggcgaaggacccggggttccgcggcgcgaggccaagctcggcgaggaactggtgctccttcctcgcgaagctccccatggcagaagagagagagagagaggtagccctcctcctccttctagaagacgggttccttctgcgcccgtacggcggggaggggatcggggtggggtgggggaggcggtggctgtggctggccggcggtaaggaagggatacttatacggaggcggtggagtggggactgtgtgtcacgggaaggggaggagaagggagcgtggagtggcgggtggggtcaggagggggtagcagtagcacgggacgagacggcacgaagccgaaagcgtgagctgtttggtgaagtccagaaaggtcaaaggttttattttcccatctttttaaagccttcatcgtagcgctcttgtaaactaaaatttaataaaatctaaatttgataactttttaaagtttcttcatcgcattttattttacatgaatttgcttttgaattattaagcgcacgtatataaaagatttacttatagattagtttttggttgctaataagcaatgcaaataaacataaacgcacattcctttttccctataactacctttcatccaaaaacttttgtcttgaaaaactttcttaaaagggcttgggagtacctatacatctttcgaaagatttttataatcgtatcacacagatttttaatctttgtattaaaatccgatagatataataaaaagcaaaaagcaattaagaaacaccataatgaacattaaattaccatatcctcaagaaaaagaccaaatccaatacaaaatttaaaatttacatgtgaagattcaaaaattacagtgtaacttacaaaagttacagtgtaagtttcataaattacactgtaacttacaagaaaatacactgtaaatttgagtgagaaaatcgagtgagagataagaaaaaatctttcgagtgagatatagcaaaattgaaaggactttacgcaattacgctacaaacacagctacgctaaaaatcacttcctttctttgtttttttcctttgttgtttagattttttttaagtacgtaatactactatacttgttgtgttgtatacatgtctatcatgccataaagttggttttggctatatttgcatttgactttataggtcatgatgactcgaattcgctatccaaataaggtctgccgtgttttggaaaagagacactccagtaagaaaaaaaaggaaatgaaataataaagcactctaaagtctagacataagagaaaaggagagctgggacactccaacatcagctgaaaatgaattttatgctaacaagatcgggtgatgcaataaataaagcatggataagagtcatgaatttgcttttggctagctagtataagctgagataattactcaacaaaataagttggttttggctagtacatgtgagtatactccaggtagattagacaacaaaataaatgtacaataaccgaagtttcaatacagaagggcgcagattaaggagaaacacaagattgaaaagaaagaaaagaggattcatactagttggaccataaataggctagaatttatcaaaccgttttggatgggcttaccatcaccttatagtttgatgtttatcgtgataacagcacggatatcgtaaggtatattgtggtttcaaaaactgataaggttaccgtacgtcataatcgcgataactgtgtgataaccataagattttgtaaaccctagaatagtccacctgtaatgaacagaggcttcatatatgaatcatatgatggtgatcttaattagctcgcttttatagatttctgaagttgacaggaactcgcttttcattacaagatagagcgccctggtattactactggactcactcatagtgtaagcaacttttcaaaacacaatgtcaccatcatatgattcatataaattgacaaatatattatattaccacatcaatgaggagcaatcctaattgtaaacttccagtcaatccgtgttctctcggaaagtgacgtctcatcccgttccagtattccattccatctcattcctccgaccaaaaaaaatcacccaacataaccatcgaagtacaaacctattcttttattccctgagatttaacagtaacttcagtggagtgctagtaattttaacctcgttttactgacaggagatcgagccgtccaagtgtaactgtgtaagcgagcaccatctctctttctcacaattggccaacaaattaaaggcatttgtccctctgtgccaataatgcttggcatggatagctaaaagtattacagaattgcacacatgacagcgacagagtaggtcactgtgagcacacagctcacaaagccgtgccgtgtgtcgatgcccctctgtagcttgcatttcccggctttccgcgcgccgtcgcccgtcgtcgtcttcggtgcgaggatgcaagatgcgaggcgtgcttcacttggcctccccgtctgcatgtacgtggagagacgttttgggataaggacgatctttatcaggccggagtcgtcgttgcaaagaggcaaacacatcgattcgtttttgtttctcgttggctgaacgtttcaacgtcttggcttgtgaaatggaagcgacctggtttgcatcccaccgcgcaggaatatagggtgtcccatacgacactcactctcaggctcccccctgcaaacagggaaggattttcagatttatcagaaaaggagagccttgaacatggaggaatgtagctcatgtcgacacgtacgtaaagaaagaaaaaatgtagtagcctagtaggtagatggctgttggtgcaatgaatagagagagttggctacggtgaattacctgaaacaatttcctattatgaaatacatgtactccatctgtaaaaaaacaaatttagaactatatgtgacacattctaacactgcggatttggatagaagtatatccagattcatagtactataatgtatcacatccagtactaaattggttttttatgggacggaggtagtatgtttcagccaactagctaggttcactattcagacccctatcgattaacttaaaaaagttaaagccaaaatttaaattttaaaacttaattttgatattgattttaagatactttcaatgtatctttttttagcattggttaaaatcgctaagaatatatatgtaaaagttttatacacaaattaattttattgctatataagctatacatgttacctcttataattagcttttggcaaaccaataagacctcacccttaaaactttgtttggatgggccgcatgccgcgccagcaccatcaattgtcgcctgctcgacttcctcgtcccgctatgctaccagagaggaaggcgggggaggaagctcgacgccgacaccgggaggagagggaggtggcggggaggccagcggccacgccggatgcaagtagtgtcaatgacaacatggtagggggccggagtgcagcggtggggatggtcgtcggcgccgctatatggtccgaccaacgcggaggccgtcgggagggggtcaatgccgggagaactaatgatagatgaaaggagaagaaagaaaaggctgacaattgggtcccacctattgattcaactattggactagtcaacacatcacgttagtgaaaaccactttcaaaatcatcgaaggaatcatttcatacgggttttagtagttgagggttctaacatatatggtattctgatcgggttttagtattggatatatatttgagggagtcgaagtggacttattctaattcccgcctggctaactgcatgggcctcattgatccaactccacgctggcccaaaggggacatctcactggagtcccagcccaaaagaaaaggaaaaagtgcaccaagggtccctcaacttgtcatcgagataaaaaaaacatcctccaaccgtaaaaccaaatatgcagggtccctcaactatataaaaccggtcacccgagatccctatgtggttttcaacccggttttgtctgacgtggtggctgagtcagtgtgggacccacatggaccccacatgtcagctagccacatcatcactgtcagggttatggatactacatacctaatagtagttgactaaatctcggcaggacccaccacataccatgtcttatacgggaactgactgcggatatatggagggagttccggataaggaaagacaaccagagttctacatggaaacgacaaggactactcggattgtatccatattggtttctctagttctacttggacaaggggacatctatgggtataaatacaagaccccctaggaggagaggagacacggacaatcaacgggcaacatagacgccacaaagccatgaaccaatacaagccaacatacgccaagacaagacgccagatatcgatttcggagataagcacgactagtcccctacggtatctccggatactgtcaggagagacgaaagcgttatctttgatctcgccgagcacgaactcgaggaggaagactaccctgttgtcgactacgagtcagaccttcagaccgccatatctacaacaattagataggctaccccaaatattgtactggtgtgattatggtgaataagagcaataccggcttcggccaacaagatgtagggttattacctgacaattcaggggcccgaacctgtataaaaatcctcgtctccatctcttttacctcagtctcgcgtataccctagtaccgacgatccccatactatgcaaataccggaatcgcgacatcaaacgtcgacaatcaccctttccctcatctctttttctcctatctctctctctcttctcgtttggtgctcttggcaggccggcgccgccggccgactgatggcgaggagacagactgggcgacgcgggagaggaggtctggcggccggcgacgtggcggcggtggcggcgacggcgacgacgacgacgacgcgggagcaggggagctctcgccgtcgtcaccgagggcccaaccatgatcttgtagcggcgtcggtgcagcaataaaagggaacccaccgaggagtgctagggccatgtcagcgccgacgtgcaattggtctcggtgaagatggggaagccgacgatccatattcagaggaagatatccccttcatcgatgtctcggccggtcacctgcgcctctctaccccgaggccccgagcggccgagttcccatcgtctcatcacctctcttcgtcctcttctccgcccaccccaagccgccacctctccccccatcctcccatctctgcaagctcctccgtctcaccgcctccacatccgcctcctccccaccccgcgccggccgctcccgggaacccacccatgccaggccccggcccagcccccgcccctccccctcctcctcctcctccctctacgcgcgccccagcctcctcgacatggagcgtggccgtgcagcccgccgcgccgacgtcgacgcgttcctcgcctctctcggcatcgacccgggtgagctcgctggcctcgagctccacgccaccatcgatgtcatgcgcgagcgcgtcgagttcctacattccctcaagcgcgtcgagttcctgcactccctcggcctctccgcacgacgtgacgatggaggggatatctacccccgccggccgcacgccgctcctgcccccgtctccgcgcctctcggccttgtcggcagcagtggcgtcgtcctccactgtcgttgccctcctcacgaaggcctcggtggctgacgctgcggctggtgcccgccgccactccgccggccgccgccccttttccacccggccttgcacgcgtgtattgttgtcgggtgcggcgacgtaggtggaggcagaggctgacgttgcggctggtgcccaccgccccttctccgcccagcctcgcgcttgtgtgtcatcgtcgtcgtcgtcgggtgcggcggtggagcttggtagtcgacgcgccccgcctcgccagcacagagaagatagagagaggaggaagagagagaaagggggaaaagagaggtgacgacgtgtcacctgacatgtgggtcccatgcttactcagctgccacctagatcaaaaccggggtcaaaaccactgaagaatctcaggtgaccggttttatatagttaagggaccccacatatctggttttgtggttcgagaacgttttttatcccgatgacaagttgagggaccttcggtgtactttttccaaaagaaaacgagtgcctgcgccgctgcgcggctgctcgcctgctcctgtgctccagcctccaccgactcttcactcactcgtatgaggcgcgtgtgcgtggtcgtcgtcgaggaaacgaccggtaaaacggagcgcgtcgcgtgcgtgggccgtggtgacacccgctgacccgcctgcacgaggcgcacgttgcgggcacgctatgcgcaccgcagccaccgctgctatgcgacgccggcctaggcaaggcgctcgccgcccgcccgcaactgaaaaaatgaaaaaaaagaacgagtcgcgacggcattgcggcctccgccagcccgcgcgcctctcccagcttttttgcccggacgcgggagtacaagtgtagtacaggtcgtgcccctgtactgcctcggctgcccgcctgattgtactgctgctgatgctccatttgatagggcacgctttgcccgctaattacatgtgagccacggcccacagcctcggcgtcgatgccatctattagcactagcactagtattttatagtatccatctggtttggcgtttcttgccacttgcccatgattcccactcctacgtcctcttgccagttgccacagcatgatgaccaatgcagcagcagcactcgaggaaggagagccggacggggcaatgcgccggcgagcggccgaaaaggagggggaaggtaaggtacgtaagcgttggatagtggcggttttgacccagactcgttccaaacatgacgcacgcgagcttgtttgtagggccttaagctaggaggcgaagcatctgtcggacaagtcataaacataaaacgaccactaaacaatcaggtgagtcgatcaccaaccatgattatcagattatctaggataaagtgaagtgagtataacttatcttgttagttttttttttggaactaactcatccgggttaagtcataaacttgacacgagtgctcgtatttattgcttattagtttttagtggtaggcagcgtacccgtcgacagcgagataccagtggttactttgtcaatttcaagatatgtccgtccaatcttttggagatgctcatagagatatggtgtgcgtatgtgtgttcatagagatgaggctcataagggtagcgtgtgtatatgttcgtagagatgaggctcataagggtaggggtgtgcgtgtgtgtttatagagatgagtgtacccgtgtcataaacgcgtgcgtttgtagtatgtttctaaaacaaaattatgggataaaatactatacctacatgttgcttccacctataaacttttcacttattcaaagcatcatgtttcatgccatacggttgcaaattactaaattaggcagcgggaagccacctcttaagctagtcagacgatcacctcaacagagccagctcctctgcttttaggggctgaaggtagaggcgtagggtaaaatgatcctgctactacagtagggacagtaatttgtagttaattactataggtacagtacaaaacacagtaaatacagtgttcccgaatattgtttatgatgtacctagtatactgtagtgatcgatctcattcattcgctgtaaatcggacaactgagaatatcccaaagtaatggcactgtacgtctctctgacttcattatgtgaagtcagtggatcccaatccctgctcaaccgactaccgccgatatttgaaaaaaaatagctagccgataaaaacactattaattgtttggactcaacgatatcgttggcttcattacttgagttatacataactatataggaatcaacatcggatatacagataacttgctttgacatgaattattgacatatgggctactatcaagtagaaacgcatgttagtgatagaaggccccctttaaatcaaagaaaaaattatagaaattctagaggattttatcctatggaaaataattctatagaggtatcctttgaaacggagaattatttttctatcaatttatttgaaatttctatggaatataccttactagagcaattttagagaaaaataagtatgaggtctcacctcatgttttcctcttcatgtgtgctaatcaaacgatagtttaaagactttcctttgtttcgcaatcccacataaattcaataaatatggcattttattcctacgtttttcctatttctctattatcataagtaaacatgaattttgtgtcatgattattcatcttcaagatagtgcttctcaactcagaagcagaggacatgataaaggagaatatttaagttggaagataccggttattactattcagaaacttctaaaataaatcttacaaaaatacctgccgtgctgggaaacccaacctccagtccagtggcgcgaacgtaaatacaaccaaacccagcacccaaaatccaaacctcgcaacgaaggccgctccttcaaaatcccaccggtctctttcgccggaatcctcatccctcctccccttctccgtccaaactacccgcctccgctcccaatccggcgagatcaccaaacccctctcgccgcctccgccgccgccgccgcagcagcagcagtcactccgccggagcaccatgatgcacatgaccttctactgggggaaggacgtgacgatcctgtttgacggctggcggacggccacgtggaccgggtacctcctctccctcgtcgcgctcctcctcgcctccgccttctaccagtacctcgaggcgttccggatccgcgtcaagctcctcgcgggcgccaagccggcctccatcccgcccccggcgtcctccgacgccgcgcgggccccgctcctcctcccctcgtccgccgccggacgctggccggcgcggctggcgacggccgggctgttcggggtgaactccggcctgggctacctcctcatgctcgccgtcatgtcgttcaacggcggggtgttcgtcgccgtggtcgtcgggctcgcggcgggctacttggcgttccgcagcagcgacggcgaggacctcgtcgtggtcgacaacccctgcgcctgcgcctagggtttggctttgcggctgcccccaggtgtggctcctctgtttggtttcccgatcttgtatgacaagtagaaataaatctgtgtacaaattcaattgcgtgacagggggattccggtgtttctgtaatttggggggaaattgtagagtacaaaatgagaaagctgctacttttgtgtttccaaccaattgatgcattgatgcctttgtgaatgaggaatggataaagatgacttagatcaaattgaagaataatcaactctagaatggacagagctttctctctctgagctgcaacgaatctaagaagtatcatcagttgaaagatgataagcataggcatatcttttctgaagaactgaaaattgacaatatgaggagcctagattcgatcacggaaagaaaattctcccttttctcgctcttcttgaatgaaatgatgctgtccctgtgactgaatgcagagacagtatgagaatgggtaaactgtagtttggatcatgtaagagcatgatcttgccttgtttatagttttgctcatgattcattggcaatttggccttatgggttccttcttgttcagtgatcgatatgaacttattagtgaaaagttcaaaacactaatgggtactgatcatgtagccatgcactcaatttattcagagcttggagtgaaagttaagatatgtgctttttcatgattcatcacattttggctcgcatggtgatattttagcataatcttaagctgagatgatgaaatgagtaggtcgacgcttgattgatcctaggcagttggcaacctccaatcatgtggacagcgcatgttgctgcagcaagtacttgttcaataggtgtattgtatttcctcatctgtggcatgaagccatgaactatgtacaagtagtggtatcggttgctttcggttgccctcgtgagagatgctcaactttgtgactttgtcttgcaactagaccttttctagttgacggtgatgtgaagtaataatgggcgcctcgccttatccatttcaggggaaaaaactgttgcattgcctagattaagctttcacacacattttaaagtcgcccaaatggtgttgtttgttttgctgcttgaacttgaagctgcaattgatatgtataactttttaggtattgttgttatggatcggactgtgtcaaacacttcgttggcaggaatagtctcatgtgcttcttttttgaaggaaggtctcatgtgcttctgtgcatgtttgtttatctgtgctgtcactgggctctgctctggctcctaaagcaggtttaacgcaagagcaagttctttcttctctgatactactccatcgtaaacttcagtaatagtagcagcactattatcaattggattgacacgccccttgtctgttgctccagtagtgagttataccttttgttcagatctgacttgtgagaaatggtgatcacccttcatatcgtcattgcttcttgtagggttaccgatttgttcacagttaacgcaatctagactgaagtctcgttcgccaaaagatatcgccgttctgaaggcctgaaactcgcatctgtagcttatttttccagagggcgcatgtttggctagtcgctcatgcgcagactcggaactttgccaaaaacttggttgcaaacttgggctgcttggtggatgtcagggaaggcgaaattctgtggctggcctggcctggccttgtactagtctgttcggcacttcagcctgataacgttatgggctttgacagatctggccttgcaaatataagcccgcacaccgggcctggcgtcattgtgtgagctttagtacattcatgcgttgcggtttggttggtcagttttgacctttcttatggtccttaagtcgcaatattaaacattaaaatgattgatagtagtaagtactggactactaatagttgttttttagtgttacttagcaaatggccgattcattgtgtacactgatctaatcgtgttttagtttacctttgtttctgctgaacaaacacaccataattagcaattgtgcaagttggcaacaagccaacaacgagaggttgaacggaagaagcaacacagaataaacgataaaagaaaaaaatgaccaaacatcaaggagactaggggagagggtttcttgacacattatttctgcaaaacatatacagtcacgcattgaatttacaagtttattactagttacacggcgagaaatggaagaaaaaaaatacaatatcacgacagatacgcgcgcaaagctttcattgccatcagagctcgagtagctcagcggatgtagtagtgcgagttgcacctcagcaccatgcgcgccaccgccgcgggcacgacggccgccgacctcgccggcgccgcgccgatagcgccgccccgcgacttcgccggcgcgggctccagcgccgccgcctcggcgacgagccgcctcatcatctcggcgtagtactccctgagccgcgccagagcgcgccgcgacctcagcagcagcagccaaaggaagaacgtcctgcgccgccgtggcgcgccaccgcccgcgcccgcgcccgcgccgagccgcgccaccgccatcttcggccgcccccggcgcgcgcgggcgccgcggccggacactcggaatatcatgccgccgctgatgcgaaagggattatctctccgtgacaggaatgtgtcgaagagaccgacgacgacggtttgatatggtaggcgcgccacgccttaatgcagagatggatcggctaaaacggcgaaacggcttggcaaaataggcaaataccgtgtggttggcaagttcaccaaacagactggtccgtggagttggtagagcgaacagcgtcgagccgaacgctgactgctgcagtttgctgattcaagcggcggcaactagcactaacaaaccttaatttcttttaatacattaatgcttattactatgctcatgacgtccgcacacttaccttttataaagccacacacacatacctaattcctatgagtacttctgaaagatttggtcagtatatttttagatcgacaaagttactacggcaaggatatgagcacttctgaaagactaagccggcatatcttaagattaacaaaactaccataaacgtttcgctactgacgaatatatcacctacactgaaatattcccttcaaatgttgacaaaatactttaatacttgaactcaggtagacaaaatttcaccataactccataagaaatttaaccagttaagttatgctcactttacaacaaaccttaacatatagttcagcagttagaacttgtagttgtgcaaagtttgcagtaaagcatactctcttcgtcctaagaaaaaccaatctagtactaggatgtgacatttctaatacaacgaatttggacatactcttcttttttttattaaacaaaaaagtatgccttgcgtcactttcatgaaaacatgtacaactctgagttctgaaggacattgaggagcttctttaatttgggattttgaagaacgtgaacgtcaaacgtgtagtttaaatcgaggtcattttatttttggttaaggctgacactggctgatatcatgaatatgtcagctgtgagctgacacgaaacacacattaatggaagttagcactttgaaagcgattagggaagaaagcatttgcatggatcctgttctgtgcggtgaccagctcacacccgcaccaatggcaatgcatgatcgatgatcatacagttgaggatccattatggtgtaaaggtgatcagtcactgcataggatcctatctgcgtccacgtttcaataaacactgagctcaatgttttcaggtaacttgttttgattcgactagagtatgtttacttcctgaatgtgtcggcacttggtcgatcgctgagttgaatgttcatgaacgctagtaataaatggctaatagcgtaacaaattatcctctgttcattgtgattaggatcagcagtaatcgttagtatgaacgttcgtacgactacagtgtacgagctacagaaatgtgtttcagtgtattgttgtcacagcggagacacaggaatgcatctgacttttgacggtatatctcctttagtttttcacaggtcaacgtacacgacacaaattaaagattggatagtgacatagtgtacgacagagctgagcaccttacacagcaaagcaaagtcagtcttcagattacaactgcaagcagaggcgcaaaacttccatatgaaatgccaagttctttttttttttagaaacaagcgcttgtttagttccctctaaattcctaactttccatcatatcacatcacatcgaaaactttcctacacacataaaccgataatgctattggtcggtcgaccgacgggggagaaaaaatcgggcgctccccctgcggccccatccccacgcacagtgataccattgaccccaccataatatctgtccccacttgcaacaaatcaaccatatattttgcaaaccctatattaagggaatttagtttattttttgttccaccaaaaatgttgcacctagtatactcacaatgtttcactatgtatagacctaatgttgcagtgaactgaaatattccgttgcaacaaaaaaaacccacatattttggaaccccctattaagagaattcgttttattttttgttccaccaaaaaatgtttcacctagtgtatttataatgtttcattatgtatgaaccaaatgttgcagtgaactgaaacaatctttcgctatttgctgaaacattgtttttatataaggtgaaacaacatccgatttaaacgagtgaaacattttcgatctacttagtgaaacaattccgatatacctagtggaacatcgtgcaacatttaaaaataattcaataataagctaaaaaaaatttcgtcggaatatatccatgtgtggtcttgttttgaagatttaattgctacgaatttaatggtgcaatcggatcattatttagataagtagtttaagagaaaaatcagtttaaaatagtttttgcacgtaaatcgggcgctgacgtcatgctgacatcagcgcccgattttaatcggctcccatcgggcgcccgacgggaagtcacgtctgctcttaggaagtcttcatcagggaaatacatttgcacccttgcactcaaactttcttgttcttgcagcattctccacgcttgtctcgctaggaggttaaataattcaaatcctttaaccccatccctcccatttcttggttctggtggtttgcctt

SEQ ID NO: 7431 - DNA, 13377 bp, Oryza sativa
taaaaagtcaacggtgtcaaacattttgaaacggagggagtatatttcagtcttcatccttgtagcaacgccgaatcctagaagcgagttatagacatcgtgggtgctcacggcgttcttgcaaacgagtcggcgggccaccttgggtgaggggcgacgaaagaaccttgatttgtggccggagcagttgcaatggaagcagcgcgtcgagtctcggcaagccgctgctcggtggtctcgcaggcagttgaagcacctgcctagaatttctatctagaagaagcgcatcaaggtgggttcaacctagcgaagttgcgggcggcagggataggccgcgcagcccctcactcgctagacaagtcgcgcatgagccgcgtgccgccgagccacagtgagggtgggcaagaagcaggtaaggagctagcgtcggaccgagcgagcaagcggtgggcgccggggccgtagtggccactggcgcagagatggtcgcttgtcgcttgcctgctagtctcccgttatgactttaaaatccttcgagaagtatgtggtcgaacacatctatctattatatactaaaagtacattaatttttctataatactgagaaaataaataaatgatctaacaattgatttttacttaatccaatgatcccataatttgaatcattagattagatctactttaaaaaagcccgaagtatcctatccacataggtcccctcccgtgtgtccatatgtgcgacgaatctacaaacacccataagtaccggcctccccatccctctgcctctcgtttcccttccaaatttctaggattaactcaaacaaagaaacatcccgatccctctgcctctcgttttccttccaaatttctaggattaactcaaacaaagaaacaatcaacatttaaatttggtcccatatttttttagagaagggtatttttacccggcctctacatccaaccggacatatgtagcctttctaacttaggaacttagcttatcaaatagggaacttagccctcaaataacacaatctaaaattcgctcctatggatatttgaattcaggaccttagggcgctactcaagtcactgcaaccactaggctacatgccctttcacggtcccatatattcttaagttgtatattcaattttgaatatgtttggactgttattttatttataattagatcaacaatttaagacacattgatatcctacaaatactactaagctacacgtgaaactctagagagcaaaatttatactttacaggcaataaatgaatttaaatatttgagtccacagtccaagttctacctccagcaaagagctcagaaatgggatgcgtactctggtccagattccaaaggaggcagagctgcaagatgtgatcagcaaaagtggatgctgacctactacaaggagtttgtaattaaatttcaaaaaaaaagaaacattcaaaaataaaacaaaattttcattaaaattagaaataaaaatatgacaagtccatgtagaatataaaatatcaagagtccatgtaaaggtataagttataaatatcggaaatttggaataataaaatgagtattaaaagaagaacccaaatacaacacaacacaatttaaaatccctaaaaaagacaatttagaataaaaataattaaactacaaatttgatttcaatacagatttgaaattataatcactcattcgctaaattcagaataaaaaaatactttaaaagagctttgctatctttattaattcacatccatgtatatgaatcaattaaagagaggtaaaataaaatacatttatttagcaataaaactttctcaatcttaagaaaaaagacagagacaataaacattcaattaaaaacaaaaaaatacctcactttaatttaggcttattttgttagacctatttccaaaacaaactaatatgcatgcctacgatttatttttattttttaaaacatttttaatataatattttaataacagtctatggcaaattttattttcaaatctaaaccttttggtcacgccaagaaagctggcattgcaaaataaccctataatgccacaagtattggtgtgacaaaacatgtcacgctggatcgagaagccacattgtacggctgccacgctagttaaactagcgctgctaaaccatgtagcaacgccaacatgcatagcgtcgcttggcaggcctacgtgtaatgcaagatgaaggtgaagtactactgtagtattgctactccctccatttcaggttataatacgttttgactttggtcaaaatcaaattgctttaagtttgactaagtttataaaaaaagtagtaacattttcaacccaagataaatttattatcaattaataatttgatgaaactaatttagtattataaatattattttatttgtctataaacttagtcaaacttgaaacagtttgactttgaacaaagttaaaacgtcttataacctgaaacagatgtaaaacagatgtagtactgttttgtgaaaaagaaccttgtgtttgtgggttctacatcattttcttatgtttaattcgtaactgaagattttttggttgatctatctctcatagcatctatccagatcatggtatgcccacatatctatgaaatgagtttaatatgtgtgtgtatatatatatgtgatgactgattacataattattaatattttgtactttttaatgattgtgatgaaatctagctctttattcttatgatttgtatcacattgaagttactcaaggcgcagataaatggctttttccttgttaaatatatataatttagatggttgcactgttacagaagcattttcatgtgtgtatgtgtttcccaaattgtcggttcagcatggcatgtttcgtcacgtcaattaatgcttatggtgtgacaaggttattttataacgtcagttttcttggcgtgatcaaaaagtttagatttaaaaataaaatttggcccgatctattattaaaatattttattaaaagttttaaaaaataataaacattccctacgatatttttattttaaaattctcactagctagctatttatctgcattaaaaattcgctgccttacaactcctagttaacttgatagtaaaacgtggccatgattcacagaacttagacacatccatatgaccgtatttagtttgttattaattactattattactattactattgaattctaaaagttatagactaaatttagccgtgcaatttggatggacccttgcttgttacatggccagttacttgtttggaaggtagcaacagtacactatacactgactaaaataacccaccacgtgcaacactacagatgctgacttgattgcgaccaaacatcacgagtgagtaacatgatcaccgagcaaacctcctagctatcgtgtaatgccgcacagcaaaagataaaacgacagttaatattttctcttctaaaagttacacatgtaacttgcttattgtgtttgagactttgaggtgaggaacacactcctaacgcatcgccggcgctttgatttctataagatataataaattaagataataaatttgtgtgatatacaaatatatgtactccctttctcactgagtaagacgtatacatgttttaagatccaactctttgaccaataatattcttttataattaaattgatttttatttaatatcattgggttgatatttgaatttactttcgtataactgtgattgtgttgctacaaacatcgtaatatttgagaaattcaaatataaatattagttttgaataccatgccaggtttgatcatgccataattagtacggtgaagggagtatagttaaagtttttttttatagcttgtataaattgaatttaaacttacatgttttctagactaatatactattaatctatcttttatcctttttataactagttactctaattcggattaggctttgtttaggggctggtttgcaacaaccccgcttttttttctctaaatcttaaaataacttggtctggtctctttgcgggctgggcgaaaaaaaaatatgttacacatgtctagattttcaacacagttagttcactatataagcatcagcctatcagctcgacattttatattcacaggtggccggctctcttctgcacacaacgtgtagctcgacaatctacttagcaagatcactttagaaccagaatcaccagcaaccatggagatggagctaccatcatgggcctcagtactggtcattgtgctcgccgccgtcgtcttcctcctcgccaccattctccgccatggccgacgcgcgtataggctcccaccagggcctaacccgtggccgatcatcggcaacctcaacctcattggcgcgctgccacaccgctccatccacgagctctccaagcgctacggcccgctgatgcagctccggttcgggtcattccccgtcgtcgtcggctcgtcggcggagatggccaggttcttcctcaagtcccacgacattgtgttcaccgaccggccgaggaccgccgccggcaagcacaccacgtacaactacaccgacatcctctggtccccctacggcgcctactggcgccaggcgcgcaagatgtgcgtcaccgagctcttcagcgcgaggcggctcgagtcgttcgagcacatccgcggcgaggaggtgcgcgcgctgctgcgcgacctgcacggcgcggcggcgcccgtgctgctcagggactacctgtccacggcgacgctcggcgtgatatcgcgcatggtgctgggcaagaagtacgtgggggttgagggagcttctgccggcaacggcggcggcggcgaggggacgagcccggcggcgacgccggaggagttcaagatgatgatggacgagctgttcctgctgagcggcgtgctcaacatcggcgacttcatcccgtggctagactggctcgacctgcaggggtacatcaggaggatgaagagagtaggcaagaaactggatcggttcatggagcacgtcctggacgagcacgacaaggtgcggcggcagcagggtgataggtttgcagcgagggacttggtcgacgtgctcttgcagctcgccgatgaccctaacctcgaggtccaactccggcgtgataatgtcaaggcacttactcaggtgatcgatccctgctcatcatcctactgcagcttctttactcaggtgatcgtcctttccatggcacacggtgtaagctagctcttccatatgtggtgcaggacctgatcgccggcggcacggacacctccgccatcaccgtggagtgggccatttcggagctcctgaggaagccggagatcctcgccaaggcgaccgaggagctggaccgcgtcgtcggccgcggccgcttggtcaccgagacggacatgaccagcctcccctacgtggaggccatcgtgaaggagacgatgcgcgtgcacccggtggcgcccctgctggcgccgcacgtagcccgcgaggacgcctccgtcggcggctacgacatccccgccggaacgcgggtgctcgtcaacgtgtggaccatcgcccgcgacccggcgctgtgggactcgccggaggagttcatgccggagaggttcatcggcagcaagatcgacgtgaagggacaggacttccagctgctgccgttcgggtccggccgccggttgtgccccggccacagcctcgggctgaaggtgatacagctgagcctcgccagcctgctgcacggcttcgagtggaggctccccgacggcgtgtcggccggcgagctgagcatggaggaggtcttcggcctgtccacgccgaggaaggttccgctcgaggtcgtcgttaagcccaagctgccggcccacctctataccgggccctgatgtatctatatgtcagtacgtgggccattgataccaatacttcccatgatctctaccatggaataagtttgttatggaatattatctcctcgggagataagattctttcttgtgaaccaatcccaactagagtgagataagatttatctcctcctaaaaccgctgtatatggtaaacttgtaatcaagatcagatttataattaagagagatttcaccctatatatgtgttcactacttctgaaatgttcttgaaggcaaaaggaagggcatgagtgttctacacaatctcatgcatctactgctgtgagagggatagggaacagatccggtgatccactaataggcgtatttggtttataacaaagttcactctaggtcccttacgtccaattcaaatttcgtccttcgatgatatatccctcaacttataatactgatatacttgatgtcccagagcagtatagaatccaattttggttgatgtgatggctgagtcagcgtggtcctatatgtcagtgccccaatcttcttccacctctctcccctctcttcccatctcaatctaagcctccaaggcgacgagcggcggacggcagggagaagctcgacgacggcagccagtggggagaagccgctgcctaccggccaccgcccgtcgccaccgttgcactgtgggccacgcccagagggaggttgcgatgccactcgagctgtcgtggggtctatccttgatcatgggcacgcggaagactattcttccccatcaagcggcaccacttccttaccaacacccaccacacaacgacctcgttgacatcaccgccaccaacattgtcactgtctgcaccccaacatcactgccaccaatgttgtcgctatctacgtctcctgcctcaccatcctcatcgttcaccacatcttccctatgtaaggtagctcatcttcacaagaaaactacaaatggatatctcaatcatcaacaaaattaaattaccaccccaattcaagcttgatcatgtggacgccttcatggaggtagagcaacatacactcctggtcattcgagaccttgacagcaacttcactgtcaccgcctttaaagccagccacttccccagcaccgtaatgttcctcttctagggagactccttcggtcatgtcctccacactagcgactgtcacttgcccctcttccacctcctcactgactacgtcttcctcaaccgcaccttcgtcgccacctactctctccacttccccaccaagcaaggggaaaggaccggtagcagcaaagagaagaggaagggtccggtcgccaccgttgagcatctatctgctgaccgccacccttctcccgtcagtcaccgctcactgccatcgagcttctccgcactgatcgccctggaggcatagattgacataggaagagagggaagatatgtggaagaagattgggccgctgacatgtgggacccacgtgggtctcatgctaactcaaccgtcatgttaaccaaaaccagagactatattttcctgggacgttaattataccggtattgtaagttaagggactacggttcaatgatataattcgaaccatactttaaaattagagacctagagggaacttattcccgctgccatattggtggcgttccggctttagcacttattaggcctctttttggatcgacgtacatgtcatgtctcttattttctttgcttcgccgtgattaacagaagtacaacaccgtgaagtaaaattagctacaccgggagccagctgacggcgacgaactagagcggccttataatccctctttgggaaactcataaagctgaaagatatcaccggataacacataccgatgaccgcgcgcccagctagcttgccaggacaaccaacatagcaacacataaacgaagccagaattcttccagcctccggtcgaacacttccaatctcccatcttgcccgtcatgttagcatgctggttaattaatcgccgtaagcccgtaataatcgatacgtgtcacatcccccacgtgtacgatatcgggctgcgcacgtcgtgctcgccgttgctccaggtcagccacccgaacgcggcgtccgtcgggccaccgggcgtcgtcgacttgaacgtcacggtgtacctcagcttgtccccggccttcttgaacgcgagcctcgccggcttcacggccacggctatgtcgctcggcccggtgaccctcgcggtgtacaccgacctgccgtcgccgacgttggtcagctcgcgccggtacttgacggtggtgctgcgcgacgacgacgaccgccggccgaacacgacggagaacgacgggtagttgaggtccccggggctggacagcttccgctggcacgtcacgttgggcgccgccgtgatggcctggacctgcggcggcgacgtgccgacggagcacaggaaggcgacgtagtcgtcgacggaggtgtcgtagacgaggcccggggagagggccttgacggggtccacgtggccggcgccgatggaccacggcgtcgccgtggtgttgctggcggcgtcgacgatcggcgagccggtgttgtcgacggtgtatgcggtggtcatgagcgccgacttgattgcgctggggctccagtccgggtgtgccgccttgacgaaggcggcgaggccgctgatgtgcgggcatgacatggatgttcctgcgatatcacgattgagtctttaatcactctagttaattttatggctcaaaatatataattaagctgagagtgcagctttcagcaatgtaaattacgaatctactaccaaggttcagtgcaaaaaaagagagacatagccagacacatgtcagaatatcgtgcaactaaagtcatgccgactgtcgagcatatcatgccatttgggtgcatgcgaactgcactacagcacttgaaagctaaacagcaccatcatgaccaaatatgatcataacggcatcaaacagctactgttagctggtactgatctattctcgagcacgccggaccgtaaagtccgtgctcgaactttcggtgcaacacactaattactaattagagtaagcaacatactttcagtcggtatactacagtctacgtacagggctacttgcatggagggggcaaagcgtgcactgacctgacaagatgttgaacggcgaccgccgctcgtcgacggtgagcccggtcggcccgacggaccccgtccagccggcgaggatgttcacccccggcccgatcacgtccggcttgagcagctgcgccacctgcctgttcggcccacgcgagctgaacgcggccaccaccggcgccggccgcacgtcgagcgccgtgccggcgaaggttagccccacctcggcgtcggcgtccgactccacgtacctccttatggcgtcgccgctcttggcgccgacggccaccgcggggagaaggtggctgtcggccacgacctcctcgccgctctgcgcggtgttcgcgagcaccataccgacgccgccggcctgcttcaccaccagccccttctccaccctcgagttgccgccgcggtcgcacaggaccaccttgcccttcaccgccgccgcgtccagcgtgccctccatgcagagcttgctcgcattgctgccggcgcggatgcctttgttgtacacgaccgggagcttctcgtcgccgagcccgtcgccggagtagagcgacatgccggcgtgggtctcgccgttcccgagctcggcgtacgccgggaagttcctgtcgagcgtgcctgcaccgacggtgatcacccacggagcagtgttcaccagcgacgacggagaaggaccactgttccccgcggagcacgccacgacgatgccgcggcgagtggccgcgagcgcgccgaccgcgatggggtcacgcgagagcgggaacgcgccgccgccaagagacagcgagagaacgtcgacgccgtcatcgatggccttctccatgccggctagtatgtcggagctgaagcacccctgcctccagcacaccttgtacgccgcgacgcgcgcaccgggcgccatgccgcgggccgtgccttccgcgtagccgaggagtcccgcgtcggccacgacggcgccggccgccgtcgacgccgtgtgcgtgccgtgaccgtcgtggtccctcggcgaggagaactcgaggctgacgtgggaaccgttcccgccgccgccggccccatatccccggaagaaggcgcgggcgccgatgagcttgcggttgcacatcgacgacgggaagtcggtggcattggtctcgcagctcccgcgccaccgcgaaggcaccgggcccatgccgacgtcgccgaagctggggctctcgggccagacgccggtgtcgagcacgccaatgatgacgtcggtgctcgcaccgtcggcgtcaggggcgtcgtacggcgggaggtggaggaacagaggcgagcgcgtggtgtggagcgggaggatgacgtcttcatggacggacgcgacggcggggtggccgcggagcgccgcgacgtgcgacggcaggaggcgcgcggcgaaggctgacggcgcggcggaggtgtaggagtagaggagatgacgcgaggggtcgacggagagggaggccaggtgggcgtggtgccagtgtaggtgagtggcgtacggggccggcttgagtgccgggttcaggtagacaatgtaggtcgccgccccatcgccggcgccggagacgagccgcacgcacgacgagacaacgacgaggacggctagagcgaggaggaagggtggctgctgcatgctgggcagtgttagcgaatggagggagttgtctgtgcgagccgcgttcgattcaaatataggagtggcatggcatcaacctgggtagtacagcagcgcgcgtacagtcgtctcgatgtcctgctggtaatgtggtgatgtgccgtctcgatcgatcaccaccgaaaacgcgatgttcgtacgtgtagcgtccctagcgaacagacatgcaatcgttggagtcaacatcgacttttttttctccctggtgaccagctgcttcggcatactgttaaagaaaaaaaaagcgcattaagcactgggatcgtgttcatcatgcacgtcctcctccaggccagccttaacgcaattatttggctggcccttcctttacaagcggcacggtccgcggccgcgcacgtcgcggcgcccatagcactcctctccctagccctgcctcgttgtaacactacgacgcacttgagcggcgtgtgccgccgccgtcccgccgcgatcggtggtcgggtggatttgtggggggggggggggggggtggatcgctggtgcgcgtgcccgtgcgtgcgtgagcagtgagtgagctctccttcctttccaccgaggccgcggccgtcagcgcgcgcggggcgcggtgcgtcgccactgcgagcgaccgatccagcgatcgcgtgcgtgcgtgcgacacttttcgcccgcccgggcctggtggtgatctgatcgtcgcgctctctaatattgcgtcgcccatgcctccactttctcgggcgatgaaccgcgtggctccacgcctcggcgatcgatggcgcggattggcagctagctggattctgttgcgaaaggtggacatggaagatgcactttcttactcgccatgttggggaggcaaaggcaggggcgcgatatgcgctatatcggcatatccagtgaaggagtggagtgatcgtcagtgcgtgtctgaatgccgccattgctgttcgtttggtgcgtgattgcgttttctcccttggtgatttgtcaatagtgtctgatggtgtcgagggattatttgctagtaaatgcaagcaagcaggactctttgatcaggaagctgcgagagattggttgctgcagcaaactgaagattggtaggtatcattgatctatctatcatgccaagttgccacactaactttgcagaagaactgtactataatgtgtgattgtgttcctttcttggttgtgtttagatggtggaaaagttggaaagttgagagaaagtttgtagtttggagaaaaagctggtagtttatgtgggacgtgacttcccgttgggcgtccgatgggagccgaagtaatcaaggcaattagcttaggttcatcccgaatccattccatgtttcttaaacaagtccttcaaaccatcgtgctaacaagccattctcctccgaaagtcccagagctttttctggtccatatgcatcaatcatcactgttttgttctgtaattccatttcattttatctattttcttcaagaaattccattgatgtgcttttctattgctctcattcattcctattcaatctattcaaaactatgggtactggtctcaatgggaaagagccctaattcgatatgtccttccatgagtttagatatctatgtatgaatctcttattcaatcccatactttttctcatttcagaacgatcagcatactgtgtgacttctacgtgacagttcttgcatttcatttgttgctttgcatgaacattttatattggaaagcccttaattaggaatttcatagatagagaaggacgggaaaaaagagagagactaactaactacccggatcaatgctgattgacgactgaataaatagccggaagcaacaactgcacgagagagaaagagcggatccaactaaggaaatgcagtacctgggcccaagtaggacaaagaaatgcaagtaaatgccctcgattcattccttttatgtgagtgggaaagctagctagaaatcaatgacaaggagtagaggctagagcaaaagggcctggcgtcaggttagttaaagcaagaaagtcaatgctcagtgtattattcgggaattggtttggaaagccttggtagtagtgcactcaaatcgacattgagattgggacatagccgcccaacgattagaccgaccgggggactggaagatctggaactttcctttggccgcaaaccttctttgaatacgaaagaatgcttgttttaaggcaatgcgagagcttaccagagaacaaaggagagtaatgagttgatagataggaggcaggcccaatgatattcaataaaggatagaccgaattccgtccgtataaacataatttttattttcttgtaaagtatttcttttattttagaggagtctctaaataatattcatcatcatctctaaagataaaggtgagttccagcagaatgtctattgaacaagagcacagcgaacttcgaaataagagactgaacttactttctttcttgcttgcttacttcttccttgttaatagtagggatcaagctagtcaattcaaaccttctccgcttacttgtaaccgcttaccatttgctgatactctagaa

SEQ ID NO: 7432 - DNA, 26275 bp, Oryza sativa
tttgatcctaccaagttgttctatcccatgcatattatccttcacaagtttaccttagtactcctcatatagtcgtgttaggcttttagctacacacttacaccaactgacaacactatcatcaagctgatcaagcacaattaacttcacaatgcccatctggagttcaaatcaacatcaatcttgctccgattagcgccaatgtgtcataatgaatttgaatggagctcatagaagtccatcactattcacacaaaaccactttgactctgactatccaccttagtccttagctcagtacctctcatcacacaaatcagaagcatcttcaatcgcccaagctataccagcaaatctacacctgcttacaagaaattctctccatagcactcacaatgcgttctagcacacaattcttttattttatcttattattattattatttaaaacagagaggggatctcccatttctagcacacaaattcacccaagagcaacacaccccatcccacagctgatcaacttaccacaagcaaacagcaacgtaaacaagaatttcctacattttcagggaaaaccccatcaacacaaaccagccacgcatcctacagagccccccaaggtggcggcacccaagatccaccgggtcgtcggctgccagaccgactccagcgcagaagccccacatcgcgcggaataacacagattgaaatcgatcaaggcagcagcggaagtaacagcgagctaatcaaattttaatttaccggatgaaggcgtcggccacggcggcggcggcggcatcctcgtcgtcctccgcggtcgtcgcattcgcgggggaggacggcgcgtagaggccctcgctgccggcgtggaggatgaacgcattgcccttgttgaggaagccgagcccgcggtactcgtgcaccgacgcctccccgccgccgagcagcatcagcagcagcccagcgacggccacgcagaggctcatgaggtggtgcaggcgggcggccgccgccgacacggccgccatggaggtggggggcagcgaagcgaggctggatctgagcgtgcgtgaagtgaagtgaagacgacgaggtgagtgaagcggacgctagctcggtcggggagaaaccgcaagaggccaagagaagccgcggtaataaacgggaggaggagtaggagggggtttggttggtgagagacctcgtttattccttggtgagagggagtgtctccccgtgtgttgttgaattgttgttggttcattttggtgatcagaggagggtcaatgggacattgggacaattggcagggtaaaccatgttgttaaaaactaatccagggtgggtgggctagctaggactagttacacttattagagcagatacaatagcaggctataagtcaactataaatatattttaaagagttaaacgaagagaaaagagcagatctgcagcacggacttcaagatgtgatgtgtgtatgacagatgagaatagtatattatgcaaatattctataaattgactattacattggttataaatgatttggagttagtagtaggctatattattaaacttgctcatagggccctggactctgctgcttgaacaagcaaagtttacagtaaataatgcagtgggtgcatatgtgaagttctcattttattttatttcttgtttgtgatgttggagtgttatccttttcgtttttagcctctcaccattttccacacagcatataagccaccaacaaattttaaaggtgcatttaggtttttattcatcatagtttttttttaagtatttgtcttctaaatcgttcgtatatataaatgttttatcggtaaattatattcctattgctgctaagcccaaacaagatatcagccctatggcatgagataagacttggaacgaaaaatgagattacatgagaaattaccactgatcaaatctgagaacatgtttggaacagaaaccgctcctacgatcgtcgatcatgtctgtcgggtctggatcctagtagaaaagaagaaaattgaacggagattaattactgtactccacacagagctagtaagcacctttcatctttaatcatggcctctcttttctcctttagagcagatacaatagtaggttataagccagctataaacatattttaaaaagataaagaaagagagagaagagcagcgggctacagatctgtagctagctgcagcacgaactccaagacgtaatgtgtgtataacaggtgggaccaaatattaatagtatagtaagcaactattgtatgaattggctattacattggctataaatgatttggagctaatagtgggctgtactattaaacttgctatatcccttccctttcctcccagtcccagccaggttgcttctgatcagtcaccataccataatagtaggcttaaacacctagcgcatatatatatatgctccactgatccagtacttaaacactaggagcagtagcttaaacacgagggtacactcaggtagtgtctagtattgcaccggtcgccctctcgcgatccgagcggcgaggccacacgccgatgtaaaaccaccccaattctgcacgggaaacgagcacacccgcaccgtgcgccgcgatcgcttggctttcacggtagccgcgcgcgcgcaccaaggggaaggcggaaggcagcagcaaccagcaagtcccacgttttttagccgccgggattagcgcggcggagcgcctagtcggcacgccgctttttctactttaaccggtgaaccccccacgtcccccacctcgcacggtgcgggtcgcaccatcatcacggtcgcacggagccgtcggtggggagaaaccaaccggtcgggccgcgcgcccgtgaaatccccgtttcagtggaccgtgggctagtcaccaacctggcgcaaccgggccgcacgcccgtgaaaccgcgtgggctactcgggcgaaaacctggcccagactggcgctgcgcggccgccgatttcacagcggaatcggctcgttttcgcgaaggaatttttgggccggccttctcgcacctatgtggctgggacaatcgcacaatcaatggaccgctactcgtctgatggaggagtgcacgaacgcgaattatttctgcagtgcagtagattcgtcaaggagagttttttttttaacacatatcagacgcagacgctcgtaacacgtacacactcaaacatcctactcatataagtactttcggaaaactaggtcgacatattttgaggacgaagtcactataggcgtctcgctatcgacaggtacgtctaccctaccattgaaaaaataattagccgaacatatgtatcaattctagaatttcaatccgggtgaattggttccaccacaatgaaaaaataattagctgaacatatgtatcaattctagaatttcaatctgggtgaattggttccaccgcaagtaatccaactagtcgagctaagcttaatctgcgtcaaggagagagtttttttttttttgaggtaagtcaaggagagagttgatggagctgccacgagaatacgctcttctgccagatctaacgtaggggggaggttcaccggagcagcggttgcgccatgctctctcgtggacgagggaatcctgcccggccatcacgtatggccggggtacgggccggcagaatctcgccgatgtcaagcgtgtccaaccacaagctcccaagaacgtacagcagcaacgcaacgcaacacagacaggcgtccgtgcctgcaacggatggaatgtgcgttttcttctctgccacacggacaagatattacgctctgcccgtactgtaccaacaacgttgtcaatcttaccgttttattactctttattggagtgtagaaatcaggtgatcaaacagttattcagcaagtgttagagatgatgtgaatttaactagtgaattgaattggatatggcagacaactctggaatcaacagatggcaattgtcatagaagatagttgaaaaaattgaatgcgttctttacagtttcagggcagaagagagtagacacatggaataggcctttgtcccagaacctccttatcatgattcaaattacagatggttcatgtcagaaataatggaggagcattacatgatcatagagcttcattgctaactatatcccatatttatatcattacgtagtaacaccataaaccccaagcttgccaggacctttggaacctgcagattggaatcacactaatcagatcaaaacagagagacatgctagatcaaggataattcacatttgagttgagttgaaaatttggggatcaaagaaaggtatatacctggcatgaacgaactaacatattcacccaactttacatttcaagcacaatatctggaaacaagaaaagttcatattcagtcagttgctccattgacaaaagtggcaaaagaaaaggttcaattcatgataggcaagtatgctacttacactctgaatcagttttgacccattttgcaccatcatcgtctagatcacgcagtgcatcctccaggcactcattgatttctgtctcatctggcttccagtccaaatgcctcttagcaactagcgtggaagaattttgcgggtgtattttcttctgcaatattgccttgagcaactgcaatgaacatcatataagataataagaggacgagaaagtatgtaaaacttatcatgttacataagaaaaaaagaatttcactgtgtaccttctccattcttgattgaggaaatgtgttccttggttctggaactacggaggtaaagccacccttacacatgaataacttgagcaacgaagcgactgatctcggcttgagtgtatttcctttctttcctaacgaattctttgatttacttacaatgatccttttgttgatcaactgtctaatatgcttctcattgtcttccccatcggcacgcttttgtaaacctacttggtcatcatcatgcgagcgttgagcttctgcttgatctttgattgctagtagcgtttcgaattctttccgtatcttgtctacttcttcctctgtaaatttgacggtatcttgcactgactgcacattgtcggatgaattctccacctgagctacctcctcaatctgcttatttccaaatgtcccaatagcaagcaatgattggggccaatcactgaattcatcctttcgacaatctgacacgttagcacctgcgcattagaactcgattaagccgcaagatcagtaaacaaacataaatatatggtcctaagttcatattagcataaattggatgtctagagcatggaccacaaatttttaatccttaaacacccagtgattctcattggcctatcactctttaagtacaatgtctgcccatgcttactccactccctgatgttttcacctgccatttttctgtataccaggaataacttatcacagcagttgttaccacttaaacaatgcattctctgtacaatagtagtctttttatgtaatcttgagagataaataatgtactgtagtccagctggactagtggctcagatctgattccttagtacgatttacgaaaccatccgaggtcaggatattgtctgctcaaatcaaattcttcttggtcacaagtggagggttggggttataaatcaactaaataattgaagccatactgactagttggaaacacttgcttgcagggttgcacttagtcaagactttgacccatactgactagttggaagcagtgctttacagagatattggcgtggcgggcatcaggccatgaaatagtcctttgggggtataacatatgcacaaaaatctctcacttttcgtgctagggaagaggaaaataaaattgaaaactcctactgaacttaaagcgccgtttaaaatgcaggaattttttttccggaagtgcgataattgaactgtttccagtgaaattcctgcgttccaaacaacacccaagtgcatataagaaaattttctcaaaggatcagaaacaacattgtcataatacatcaatgtttgctccatcacattggcgttgtgataggttactcaggaatcaggggatggtaatccagaaaatcgcagagcgaaaagcgttctgttactagcaattaggagaaacctttaaatcgttcactcttgtatatggctaccaagacaacaaagtatatcagcatattcagaaatgaacatggcaaatgatgcctaagcggaaactgctaagaggtaaagacaccataaatggagcagaatgacagcaggaaaagattaaattaggacaaagcaataaagtatcatcgtatccagaaatgaataaggcaaatgatgcctaagcagaaactgctaagaggtaaagacattataactgcagcagaatgacagaaagaaaatatcaaattaggaaacggcttccaaattactgtccgtactctccctctcccctcaaggaacagggaaacatttcataagaacagcatgaagcctggtgaacaacaatcaccttagttctgaaagaatttacaaggaaactgaaagttcaggtacactcacggtaaggcgcagaagaatttgcgggaaaccgatttgcttcttgcttcccactgatcttgttggctacccagctgaaaatctgcagagaaaacccaagcctcatgatgccatcaagaaatggatcaacactaccaacacttcaaatctattaacctctctgaaatgattaatcacaccgatggtttgagcctttaccttcatatcctggcctgaagaatgagagattggggagggagaaagcagctagctgatgaagctaccaagaaatgcaagctcctagcaatggcagagagaggaggaaaggagagatgtaagacttgtagtggctgctattggcgatggaattggtgcagagaagtactactagtagcctactgggtgtgatttgaaggggttcaagttccaaggattggagggttcggtgcagcgtggctggctgtaggatagcttgctatacttcatctggcatgtcacttcctttaccttccttttatagatgactccaaaccgggttaccagctcaacaggtgagccatggaatgataacaggacacagctatatatataaacaatggaatttgcactttcttcggaagagaaaattcggtatttgcaactccagctaccgtacgcccatatgcgccatacggattgtaaatattgaattgatgtttctagatatagatagtgtaaacttgtgatcgacctcacacttttgaggaacccaaaattgtggtagctacacctcaacgggggtgcttctaccctacttaaattgtagagaagtttatggtacttaagaaagtacatgcaggacttgtacgatatttcgagacacctactagagatattaagttttacgataaaaaaccatcatctcgatataccttcttaagaatgataaaactatctgactactctctctgtcccaaaatatagcaatttttgtgtgtccaaattcatagctaaaaattactatattttaggacgaaggtagtatatcgtgagatcgtctagtcaggtgttcaaaaactcaacatgtaagaaaattcccaatccatccctagaagaagctataatttgacggttcagctgcaataagtagggtgactgtagttttaaacagtcatattatgttcgccagatcaaaatcaaaggactcagatttacccaggtattgcagactgtttgaataccgtgcactggttcgcttgcactgcagccagcgagagagtatccaaaaatcaatgcctcaaaggaagaaacccggttgttaatttttttttccagggggagaagaagagttattagctaagataaagtacagcgcggcgagatcgacggcaagttggggcaccaagtgtcacgaccgcgccgcaacggatcccatcgcacttggtcgggcccgacgcgtgtgccagaatcacgtgttaacttccttaaacccggcattagcgcgggtaagtacggggcgcccgccttggttaaccagcacgaggggcgcctgcaccgatgctaatcacgtttctgggggttaactgctgaagtacacccccatctccactagcagctattccgtccattaactacgcaataatggtactagaccgtggatgcacctggaccaacaagctaacatgacatgatagtgctatatatatatatatatataatctgcaaaactaaaattacgttgtggcaatacattgtaacaaaaccaaatttatcagtttagattagaagcgctaacgaaaattctactaattagatatctctagtcaatttctaaacacacattcttatcgctacgtgggtgagtaggggtggttattcagtctgaccgattaattttgtttggtttttcggtcctctcaaaacttcagcctctaaaatcaagatcgaaatttaatataaaaccgtaaaacctaaaatattctatcatttttatagttcggtcttcggtcatggccgagctgaccgatcaatttcgatacatgttttgagagtaaattttgcctgcaattcctcaatcccacaactgtagttgtcgttctcctccttcaggcactctccttcagcggcctggaggcattgtcgccagccacctacaagctagtggagggagcggaggcacaagatgggaggagagtgcgactgtgctgggacttagccagtgactgttggggaagacgagctagggataaagatgaaaataaggtggtgcttgaaactaataaagattaagattaagtaagagcataaaaaaaaagaaagttactaatggttaattaagttttaattattactagttggaaaattgatttagttaatattttagagcaatttctatgtagaaagtttccgtacgaaacgtacctttttagcggtttaaaaagtatgcgaacagaaatcaaaatatatatctatatcttaataaaaaaagcagggtaggtttgcttggtttcgtgctatatttctgctcaatccgtcaacggttaactgaggccttatgaccagaatttcccgtattagatttggttagccaagagcacagaccgaattctttaacgggaatgctacgggacgggatactgtcccccaacgggatgctcctcctccacaacacgattctcacccatgcgacgcggccgaagccctcaacgcgcaccaggcctgctcacccgccgccgcggccgtccctcgccgccatcgtcgtccccccccaccaccgccgcgcccatcccccaccgccgccgtcgccgttccccgccgccgccgcgccgtcccgtgccgtcctcgtctacaggggacggctacagtaggccggccgcgcgcgagtcgggatgctccccaacgggatgcccagctatatctagtaggaatcacctgatacctggtaggtatcatccgatacctcgcaagtatcacgcgatacatggtagaaatcgtctgatacctaacaggcatatcacatgatacctcgcgagtatcacgcgatacgtggtagaaatcgactgatacctgacatgtatcacataatacctcacgagtatcacgcgatacgtggtagaaatcgtctgatacctgacaagtatcacatgatacctcgcgagtatcacgccatacgtggtagaaatcgcatgatacctgataagtatcgcatgatacttgcaagtatcacctgaaacgtgtgtagaatcgtctgatacttgaaaggtatcacacctgatacctactcgggatcatcccattcgaaaacgggattccgttatatactacccccattctttaaacatatcttaggtttggccagtggggcgtatgctccaattttatgatattatatgatcctaccaaaccaaaatgatactgattctatctagtatcctacttttcatagtattttgatctttcttttcacacgatcatacgaaatcttaggtagtataccgattctacgatccccacgattctataaaatactatttataaaaagatggattcaaaataatatgaattaatatggttaagtttacataaaaccaattaaatttatcaaaattaatattatatactttaatttatacaacatattctatattccatataaaagtatatactttctaaattctgatagtttcccgattttatgatactacagataaaaaatgatactaccctcgatacttatcaccttcctcttaggcctagtttagttctcaaaaatttttcccaaaaacattatatcgaatctttggacacatgcatggagcattaaatataaatttaaaaaataattgcatagttaggggggaaatcgcgagacaaatcttttgagtctaattagtccatgattagtcataagtgctacagtaacccgcatttgctaatgacggattaattaggctcaaaaaattcatctcgcggtttccaagcgagttatgaaattagttttttcattcgtgtccgaaaacccctttcgacatccggtcaaacatccgatgtgacacctaaaattttttttttcacgaactacataggcccttagccaagagatcctcaatttgttaggcgcatactccattttgtagtagtacaacatgcgtacagtcggaatgtcgattacgaatctcacagtacgggaagaatatgctccgtcctttgcaactaacctgaagatccttcttcagagagagctttcaacttccaagttccaaagccccctggcataacgcaacacaccaagctactgctgtcactgcttcctctccagatctttcctgcaacctgtacttccagacagcaacgtaacccccctagctgcaaacagcggaccggaccgcgacgacacaccctgctgcttgctatgtgggcatgtggcgcatgaggtcggcatccggcatattatccttgttcgatccccccaccacagtactgtacagtcctactacactcgatcgatcagtccagtctcctccatctatccatccccacatgtacgtcctctcgccatcgccgtctcatgttcatgccatggacaacggcatccgtgcgagcgagatccatgacgagacgagagacagcttgcccagcttgtgctcgcaccgtcgtcaatttgcgcaagtctgccgtgccggcctgcaacgtgtgcttgccctgcaaaccgctagcaaacgactactggaagagtctccttgcctacactagctttgcgtacgtgcagactggataagagatgataatcaactagccctgtcgggagaaagaaggcgtaatcgatgtactgtgatgtggggttcaggcgagaaagcaaccgtaaaactgtgggtgctcacaagatgttttactatacaggtttagaagaaaagagagggctctaaggcaccatgttacatagtatagacgtcggatcacctcgtggcccacggatgacataacaacgcctacttcccatattctgccggtatactctgaagatagccctacacctaatagtgaaatacaggtacacagagaatttggggatcaatatcagcttggatctcccacgagcaaattcaggcatcaaattgaaataaccctgtgacggtccatgagtggtggatggatctagcctctaccccagaggtaccaaagaaaggcttgtgcaactttatcctcctggcataatgggagttttggaaggagcgaaattagggagtgtttagacacaaagaactatcggcaacatacttggttgcaaagatcaaagagaaggcaaagacttggaccatgacagaagcgaaagtactatgtaacatagtgccttagagcgctttcttttcttctaaacctgtataaaactattcatgtacagttttttcctactatattcaattaaattggcatactctaagtgccggtttgttaaaaaaaagatagttaactaattccctgatcgataataatgaatgcacaggtgcccccgcgtcgccctcccccaggcggctcaggaagcgacgcgcccaccgccgccttcctctccccgcctcctccgcctcgccgccgcctgagcaggcgccggcaaagccgcgcggccgcaaggacggcggcggcggggcctcgtctcgcccacgttgcgctcgaaggccgggggagctgtccatggcagcagtggtggtgaccagatccgtgccgtgtccggccagatctggcaggggggtggccggcggcgggggctgacggtggtggtggcggtgctggtggcggttgtggcagcgacgacgctggtggcggatatggcggcgaaggagatggcgacgacggcagcgggccgcggcgcgtgtcgcgacgccggccgggctcgtcaaggacctcgccgccacgacctccggcatgccgccctcgtcgacgctccctccatgacgctgatgacccgcgctgcgcactgcacctccagatccgcgccacccaggccggatctggccggctggcggcggtggcggatggcgacggtggcggctagcgatggtggcgccagtggtggtgatggttggcaggccatcacgaccgaaggggctgacagtgcgtcgttgttggcggcagcatgtggaggcggggaaggagaccgggtgtgggcgtgacgtcgacggcgagaagatctgtggcagtggcctaggctagatcgctaaagggaaaatgtagtcgaccggcgatgatccttcttgtgcggattggttgtgtgggtttggacagggaatcgctggcaaaagcctcactgagccgtttggctggctgacggcggcgacgccctttggcgtcgttcccctccctggaggcgtcgttttagcgtacccctctcctttccttaccattctccgggtgaaaaccttgcttcggcttccgaacgagcggtggcggcgatccacgtcgcgtcctccttgggggcaccgctttggagaaacttattcgtacaaggatgtcgttgattgtctatgcatttgcttcgaatcttttcagccctaggttttgatgagtcctttgctttctagctccaccttttgttttgcagtggacgacctcgctctttgtttgattttgctaggtggagtcggagctgcttcgtcggggtgacgaaactgggcaacgatgacacgttgcgttttctttctaggggttttgttgttggccgtaaatagattgtggcgcttaggcggctttggctgatgttcatcgtgggaagtcgaagctacttgatcatttgcagcatctaggtttagatggtgcatccggtttgaagtaggagctgccgtgtcgcgtggcggcaagctcggcaaagatgacacggttgcaaagtcggaacctcctatgttgttttggtcaaccttggtaacgacatcctacattggactctgtcagtggttttagctgttagtgagttcggtggttggtttttcttttcttgtaacccgtctagggtttttactcctgcttattgaaaatataattggcagctcccctaccggtttagtttaaaaaaaaaagataataatgccagcaggagctagatgatgatcgatacgatacctctcatgggaaaagatcagatcattccacggaccactgtttggccactgtttacaaggccaatcttgtatcatcgattctacctgccgacttcagagatcgacgcagctcagcctcgatcccaatcactgtcaagtcagcgtggcgactgatgaggagcaccactagcactgttccatttgtaagtactctgctagctactagcacaagcaaagcgatgcagggatcagctagggattcgtcagcttggccgtgctgataatataggaaatgcccttggtttacaggtctttcattggacgcaccggcgacggctttccccatgtggtgttcgccggggttagcgattttgatacatatatctggcaggtgaaggtgctgcgccgtcgagatgcgcgcgcggcgacttttcggcgcgtcaaacacgagaagcatatagaaggaatagaatagttacatggagctggtctttagccaaattctcctgaaatgggaaagcctatgggagaagcgcagatgtcaaccatcgacccttgcattatttggaaaattctaagcttagggctaatagcagtaggagagtgtggagtgtggtatggtcgaagcgtacaggccggtacatgggactgatggtcccatggctatggaggtctaggctggctttttctagcaagatatcatattattgtacaagcttcagctctcaaagatgggtggagatttggtggtcctgaaggaatgttcatcgccaagaatgcgtttttagtaggactagtgttcatcttgcctgcagcttttgttggcacactgcctgagttgaaaaaaaaaagaagagcattttgtgtacgaagtacagagcacagtaatttgtaaggttggacttggaggttgcaatggtcatatcttatcctccaaagtgagcggactagacatgttattctgtaattttcatagactgtgcatgattaatgagccaggacatgttttctcaaacttgctgcaattcacagatcatagctaatgcaatgcatcctaatatctctttaattaaccttaatagctattgtttgatcagaaggtcaacagagaccgatccaagtttggattgcattatttggtgtttccagtgcgatatcgtggatgagaaaataattctgaagcaactagtgtgcaagagttaagaactaagaaactgaacttgtagtttcagactacaagcaccttattccagtagccctcaactgggttaagcagacctttatgacagttcactcactatcagcacattagctatggatgttcagatagcatcggcactaaagttttttttaagggatgcacattagctatggatgttcagatagcatcgatactaatgtttttttttaagtgatgcacattaactatggatgttcagatagcttctttctattaaacatgtgtgctaagtttacataatcatgtgcatattgtattactcatgtagctggtgggtgatggcagcaagaacaaataataaatggatagatgataggaaataccaggctgatggtggatctgttcagcaaatcgagtcatgggctgatgggtctcccttatgacacaccttggctgaattttgctacgtcttcatggctctttctccttgaccagctgctgcacatataagcccataaaaaaggctaatgctcaaggatcaagaattcaagatatccaaatatacgttgagaaaaaaaaaaacattgctccacatgattctaccttgttttgttgaatacgtacatctatttctacctatcaaacactggattggacagttcatctggcatcaggaattttgggggcagctaagttcatttccaattgcgattatcagtacattgattctgaagcttctagctgcagacacttatcagcatttacctgaccacattttatcgttatcagctatcacattatatcaagttatacatcctctcatgaatctttatccctgtcatcgtttccgaaactataatactagatatttgagtccattcctattatattcagttcagcgatctagtgctcatgaacaacaaattcatctaaaatattggaaaaacaattgtaccccatccctgattcatctaaagaagtggggaaggagtcacctcagttgagcccgaagacgaagaggaagagaggccgcggcaaccaccgggatcgcgactgcgatgggggcacgttgagggctctaccatctcctccagcaacgtgcgagcctcgcgaagtggctccacgctccctcgcctccggattccggcgccatcgccgatgtggggatctcacatggtgaagaaattctccaagctcgcctctcatggcgcgatgtctgaacaccggatgcggcggacccgctgctcggctatttccgaaggcggccgcggggtgggttgtcagcgagtttgggcgtcatggcagtaagagaaaagaggcgccatcaccgggaaaagatcagagcgccggcggcggcgacgacgaagacgacgggaagggcggtggcggcagaggcggcggaaggatgctggcccaaccaatacgggccgcacgtacaccaccagcccgttacgaggcccaatttccatatgcagcacgttacaccgtaagcccgtttaggcccaactaatatgggccgcacatacaacataatccccatttggcccaaatagtatgggccgcaagtatagtgcaatcccgttgcagcccaaccagtacggaaccgtcactttcctacctgagagagtcggagattgtgcggtgcaaatgaaccgtccgatccatcttgtgcggtgcagattgaacaaaggagaggtggcggattactgcgtatacgtattaccgtttgccccctctctggtgcggggtcgatgggtcccacttgtcggcgagatggcaagaacggggcctctctgtctcctgctcgagaatccgcggccgcggctgccgctcgccggagctccgccgacgatccggcggcggcggctcgagtttcgtaggtgcttcaactgttatcgtcctccggatcacagacgttgtttaacatggtaccaagtttgcgaagcagagttccctaaaaaagagtgcgaagtaaatcaatttgcagaggaatcatcagactgggaggaaataattgcgtcgatagcagttcagttctggtttgtttgttggtctgttgcgttcagtgtttcagacagtgtcaattgtcaagaccacatgcctcaaatgtcaggtgctgttgataatcttcagaaccgctctcccctctttcgtaaagcgtaaaaaatagcggcacttggccatgtgttatctgtgattccactaaactgaaagtgaattgtatataatcaacactagttgatgaagtgtttcaactcggcttacttccagtggagcacaggaatggcaccatggttgtttatttagttcatatcactggatatctggatcaccaggcactgttcagtttcagtacttcagttcagatatgcagagttgcagactgaataaatatcgtcttacctagttatttacatcatagatgtttcttttgacatgatcagaaggtgcttccatggacaacacatattctaaatctggagctcacatcgcatgccatgcacagttttcgggaatacgcaaggagcgcatttttttctattaagagaaataaaagttatttacaaggataaaaggaaaacaagtaagggaccaatacaggacgctatggaaaactataggaatatctcgcgctaaatttggctaccacgacctcataaaggccaaacagcggggatcccgtgattagccgactttcaaagcatggcctcctccgccattgctttcaccacttcggtccaagacctttgttgttgattgaagattcggttgttccgtttcttccaaattgtccaagccaccagtatcatgacagtgtcgaagcctcgacgatgccgctccccaatcttcattcggctctcacagagccaattgtggaaggatgactcgttgacaggtaatcagttcagactccttatcgcctgaagcgtccaccaccataattgtctcgattcagggcatgctaccaagatgtgatcaatgctttcctcctgctgatcgcaaagaacacagcgatccgggtgtggcaaccctcgactgcgcagacggtcaacggtccagcatctattcattgtgaccaaccacaagaagaagcggcatcgaggcggagcgagtgacttccaaattggggtggaaaggaaggtgacacgacccaaaaacaaggccttataggcagattttgagctgtattggcccgaactctcccatttccagatgattgaatcaggagtagtaggatcaagatccaccatttggacaagcgaccaaagctttagatattctagaataggttggatcccaagtgctcctcggatgtctttgatccattggcgacctgttagtgcctcagccaccgtccgacgccggcgcacgcatggtggaattttatcatagatgttcggagcaaaggaccgaatgcaaccctcttgcaaccagctatcttcccagaagaggatagtttgtccgtctcttaattgatagacggtagaggctgcaacgaagttcctttccttttgcgaccccggaatggctagcccctgccaaggtttgcttgaggaggtccattgcaaccatgtccacctggaacgaagagctatacccataagctccagattcggtacacccaaaccgccgtagtttttaggggcgcaaactctggaccaagcgaccctgcaacaccctccattagcttgcgcagttactcagttgatgcatgcaaagtgcctctctggctggggcccgggggagtttagagtcaacaaaattatgatgcagctttagcgggcaagcatttctcatcagttcatcaccaaagagatcacagatcggcactcgcctgagctactgtatcactgtgtgctgctgaccattagtcaagtggcggctcagtgcagccaccgaaaggcttcaagattcaagaaaccatcagcccacagaggtaaagggagctcatgctcatggctgttactagtaacttttttttaactcatagaaagaatagacgctgctctgctcagtgctcactcggaacaaaatttccctttgctcgtgatgaagattctgctctgatcatgtagtgccacgaggttatcggatgaacaatcatgtactaggatgtatactctatgtacatcctgttcagagttcagacatggtgagcacgcatttgttttcatgtgcctaatcaaacatgaaaattgggagaaccaaaagatgacttgactgttcaccatttggaactggggttccattacgaaaattatatatatatttaatataatagttagtttggaccatatgtctgaagctgcaaatgtgcaaacccttgaaaggattagcaatttatagaactaactagatttctcagagtatcagaatatttggattaatcgaacaggccctaatggacttgtgcaatttttgtttcttcgtacacatgtaacctgtcatatagttttattttccatcagaagttgatgcccaattaatcacatgacagtgccattttctgaagtctgaactgaagaagaagaagaacagagattcgtatcagccaggccatttatgcgagaaaacaacatcaaaccaccaataattcacgctcgtttgttcgtttgcacctttcggatggcatcggaagccaagaaacaggcccatcaagagatgtccagctcctcgcatttataatctcttggatagaaaccatggaaggtgccccagctgttcagatggcttgtgatccagctgctgttggtgccactttacggtcaaccacgagcagtggtcgagggtgtcgttcagtggcagtctttctccaaaggcaaggtgaatggcactttctgcactgcagaagtgcagattggtggatgcttcggtggtcatggtgcactcaacagggcatgtgaccttagctgcatctttgctgtgaaactgtactaaaagcaagtggtttgttttcttctatcccgggaggcatatacctccttgacacgtctcctttagatccaagaaacatttcttatgagatcctttggaacaaaccccaattctataggaaaattaacatgagctcaaaccttatgtttgtttttttccctttgactagtaacatacctatgcattgcaatgggctaagacaatctagcataaagcagtgagctttttttatccaatcacttttcctctttttttctattcatttagcgtgtagcaaccatttcttttctctaacgatttttttagcgtgcaacaaatgttttccttttttttagcgtgtgctacgtgcgagggggagtggggggggataaagatgattgtacttttatagtagtagagataattctaatgcactctctccatttatttctctaatttctctttttagcacaagcaagttgttcaaaattgttgtatttatttcttgcaaaccatccaaatgaaccaactctaatatttatgtgctttagaatcatataggattctgaaacacatgaacattctattcttgcattgtgtttcagaatcatatgtcagggctcctttcaattggagtattttcgtagtagtttttctaactaggttgtttgggatgttggattgaaagttgctagattcttggattgcatacttatacctcattttaattttcctttgagaagcctaatacatcttggtttctctctctctctctctctctctctaaaatccatccaagttcatgtgttatttttttctgaggtatctaaacaattaatctttcaaattctcgtgttttacaatattcatgcgagatatgctaatatatgacatctcattcattccaaacaagccccataactcgagtccgtgcatctaaaatacatgcctatgtcatgaagatttggtttagtagtgaaacctaaatattgctacaattaataataatcagagaaaaaaaggaaaataagtggtggtctaaaattctccgtacaactgattgaaccacgtggtgttttataatttgtccaccgtcacaaaagttccataaaatagaaatgaaaataataaatagctcacctaatattaagaagctatggtgttgtgtaatacgttactctctttctactctgtataagaagtgaaaaaaaaacaattggtgtagatttaaggtggtttttggcaaggtgaggcatgaaagggggcctgtggatgtgagaattgtcaagtgggtgtgtattatatgaatgtttatataaaaatggtcaattggaaggttttatatgtatgggaggtgcatgcacatatttgggtttgtacaattgtgcacttcaaatgaatttgtagaagatttatagttgcatagcacataggaaaaaagaacacgatcatacccatacttagtcccagtttgattaatctgaatgatgctagattatctgattttatggtaatatttgagggcacaaatgaattaattaactattataatttgaaaaaacgtttttaaaaaacaattacatgaaacctatatatagaaagttttcgtaaaattacaccttttaataacctggatagcatgtctgtgatagttcataatgtaaaaggaaaagaaatgagctttaaaaaggataaaataacttatttacaatgtacaacaaatatctctgtgcttttgagggcacacatttttatgaaatgtacttttttaagtacacacgatttttttccatttcagatatttctttgcagttgcgtattgtctaacacgtactagtatgttaattgactttttgagaagttcttaatagtataacaccactgtcaacttctcgtattcaatacgagcaatgagcaagaaagaaagtacaagtacaccactcatcagcccaacaacaaaaaggaaagacagcaaaatacagtagacaaccacgtaccagctcactatctccatcacaaacgttgaaaacgtatagatacaacctacaagtcgtgaaataaacataacccagctggttagattttctctacaaaaataaatcactcggagttctagataatgatgctcgaactaattgataagtgtaaagatattgtgagcaactacaattaattgcatcatggtaaagaaaaaataactatacaattatacaaccagccaactgtccacctaatgctcagattaacactaatatcatctctactggctgccattagttcattaggtcccccactaatactgaccaccattaaattagagagaaaaagaaattaaaaaaaaagaatactaagaaaaatcaggctatccgaagttcccaacggtcacctcgtcgtcgttgccaaatctgccatgtcgccgccatggatcccctaatcgaggacccccccaacctagcggagacgaagaagaacgagaagggaagcccaccgcgtcgccatcattaactcctcctctcctctcgtctccctcgaaagcaccaccggatccgacgaccccctcctcccctttctcccctcctcacgaaaccgcctcgccttcctcttcttttctttttcgctcgcttcgcatcgctcacatgcccctgcctgccgccgcagacggggcgccatgtcgcgtagcggggtggaggtggtcgtgagcaggggttgctccaggctcgtcctccccgggatgcagccttcctccgcctccgccgcttcctcctcctccttctcgcgcggcggacatggcggcggcggcgaccggaggccgctgcccgatggccccttcgccggattggtcatctgcgtcaccgggctatccaaaggtgcgttgcttttttgcttcttgatttttttttggcccaaaatggtgaaatctctgctgtagtattgatgaggtgcgcttctttttttttgtgtgtgttcttggtggttggggatttgtgttgtgtgcagaggcgaggactcaggtgaaggaggcgactgagaggatgggaggcgagtacagcgggagcctgcatcccaagtgcacccacctagtggttcagatatccttgcaaagatcatggattatggtagcttgttatctcttctcttgggtctcctgctgtttttgtttgtcaaattcaggacggcatatgcttttccttagcgcgcagcacagcttcgccggccgcaagtttgagcacgcggtcaagcatggcgcgaagaatggcctctttgttgtaacacttggttggcttgtggattgcgtgcggaggagcagtaagacgagtgccatcctcttctgtttccagtgaattgtggcggcatcgtgttcatgttacggttgtttctatcgcagtgaggttggatgaatcgttatatagcatcaagaacattggggagaatggaatgccactcggggagttcaaccggcttgtcggcgctcctgttagtgggaattcttgccttccaccgatgatgtttcaggaaaaaacattttcagacacgaccgaaaagcatcggcttcagacatctagaaaagaacatgaccatgatgaatttctctttacaaacgactcgatctacattgaccctgggatatctggtgaaatgaggaagaaggtatgccccgctcttgctgctggattttattatggttggccttccaagtatagctttcggacagcaaaataggacttcaggacatttctcacgatggaacgttgtagcagagcatcatgtggatcaaagttttgctaagcatcgtgttaagagcaatgcaagttagatcgtttgatgcgattgtttccctctgaatttctttagttgacaaggataatttttattttccataccttcccctttgcccatcaatacaacaagacatctcttggtgaactgcatggctacgtttacataaaatgcatcttgtctacaggtatctgatgctgctactagagaaggtgcaaaattgttggaccactggtttattggctgtcatgcgacatatgttgtgtgtgaggacgcttctgtcaagagatatgttggtcattcagacaacattgtaactgtaagcatgttgcctttggttctaaacttctaatgaagtttggcagattttgcttgtattaacattttctgcatttaatttgtcagccactttggatattgaaaaccgcaaaggaaaaaggtttgcagcgtcttgtccatttgtcttcggacctggctaggcaggttgccacgattcttgaaaatgcccagacatttcaagaggtatgacatgctatacatgtaccttaatcaattatcctctcatccagtatacattttgtattcctaaaaaaaattgcctttcaagagatttggaaaatatggattttctcagacctcacaagctcctagaactaggaattctcctgtagatatctttttcttgggtacttccccgctctttttttctctggaaggaaacgaaaagacagtaaatgttacctgacatattacatgagcaatcctctatcttcataaaacgttcctgaaataaagaacagatagagatgggcagctaccctcctgtaatgtatttagtgaagagcagagaagactggtccacgtagatgggaaataatggttctgtcaattttaccgtttcttgaatagtacaactgtacagttcttattatttatgtttagattccttacaactgtacaaatgtcaatttatgtttgtgatatgttcatttttccacatttgactctttaattcattcttggatgattacaaatgtggtattgtgttgaccttgtattgtctactgttttagaatagaaaaattggggatgttccttctgtcaattcaaactccagtggagtaccatcaacccaaggggagatagatgaaattcatcaagagaggcaaaaatttgttgaagtagcaaagaaaaatgtccgagatcgccgtgctcgccgtatgcaggtaagggttgttttacctaccagagcagtttttttttcctcttcatttctagatttgagaacctgcaggttcctagttgcgtttatatttccagcatcactgcaacatttatttttccaaacgaaaaaggttccttggattaatgggacataattccgtaccagcgcatctgccttgtgtttttggacttgtttctgtaatacaatgccatgaaattcatcttggcatgtgtatgaaactatgaaccaggaactagaacacaatcaggacacatttcattatctgtagtcccttattacacaattgtgtacatataatgtataaaaacctagtacttttgtagaattatttggttcttctatattatataaagtttttgataaaatgtctaaattatggttttaagccagtcatgtgaagtaccaatccatccaatcacgcctgtgaaacttatggaatcaatctgttggaccgtatctgagccaactacgtccgcatgcatttatacggagttttcatggtcagacgatgcctttgagcaacaaagcactactttcttcgatgcgaatggggatggcaaggatgatcagtcaagcgatagtttcacccgcccactaagagaaaggtaatcaatgcttgatcttggtcaaattctttttaactgttgttctgatatgcttgtgttgttcctttagtgagaagagtgaagtgatctttaagaaccacttccttaccgtactcttccccattgatcgttttggtgagcttggaccttcctcaaggacattcttcagcaatggtggtttcacacgcatacaagtgcttgatcacatctacaacttctaccaggtacaatcagtatcttgttattaagtttgttgaattgagtgcaatactgcctctttctgacagaactcttgaccaatttttacagtggcttagattttgtgtttagcttgtaagctaacccataattatctttctcgtttgtgaaggaaaatatgtcttccgatgagataaatgtagccctgcaaacggattcacgacatgctgatcgacttcgctcgctgtacgcaagtactgaatcagcagaaagaggttttgtaacattcaaaagaattgattttttgggaagccgaagaagttttgaggggctaaaacgcctcagcagagagaacaatagcaatgtatatgagcttgtgattagggcataaactgcaccatactcggtgttatttagtcaaatttgtttgttgtttacaggttgatagtgatgtactaccatgtatgcacgccgaataaaattgtaggagataatgatatatttatagatcaatgaaaaagatcatgttgggcagttcagccgcaatacccagtgatggacagtagtttagacaaggctgcagatctgttttcgactgttcatcagttcatgaatcattggtgtactaatctgtttgtcttcaaagggaagtggacattggtgtactgatctgttttcagtatg

SEQ ID NO: 7433 - DNA, 41366 bp, Oryza sativa
ccctctgcctgcgcagcggcagcgcgccggaggccggaccggcctactccagctagcaacggtgggggggcactgggtttggggctagctgtgttgtgtgtgggcgcgcgcacggtgcgacgttcacggtcggcagcggtgccgcgcttgccgtgggccgccgccgcgtgctggctagctgggctcgcagcggagcctgcctgatctagtggcagacgatgacggcagatgaaacgaagcgagaacaagtccactttgattccttctaatatgagtccacggataggatagtcccttaaaagcaatctaaactatagatctagtagtatttaaggatctctcaactgcaataacacatcaactattaaaatcattataatttaatttcctcggttgttttaaatgtggttttcgcttatgtggctagataaattggtctagccagctgagccagcttatggagcccacatgttagcagatctatatcaataggctgggtataatagctcagcaaggtcatcgaacttgttagggatgaatcggctctgcgcccttgtcagctagagactcttatcttgattatgtttctcaatacgtaggatgaatttgaacttgttttttatagtattagatgtcaacatactttatattgctaatttcccataactatttatattgaatttagaaaaaaaaaagtacacgaaggatattcccttatcatattagaacccattccccatcttattggagtggtggagttttcacagggaccatactatattggtttccatgaagaggtcaattataaagtcactaacaatgttctcagctcaattaattaaaccttcacccacactctttgactcttctaggcttactctaagaaaaagagaaagagaaagaaaagaatcagaaaagctttgccacacctcacaccttgtgtccttgtgcctcctacaaatagctcttgccattcagtttcctctcagcagcccaacagtcgtcttaaaccatccagctagaagacaacatcctcttaattccggccttaatggaggtagcactctgtgcatcctttgttgccattctgctaaccaccatgctcttcctaaaagccatctcgacgaggtgccgccgtcgaaagtataacctcccgccgggtcccaagccatggccgatcatcggcaacctaaacctcgtcggtgcgctcccacaccgttccatccacgagctctcaaggcgctacggcccactcgtatacctccggttcgggtccttccccgtcgtcgtcggctcgtccgtcgagatggccaggttcttcctcaagacgcgcgacgcggcgttcatcgaccgccccaggacggccgccggcaagcacaccgcctacaactaccgcgacatcacgtggtcaccctgcgacgcgtactggcgccaggcgcgcagggttgtcctcaccgagctcttcagcgccaggcggatcgagtcgtacgagcacatccgccgcgaggaggttcacgcgctgctccgtgatctgcactacgcgtcgtcgtctggcggccgacgagctatcgtgattaaggactacctgtccacggcgagcctgaacatgatcactcgcatggtgatgggcaagaggtacgtgcagggcgaggtggtccatgaggagccgggatcggcgcggacgacgctggcgcagttcaaggagttgctcgaagagctcttctttctcaacggcgtcttcaatgtcggcgaccagatcccgtggctcgagtggttggacctacagggctacgtcaagaggatgaagaaggtgagcaaggcgttagaccagcttctcgaacacgtcgtggacgagcacagtgagcggaggcaacgtgaggggaacgggtttgtggcaggagacatggtggacgtgctccttcgactcgccgatgattctagcctcgaggtcaaacttagtcgggacagcatcaaggcatttactcaggttagcgactgcatagcgtacatcgtagtactccctcgtccaaaagtctaggctgtttggatggtattttcagtacatgtcacatcgatcggatgcttaatactaattagatgtttaacgtattaaacgtagactattgacaaaattcattctataaccctgactaatttgtaaaataaatctattgaacctaattaatccatgataaacctatgtgatgctacagtaaacatgtgctgattggcttaaaaaatttgtcatgaaaattagctctcatttacgtaattaattttgtaagtagtttatgtttaatactccaaattagtgtctaaacatccaatgtgacagggactaaaatttagtcccggggtcaccactagtcctagcatggtttagtttccaactttttcttcaaacttctaacttttctatcacataaaaacttttccacaccacaaacttcttaacttttccatcacatctttccaatttcattcaagcttccaattttggcttgaactaaacacaccccaagactaagaatcaattaaatcactcacgttgtgacaaaaccaatgaacatgtaactaataagtactaaaatggtttcttggttctcatcaataatttaatttagcacataatgactaaaaaatagaacttagacttttagaaaaaccaaagaatgaaataagttttagacttttggaatgaggaaggacatatcaatcaaggggaatagacaattttgtcccaaatttcgtccacaggtcaatttggtggttgatttttcattttgtctaaaggagtcctccagatttgcgcaggaattaaggacaagctaatgcctaaccttatggtaaaatcccagtgaagtatattagtccctccatacttcctcaaatactccgtttcaatttacctatcacgttcaagatttgttttaagtcaaacattttgatctttaacttcaatttctacaaactcatgtagttttacatcataaaatttatacttttggattcatcatgagaatactttaatataatatataattcacatgttgttaaattatacggatttctaaatattaatggttaaagatagacatgtttgagttaattagactaaatctaaaatgataagtaatataaaatagagggaataatgaaaaggaaaagtcactccagcggtctcatctattcgttcccatcaggcttgctcaatgcaagaaggtgaacaacagtagccagtagttacatcatgttagggggggtacagcacacccaggaattatctgagatgttaattaaagtataagaacaaataagggcaaagttgaaaactcttttgttctctaatgaaatcatattagattacttccaaattactaccttcgtcccatattataaggtaataaggcatgtattttttacacggtctttaataacatactttgactattaatttactacatgttatgttctcaactatgaaattagcatcacataaaagtacttaaaaatatgaatctagtaatataacatgcataatataattagtacaattattaataaaaaaaattaccgagtttgattttctaaaaaaaacatatgtaatttggaacggaggaagtaagaattttccatgaggctaaatgttggttctagctttgctcacacatataacaaacttaaaaaggtgggaccacaggacctttctaaacctgcagatatagaattgtaggaatcattttatgaaatcccaaaagcaaaatgattacacggtaaaccttttgataggcaaaattaatcagttattctcctccaccaaaaaaaagttaattattctcccccaagaataagtcaagcaaataactggcttggacgttggaagttcaaaagttcatactaatatgctgtgcaaatttagtatatgagttgtgaagtgtaaatgactgaaacatactacctccattttttaatagatgacgccgttgattttttctcacatgtttgaccattcgtcttattcaaaaattttatgcaaatgtataagatataaatcacacttaaagtactatgaatgataaaacaactcataacaaaataaattataattacgtaaattttttgaataagacgaatggtcaaacatgtagaaaaaagtcaacggtgtcatctattaaaaaacggagggagtatatatgaaactagaatttcttacatgcatgacgccaaaaattattggcttatatataggagtaaatatcactataggtcgccgtgcataatattttttacttcagtgcaccctttttttcatagttgacaaatactaatccatttttttgtcaaaaaatattaatccaatttgtcttcacaaccaatcaatcacatacgtggacaactgcagaaaatgcacattttttttcaaggagaacacattacaagaatataatcaaattaagatgttacctcctccgtcccaaaaaaaaaaatcaaaccctaggtctgaatctggatatacatatgtccagattcatatccagggtttgatttttttgggacagactagtaagtcgtttctgagttaactagtccaaaacggcatgtgtaggacctcattgctggcggcacggagagttcatcggagacaatcgagtgggccatctcggagctcctcaggaagcccgagatgtttgcaaaggccacagaggaattggatcgcattgtcggccatagacgttgggtcaacgagaaggacattcttgatctcccctatattgaggctattgtaaaagagaccatgcgccttcaccctatcggacctttgcttgcgccacgcctttcccgtgaggatacgtctgtgggtgggtatgacatacctacgggcacgcgtgtattcgttaatgtgtgggccattgcccgtgaccctacgctatgggacgcatcggaggagttcatgccagagagattcttgggtaagaaaattgatgtgaaagggcaagactttgagctattaccatttgggtctggtcgacggatgtgcccaggctacaaccttgggcttaaggtgatccaattgagcatagccaatctccttcatggcttcacgtggaggctcccgaaggacatggtaaaagaggatttgagcatggaggagatattcgggttatccatgccacgcaagttcccactagaggttgctgttgagcccaagctctctagtcacctctacaaaggtgattgatatatgtctctatgtcattactcatgtagctggtacataaaaagtatatgtatttctgaacaagaattctaagccctcaagagatgttctattatgtgtatgatacaaacagtcatgaaagattctaaaatatttgattatacagagtacaatgatatctacaactccagaaaatttctagtctaaactcaatatatatgaagcgggaaaaatgaaggcaatcttagttgtatgtatcattcctgccatgccaatataggtgtggcccttttttctatagaaacacggttctaacataggcgctcacaatgtgagtgtactcacccttatgaacacatagtctctacccctatgagcacctccaaaagtctaagtcagcacatcttgcgattgataaagtcaccgaagacgtctcgtttgtcaatgggtatgtcgtctaccactgaaagaataattaactgtaaatgcgagtacccatgtcaagtccaggacttgaacgtagacaatatagagaagggtgatgtgcatggcttcccttctttcctccatgtctttatgccagaatgatgaaccttccaagtttgaatgtttacagactgaacctacaatacaaccttgttgcatatgcaattaatgcaactatcatactcatgcgaatggcctatcatttggtccacaaggtatatcttttaggttttcttccacatttagagaggtatatacctctcctatttcaaaggtaaaaaaacaaatcagttgaagtaaacagaagacaagtttatgattagcaatgacatgacttctcttgttgttaggaggtacatcaaggtatatatataccacaaagtgtaagtctggaggtatataccttaaaaaaagatggaaagtcaaaaatatacttacaccatactctattagttttggtacttcctttcacaaagaggtctatattaaaaatgaagagatataagtatgggagaaacccttttatttttgtttttaggttgttgtaccatgattttttttcttgtttatcatgttaggagtatttggccttttgatggattctatgatagtgcaaactgtgtaatgattatgtacatcctagttagggcagagattctcccatcctatatttctagttgtcatgcttaacaatatttcactagcatactttcgggctagtatatatgaaaattaaactggaaatcaagatactaccactactggagaaaccatctttcgtgggttggtaaaaaaccacaatagtcccgattcaactaaaaaccgggactaaaaatcatttttagtcccgatttaaaagtgcaacgagtctatatgatatttagtcccggttggtgtatctgcctcccatgtcctaactcggccacgatcttatctctctcgagaccaagcgtcttcatcttctctctcgcctctctctctctctctctctgtcctctcctctctcgcaatggggtcggcagtagtgcggggtgggcagcgggagaagaagtggcgggagatgcgacggcagccgggcccgtgccggtggcaggacaagaagccacggtagggtggggttggcggcgcctctctccgtcctctcctctctcgcagtggggttggtggcggccaggcccatgccggtggcgggagaagaagttgcggccgggctgtgtcgacggcgggagaagcagtggcggccgagctggggaggcggcggcctcgccctcccttccgccagatccggcaggaggggaggcggcggcggtggagcgactgcaaccagaccggaagaagattttttttttaggatttgcgatgaatttgtttttgagaattagtgatgtttgatctgtgatgtgaatatgtgatgtatttgtaatgttttttttaaaatttgtgatgtgatttttttgagaatttgtgatgtatttgatctgtgatttggagattatttggggatttcacgatttggggatgtagtgaaatcaatattcaagcagttaaaagcaatgaaaaaaagaaaaagaaactctataccaggactaaattaggagcactagccacctgtctctaccatcttcaccaactagaacttaaaaatagatctttagtcccggttattttaatcgggactaaagatagtcttggattcgtagtaccagtttgcaacttaggactaaaggggttgcaaaccgagaatacagaccacttgttcactggtgtttttttttgcttaatatagagtgaagaagtttgggaatctgtggattgaacgccggccttctcaggtccaggcggttacgtgttgattgatagcacacgaatcggtgcgagattacatgtatatatagcacaccataccagccgtgattatctaacaaattaacaattaactgcatcctaaatcacagccggcatagtatcctatattgttacaatacggactcaacatttcaggtagttcaacactccccctcaatctaaaccataaaggttaagattgtatctaaatacagctagctgtttctcattcaagggttttgtaaatccatctgcaacttgatcttgtgaaggaacatactctatttccaacaatttcctagatactctttcacgaacaaaatgatagtctacttctatatgcttagtacgagcatgaaacacaggattagcagagagatactttgctccaatgttatcacaccatacctttgctgtttttggtacttctatcttgatctctttcaacagagtttgcacccacatgatctcagctgtgacattagccaaagccttatattctgcttctgtacttgatcttgacactgtaggttgtttacgtgcactccaagacacaagattaggccccaaataaacagcaaagccaccagtggatctcctatcatctaagcaacctgcccaatcagcatcagagaaaccactgacaagtaaagaagaagactttcttatcttaagaccaagcccagatgtttgttgcaaatatctcagaatcctcttgactgcagcccaatgaactgtagttggagagtgtaagtactgacagactttattaactgagaaagaaatatctggcctagttagagtcaaatattgcaatgctccaactatgctcctataattggtagcatcattaggtccaagaacatctccctgatgtattgagagtttctcagttggtgacagaggcgtactcacaggtttgcacttatccatattgattcgcttcaatagatcttttacatatttttcttgagataacagaataccatcacatacctttgttgcttctattcctaggaaataatgaagctctcctaagtcctttaaggcaaaagacttattcaggtcctgcaaaagagctgtggtggcatctggcatagagctagcaacaattatatcatcaacatatataagaacaaatataatgacatcacccttgctgtagaagaacagagatgtatcagccttggaaggcatgaatcctagctcttgcagttttgtgcttagccttgagtaccatgcccttggtgcctgcttaagaccatataaagccttgtctaacttacatacatgattaatcaaggatttatcttcatatcttgggggttgtttcatataaacctcctcttccaatatcccatggagaaaagcattactgacatctagctgtcgaaggctccaacctctagagatagcaatagacaaaataattctgattgtaattgcttttaccacaggactaaaggtatcttcataatctattccatacctctgtttaaatccctttgcaaccaatctagctttatatctgtctaagctaccatcagcctttcttttaatcttatagacccacttgcaatctataatattattagctttttctgcaggaactaaatgccaggttttattacccattagtgcctcatattcagcatccatagcatttttccaatttttatcatttaatgcctcatgtaaattttctggttcaccagaagctgtaaagcaagcatatttaactgtaccatctgtgtataccttttctttgcggattccactctgtaagcgggttctaggccgaactatttctggttgatgctgctcagccacaggagagctcgcggcttcttcatgcgatgcagaggattcagagacatcatcattacctgccatcgtcgtggcagacggagactgatcactcggctcgttctcaacacgcgtgcctgaagttgctgcatgcgtgtcactaccagacctgcgcacacacaagggtgtcacagatcccggcgactgcggcgatgatggttgctgctgtgacagctgctgcgtatttgcttcatccacccagtcctctgcacctatatttcctgtatcttctgcatgctcaacagattgatcaggcatttcattaggagaattaaacatctgatcattctcaagttctcccccttgatgagacgtgtgaataatgagatcagagggcaaaagagagatctcatgacgaatacgtgcgccagcattgtcatgcaatttagaaaaaggaaatacactctcatcaaaaatgacatctctggatatatagattctaccagaagcaatgtccagacatttgtatcctttatggcggtggctatgaccaagaaatacacattgctttgaacgaaattggagcttatgtgcattataaggacgaagattaggccaacaagcacaaccaaacactctaaaggatgaatagtctggtgtttgtttgaagagacgttccaggggagactcaaactcaatgactctactaggaacccgatttataatatgagtggcagcaagaaacgcttcatcccaatatttgagcggcatactagcatatgctagaagagataggccaacttctacgatgtgcctatgttttctttcggcagagccattttgttgatgagtatgtgggcaggagacatagtgagatatacctattttctcaaaaaaggaattgagtttctggtactctcccccccagtcagtttgcatggaaataattttacgatcgaacaaacgttcaaccaaattctgaaaatcatgaaatttctgaaaaacttcagatttgttctttaaaagataaatccaagtgaacttgctataatcatcaataaaactgacataatatttcttatttccaacagaaactggagcaggaccccaaacatcagaaaacacaagttccaaaggatgactcgatatactcaaagatttagaataaggtaactgatggctcttggcctttagacatgcatcacaaaccggctctttattggactcatctagacaaggtaatttattcttgctaatgactctggagataatgggtgctgaggaatgacccaagcgactatgccatctctcaaaggatggcgtgacagcacaaactacttttgcagatgatggaggagatgcagatggaactggatagagtcctttttggcgtctccccttaagaaccgttctcctcgtggcctgatccttgatcaaaaaatgttttgagtgaatttcaagaaacacagagttatctgcagcaagcttatatgcggaaataagatttttattggcttgagggacatggagaacattattcagatgcaatgggcgagtaggggtatgaactattgaatgaccaatatgtttaatctccatacctgaaccactcgccgtgtggatttgatcatgtcctttgtagacgtctcgagcggtgagtttctccagttccgaggtgatgtggtcggtggcgccggtgtcaacataccagttggagtcccgtgcatgggtgtggatggcagcagcaactagcttgtcgtcggggacgaaatcttcatcaaatcgatgccaacagtccgctgcaacatgtccgcgtttatagcagacctggcacaatggacgattgtcatagctgcgctgctgctggttgttgccgcgtccacgacctggtgcggcgctgcgcccacgagttgcgccgcgtcctcgcccagggtttgcgccaccaccccgtgagccaccaccaccacgtccacctctgttcgccatgttcgccgtggcctgcgcctgcctcattgctaacctgttttcaaagcttaaaagttgtgagtagacttccgcaaccgtgacaggttcaaccctgccaacaattgtggagacgacggagtcgaaatcttcgtcgaggccgttgaggatgtaggcgatcagttcttcatcatccagtggtttgccggctgctgcaacttcatctgcgagggtcttcatcttgccgatatattcagagatcgacgagttgcccttctatagagtcgtcagcgccaggcgcacgttgagagaacgcgcgcgtgtcctggacgtaaacatgtcgtccagggttttccatgcttcggccgccgtcttcacagcagctacttgtgagagtgtctctctcgtcaacgaggagaacaagaagccgaggatctgctgatcagcagcgaaccattcatcatagttcgggttggaggtcttgacttcctttccatcgacggtcttcgtgatttcagcaggaggagctgggtttttcccattgatgtgcccctcaagtctggcgccccgaattgccgtgagcacctgcgccacccagagcccatgattcgccttggaaagcttctcggtgacctgaactccgatcaagggattggagctcgcagcggagttggatgtagatgccatctgggtgctcttttcagatgcaacctcttcttcagatgactcggatgcaatctcttcagattcagatgcagaatcgatttcttcttccaatcgctctgataccatgaagaagtttgggaatctgtggattgaacgccggccttctcaggtccaggcggttacgtgttgattgatagcacacgaatcggtgcgagattacatgtatatatagcacaccataccagccgtgattatctaacaaattaacaattaactgcatcctaaatcacagccggcatagtatcctatattgttacaatacgactcaacattccaggtagttcaacatagagaatatctactagcagtacccatgaatctgtcttgtgcacaaatatcagagtccaagaacgaagaaaaccttattatcaagcatattattgactcactcttgccctattattccactcttacaaagacagaaaataatgcataagcaacaacaccagtactaatactgcaggcttaccggactgcagcgacgacagatgcagtaacaactgtaatcaacagacatgcaacacacagatatacatcagcaagcagacacatagaggtcagccgggagcttgggctcgacgacaacctcgagcgggaacttgcgcggcgtcgacaaaccgaagatctcctccatgctcagctgctccttcgtcatgccgtcgggcagcctccacgcgaagccgtgcagcaggttggcgaggctcacctggatcaccctcagcccaaggctgtagccggggcacatccgccggcccgacccgaacggcagcagctcgaaatcctgccccttcacgtcgatcttgctgccgatgaacctctccggcatgaactcctccggcgcgtcccacagcttggggtcgcggccgatggaccagacgccgacgagcacccgcgtgccagcggggatgtcatagccgtcgacggacgtgtcttcgcgggacaggcgaggcgcaagcatgggcgcaaccgggtgcattcgcatcgtctccttcatgatggcgtcgatgtaggggaggctcgggatgtccttctccgtgacccagcggccgcggccgacgacacggtccagctcctcggtgaccttggcgaacacctccggcttcctgagaagctccgcgatggcccaatccacagtggccgatgagctctccgtgccgccagcgatgaggtcctgtgcacgtgcagatgatgagcaacgttggagtttggaccggtgaatcaggtaaagaaacgagaacacagtcacaaactgaatattttgatcgatggtaaaatagcgtgcactgcactcggcacaacacatcttttcataatcttgtgttagttgctcgggttgcagtttatgttatgtaatccatgaacaatgtgtttcaccttctctcttcttagtataatacagggaagagcttccagccacttgcttaagaaaagaaaagaaaaagctctgcacaacatatgattaattagctagttgcggagacaatcaggttaatatttaggaccgattgggcgtcaacgaagtcaagatgtagctagtgcatggttatgtacgatgatactattataatccaactgactttctattccccataaaagaatataagtaagtacacatgcagtatttaaatttgtgtggattgttgcgttcgccagcagagactgtgagtgagtttgtttcgttttccacgcgcacatttctcacactattaaatggtgtgtttttttaaaaaaattctatacgaaaattactttaaaaaattatattaatccatttttgaagtttaaaatagtttatactcaattaatcatgtgctaatggctcacctcgttttgcgtatcttttcaatctctaaactcctaaaatatattggtttctgaacttgtcctatgtattatataaatccaaacagactccaaactgcttcatgtgctaatgtgacataccatgtcagtaggacttacatgtgagacacatataaactttttttttaaaaaaatatcctctctcctctctttttaattttattttttcaagataaaaaaatcattttctcctctctttttaaaattttatcaacatatggatcccaccgacaccaatatggcatgtccatgacaaattcaggaatccaaaaattccttttgatagtttaagaatggggcaattgtgttcttatctctactttcatatctaattgtgattttaccccctcttttttctagggtttgtgattttgccctcatttttttctgaaggaagctgtcgtttgcccctacattggatgaccgtttggtggacccaaaataagagtgtaaaaaatatagatgaaattactaagagaaaaacaatggaccattataccccagtgcaaagaacaacaccctgcattgcctttttcatcccacccgatccccattctgattacttgattagcctaaccctagtggcaccgccggcggctgtgcacaggcgagataggccggcggctgggcaaggctgtgatgcccagcgagcagcagcagatgcccacatcagcaaagctagtagggggtgttggcgcagtgagcaagccgcggcttcggcggagcgagtgaataggcggcggctccgagcctccgacggcagccgcaagcaggaggcagcttcggcggcacgtgcgagcccgcagcagcggcatcgcacgagaaggcggcggctccggtcgtgctgcagccgcctcttattttctttttcttttttccgatcttgtgctactttgtgaggagcttgtttgtttggtgattttttactggtgaatgcgatggatctttcgtacctggtgaaagttctgtgaaatcctatcaatgatatcgaagttctttcaaaatttgtccaagtgcgatcatatttttttggaaaatacacagatcctaaaagaaaagtagggccaactgtacagggttatacctgtctttttttagttttattgacaccgttaggtggttttaacagagtaggggcaaatcagagtttcgttttgaaaatgtgagggtaaaatcacaaaccctagaaaagaagggtaaaatcacaattgcatatgaaagtaggggtaagaacacaattgcccctttaagaatctagatgacacatctactataagattagaaaccaaccctacactacactcaaataatattaatatattgagatgctatttgactcggttaattacctgggtgaatgccttgacgctgtcacggctgaacttgacctccagcgaaggatcgctggcgacattgagcagcacatccaccatgtccttcgccacgaagctctccccctcgcgacacatccggttctcatgctcgtccaatacatattccaggaactgatcaaacatcttgctcagcttcttcatcctccgaatgtacccctgcaggtccagccagcccaaccacgggatcgaatccccaatgtcgagcacgccgttaagcaggaagagctcatcgatcatccacctgaaccgctcgggcgtcgtcaccacttctccctcgtgcaccacctcgcgctccaggtacttcttgccgagcaccatgcgcgagatcacgttcaggctcgccgcggacaggtagtccttgagcgccaccacgcgcccggacgccgcgtgcagatcgcggagcagcgcgcgcacctcctcgcggcggatgtgctcgtacgactcgatccgcttggcgctgaagagctcggcgaggcacaccttgcgcgcctggcgccagtacgcgccgtagggcgaccacgtcatgtcgctgtagttgtaggtggtgtgcttgccggcggcggtcttgggccggtcggcgaacaccacgtcgtgggtcttgaggaagaacttggccatctccaccgacgagccaacgacgacggggaaggacccgaacctgaggtgcatcaggggaccgtacttcttggagaggctgtggatggagcggtgtgggagtgagcccatgaggttgaggttgccgatgattggccatggcttaggcccaggagggaggttgtacacccggcggttgtgcctcaagatcagggttctaagaaataagaggatggtggcgagtgtgatggtaaggtaggatacccatagtagaaactccatctgaaaaatgtatcttggctggtgaagatgactgaaccacgggcgaacttttatagatcgcaagagggagtggcttgctaacgcaatagatataccattgagaattcaggctgcatatgggcattcgatcgatgttttgtttgcacttggcataaataaagacaatcattagtcaacttgtactggtcatgttaaaaaaccactgtggttaattgcccaagttgctaattaatctcgtgatctggaagggaatatatttcccgtgtacactcctaacacaccaactgacaaatgtcacagaaaaatccagaaaaaattagacacataattccaatggtattatacttacgtgtgaaatcttatattcaaatacattatattttagccgtaacaaaaaaaacaaatttctaacagatttttacttttaaattgtcagatttttcacttttttgttacggctaaaatataatgaatttgaatatgagactttgcagatatgtttaatactattaggagtaaatgttcaattattcgtagaaattttcgtgccatttgcttgttggtgtgcatggagcgtgcacgagaagtttgtacatataggatatgtacctctgatcaattggtatctattttacaatagaacaaattgcattgataaatggtgtactttttgtatgacctgttgaggtagtcattttcttttgagacagagaagctataagaaactgcaacaatgctatcaatgagtaagcaacagtaggtaggcatacagccgtgcaccatgtagagtaccccatacatctcaaaatataaacatttttaagaatacagtgacatgcaaactttattccaaacaagaggagtgtttaatttgcttcccatgtctaaccctctccatagacgatgtcttctgtttttatcaatttgctccacaactcttaactggaagtttcagttggcacatgtagaaagttagcagaaagcacatagttaaccagatcgagcctatttccataagaaagataaatggaacaggagacgagccttcttttaattctctatactattgggaagaaatcatgtatgagtggtttggtgagacttaaaggtaatccaaggtaactgaaaggaaaggatcgttgcgtcattgcagagtatttgtgggaatcttcatcttttcttctgacacattaattggcaccatgaatgatttgttgaagtttattcttagactagtcgagtccacaaaatgtatgtaaaaagctttgagtcaaaacaattgtctagagcatacatatattactaggagcgtgtcatccgcatattgtattactagtaagtcaagacacgtacaagttgaaattgtcagtgaagattgcaaggtccctctgttcataggtcatagctttattgtgaatagattgtaggaggtctgttgctagttaaaaaaggagagttgaatgagactccttgtctcactccccttctggattgagatttttttccctggggcactccattcaataaaatggaaaaagttgtagatttttagatttttttttctacccaatcaatccacagttgccaatccctttacatatcagaatctctaggattacactctattcagttttaccaaaatgccttctcaaaatcaagcttgagtgcaatcacttatttcttggattttatagtaacatatgcattcaaaaggccatgctaggcaaaataaacataatttatcctctgttaaaaaatatagctacatttctagtagaaatttgagctttttgattggttgtttatgacggtgggagtaattgaggacttttatgagaataaattctttaaatggttttaagagttgagaatgtttctttatacaatattaaagttaaagttaaagggtgtgtttggagtttggacttggggtggacaaaaaacttaaagctcgtagcgagcttggctcggattgagtcgaatttgtagtcttaataagtcgagccaaagtagacttttagctcatgaagctcgcgaactgctcgtttagctcgttaatacaagaaatcaacatatcttcatgtacttcgtgattttaactagtattcagtcatttaaatacaaccgaactatttatatttagtgaattatttattagttagtgtttattttcatgtttatatatgataaaatggtaaatgtgaaattatgaaggtagaataaatacgttaacaagcctaactaactagcttaataagtcaacttatgagactagccaagccgagctaagcttctggatcgttaacaggctcgttaagataacgagctcaaacgagccgagccagctcgtaaaaaataactagttgaggtgggcaatatggacttatcctacttcctacatatctgcgacagtggttttttttcatagggaatatctactgccagtatgatgaatctattttgtgcacgacactccaatatcgcataacaccttattatcaagcatattattgactcacacttgccctattacattcagctctacaaaggcagcacaggatgcataataagtaacaacgctagcaatacactgcaagcttaatgttggaccgcgacaggagcagtgcctacagtacagtcaagagacacagaacgtacacacgcacatcatcaaaggcatatcacatcaggcagcagcatagaggtgagcgggcagcttgggctcgacgacagcctcaagcgggaacttgcgcggcgtcgacaagccgaagatctcctccatgctcagctgctccctcgtcacgccgtcgggcagcctccacgcgaagccgtgcagcagattggcgaggctcagctggatcaccttcagcccaaggctgtagccggggcacatccgccggcccgacccgaacggcagcagctcgaagtcctgccccttcacgtcgatcttgttgccgatgaacctctccggcatgaactcctccggcgcgtcccacagcttggggtcgcggccgatggtccacacgctgacgagcacccgcgtgccggcggggatgtcgtagccgtcgacggacgtgtcctcgcgggacaggcggggcaccagcatgggcgccaccgggtgcagccgcatggtctccttcacgatggcgtccacgtaggtgaggctcgggacgtccttctccgtgacccagcggccgcggcccacgacgcggtccagctcctcggtggccttggcgaacacctccggcttcttcaggagctccgacagcgcccactccacggtcaccgccgagctctctgtgccgccagcgatgaggtcctgcacgtaacgatcgatgtgaattgctgaattgttgctacttagatggtgttgtaatggtgatcaacaatggactaagtaacactccagtgatatgatgcattgttataagatttaagacataatgaagagtgttgatctgcagtctgaaaattgttttttaatgttgtttttgttcagttataaacttattctgcactgtttagatcacaggagggggtcagtgctgcttgcaatgattgacgtcccatgcttatcagcaacggaatctgcaagctctttgggcagacaagatattcagacagttcatagttgtgtgggctagctctgtggcaagcacattcatttccctaatggatagtgacgtccatttgggcaactccgatcttttatgtaagtccgttttctgattgaaactagtaattaataatgtggtttggctatgataaatgacaaccctaccatacgtagtatcccaatatcctactaagaaataaataatttatgtcacggtcaagtttcagaagttgactaacaagaatgctacgagtacatagttgcagcctgcagctatcattctgagagtttgtgactgcacccattcaagattgttcctattaattacagtattagtatgtgattttccagtttattgaagcgtgtagatatttgaagttgatctgaaaacattttttgggggcagaaatgcagtgacagaaagactcacctgagtgaatgccttgacaccttccctcttgagcttgacctcaaggttgggattgtcagcgaactgcagcagcacgtccaccatgtccttggccacgaagctctccccctcgcggcggcggcgctcgttgtgctcgtccacgacgtgttccaggaaccggtcgaacatcttgccgagcttcttcatcctcttgatgtacccctgcaggtccagccagtcgagccacgggatggagtcgccgatgttgagcacgccgttgagcaggaacagctcgtcgagcatccacttgaactcctccggcgtcgtcaccgacccccccgcatccttgtccaggtacttcttgcccagcaccatgcgcgtgatcacgttcaggctcaccgtcgacaggtagtccttgagcaccacgacgccgccggccgcgccgtgcaggtcgcgcagcagcgcgcgcacctcctcgccacggatgtactcgtacgactccagccgcttggcgctgaagagctcggtgaggcacatcttgcgcgcctggcgccagtacgcgccgtagggcgaccacgtgatgtcgctgtagttgtaggtggtgtgcttgccggcggcggtcttgggccggtcggtgaacaccacgtcgtgggtcttgaggaagaacttggccatctccaccgacgagccgacgacgacggggaacgacccgaacctgaggtacatcaggggaccgtacttcttggagaggttgtggatggagcggtgcgggagcgtgcccaccaggttgaggttgccgatgaccggccacggcttcggccccggcgggaggttgtacacgcggcggctacggccgagcaccgctttcaggaacagcacggtggcgagcactacgccgacgaaggacgcccatggcggcagcatcagctccatcggtaaccggtcggtagtacgtggattggctgcaattcagttactatgttataggctgagctgcttggccggtggtggacaaccagagctcgagctagctacttatagaagacgacgagctcggaggtgtcaccatggcggtagtagagcgcgcgagcgtgtggaggaagttgaggtgtcatatggtgggaaaggacggggaaatcgatccaagacgattctcacgatgtctggaaagaaaacttggccgcgaaatgggccaaggcgtccacttgtgcaaattgtcgttttgccgagaaaaacgtggagagagaccgaggccacggaaccaccgctgctcagctaggctgcacaagcacaacgctctgctgcgtatgtgaagttgcaggtatccctctttgggggaaaaaaaagaacgtgcagaaggtgcaaaaaagtcagaatatttataccgtcatatttttcaacagaaaaaatagcatatatttatattggaagtttataaatttcatatgtaattttagtgtattaacaatgtaatttatatgtgtaatttgtaatttgtatttacactaaaattacatatgtaatttataaacttacatatttgtaatttgcggaaaatatgtaagtctgtgtaatttgtaatttgtatttacatatgtaagttatatgtaagtcaaacaaaatgtggtggttgcttgcatggtaaatgtcttggtttgtaatgctcaggtcatgcgttcaatcctgctcctctcttgggttcctttgatgtttttgtatgtactacacgaatcttaacgcatatcgtattatctaggaatcgatatatttttttctacaaaatatggcgtcacctttttagactctgacctatcgctaatcatagtacatgccctccgttttcggggtggcaagaagttcctaattttttttccgaaaaacatcacattaaatctttagacgcatgcgcgcgcgcatatatatatatatatatatatatatatatatatatatatatatatatatatatatatatatatatatatatatatatatatatacacacacacacacacacacacactaattgcacaggttgtatggaaatcgcgagacgaatcttttgtatctaattagtccatgattagccataagtgttacagtaacccacatatactaatgacggcttaattaaactcaaaagattcatctcgcggtttccaagcgagttacgaaattagtgtttttattcgtgtccgaaaaacctttccgacatccggtcaaacatccaatgtgacactaaattttttttttttgagaactaaacacaccctaactataaatggttgatcaggtttcggatttccatttcagtggctggcagtggcacaagtatatgtactatggacagtgacagatctttttggctctgcctgcatatactgtattatctatctctaatcagtgagcagacagagagtgggcgaaacaggaatacaagatgttgatcagacgcttatgaccacacagataggcatgcctcaccaatcatcaaccggtgtcacggtatggcaaaggaaatggagccgtgaaagctgacagatcttggagcacactccattttctctgggtggacagaatgaatcagagttctgccacactatgccttatctgtggatgagactcctctaacgttgtgcagtttatagttgtgccactgacatgtaggccataccaaagtgagacccacatgtccgtggcacaactgcagattgcacaaagtcagtgatctgtttcccttatccgcgtatgcactatcaggacctttacaatgatacgccgtagcattcagcctgagccgcatacgtcgacaatttctgagaaatcgaagccatgtttgtagccgggcccaccaaaacaaagtccacgcttccaactgaagcaacgcgttcttgggcaatatcgaagccgcgtgcggttgggagaaggggtggcaggcgtgttgtggggcgagtggcttctccctcgttcccaggcgcacgccccgacctccgcatcctagattcgccctcaccgtcaccctcgcctgtgcccttgccctcgcgctcacactccagatctttgttcaagttcaccaccaaaacaaagaaaaaaaaagaggtttatagtcgaagcgctaacaatttggacgtcgcctgtgatgctcaacagctgagctcagatgatttcactgtcatatgaacgtaagtcacaacaaacggggatcattttagttagtgtaacaggtagctagtgtgtcatccattaaatcatttagtaatttccccacgaaagaaaagaagcagggcatcctgtttcaccgcactacagagcaacgagatggatcgttactgtatcttcccctgcaaatgcatcgcgattagcagcaaacgacacggaaggttgtctgaactaaactgagactcgaggcaggcttgacttgacctgctcgagtttgattaaactaagaacaggcaacccccacatgctcgaccgtcagcaacttgcgtcgtccacagcaacgggtgctgcaagaagaaatttctgctcgatgccataaattcataatctaaggcaggtctttagaaaagaagtcttcggcaaaatgttcagatagaataataattaagatcagcaaattggattttctcaatgaaattggcacttgatcaattagtaggatttagatgtgtgaactaatatgtcggggcgtgtggacctgattgacttgcataattgtgtctaccactgaaattgcgagggggttttcacgggcatcactaagaaagtaagaaagtatagtggaggaacagtggacgtggactgactgttatttgaaatggttgactgaccagcagtagaccaacagtctcttctgggaataaacattccacttgtttcttttttacgtgtctgctgctctggcgatagagatgcgtcccttttttttttccaaagaaactctagaattcgggtgactccaccaggattaattaactacataattggaatgcatacatcatatgttagagaaattatatggaagccacacgcacgtatctcaaacacatagtacatcatatgtttgaaaagatatattagtttgtgcattgtttcatgttttatgctttttgttgagagaatgttttgtgctctctattgagaaaggttgattatgctatttattggaaggatacagtaataattgaccgtagtttccttgaaacaaaatctgaaatttgttccattatctaaaaaaatcactttaaccagggcagtgccgtcaaatttggaggccctatacaagggtctaagtaaggcataaatcaagtaccaaatatagctaaaataatatatatattgtaaagcaaatgtgatatatcaagaatagtatattttttaactcttgttttgcataataaaaaaatgtcaaactgaaaacggagaatgttcgttgctgttgctagcttgctgcctagtgccttgcttgttggttgcttgctaagttgctattcgctggttgaatgaaaatataaaattggatgagttggctggcggcctggtgctcggaggagacgagacgtcgagactcgagacgaactgaataagtcacagatacgaaaaaaaagagaatacaaaacgccgtggggcctcagggctcagagttgataatacgaagcgccacgcacgcgaagtcgccgcgcggagacatgcgcggactcgaacggggttctgacgctctcacctcacacgaatacatgggccttcttcggttggactgatttttctgaggccctgaaaatttggaggctctgtacggtcgcacgggccgcacgcccatgtgcacggccctgactttaacacaaattcgcacactgggtggaccaggaggtgattccaccaagccactcttcatgtccactcctctcatctgtgctagtcgggtgccttcctttttgctttctctaccaactacctcccacgcacattaacagcgcgaatctagatgtagaagggccaaagtcagggatgggggcagctgcggtggcacctagacaaacggatctgatgtgtcatcaacggcttcactgtgatggctttgacggtgaaggaatgtggctatcgattgtttcagtgacgggatggctttggttgcatcagctaagatgatgagcggttgggatggttttgacaccatcgagctagttttggcagcttctgctatagcgtcgattgcacggcggtccaaacccctcctctcgtggcgcgcattcggtccgaattagtgcggtcgatggctgtctccgtggagctcatcatctctcctcaacggtctatctgttgtcggcatgtgaatgctccttgccacaacgtctttatcactggtcatcttggacccagtatattttagatgtgtgcctattgatcttctcacgatgttatccttgtaaaggtggtgtgacgttatccttataaaggtggtgtgtccaacgaaggttatagcttcgggtgttcattctagctatgcaaagaccgataaccgaaagtgattttaattagttggatcaccttttaatgtaattatttaaaatcaataaaactttatttatcataaaaaagatatatgagctaacaataaatccacgatcttactaatcctacttaaaatgcattaacatgcgattgtaagagctaggatttaattttctttttaacaataaaaaaaaaaggcaaagtcatacgatcataacggtgctatcaataaagttaaaaaatacatcaataaccactcgactatcgtggttatcagagctggtccacattggaatctcaataaatcgatcgagtttaaaaaaagtaaaaattaaaactttgtcaaaatttattcgaattttatcgcttttcgtccacaaaccaaccaggcgtccagtgaaactgttgatgggctatagccgatttgcaattgcattatcaaactctggataccaactccaatgctcagtcataagcatataattaacatggtgttaggctgttagcgcacgcagggacggatctacagtgttagcatcggtgtcagacgacaccgatgactttcggcaaaacctacagttaaactgcttatccatatattataacacactaatataagtataattagcatgctatgacaccgatagacatattataacaccagtgaatcaattttctagatccgtcgctaagcgcccgagagacacgctaaccagtcttctcttcggagaagacgcaagctcatagagcctcatatggaagagaactttgttgaagcgtccagccgcccacagtttctctcgagaggtttttgtcatatcaattttttgaccgaccttgaccgacgactagtcagtagtagtagtcagtagtcactcatatcgttgtcgtcgctcatcgttgggtggcaacgcaacacgcgattttgcaggtgcgcgtcgtgtgggggggacctgtggttagttggtgcgggtggttgcccgagtcattttgtgtgcttgccttgggtcggaaaatgttgctctctctatctgtggacgggcgtagggcacctggtggctgtgtttgctactagggatgaaaacggatcgaatacggtcggaaacaagctctatcatattcattttcatattttttttctcggaatcgaaatcggaatcggaaacccggatacgaaaacggaatcgaatattatcgaatacagatacagagcgaatacgaatcgaaacgaatacggtaacgaataattatcaaaatattaagacccctcaaaataagcttattaaatcgaggaagagatgtagccattagttttcaacaacaaaatatcagtattttcaaattttatctctatttataagggcaagggggagatagaaaatgttgtgtttacttttcatacaaatttatgttatcatgaaacaaataattaatgtgcctcactgaaattttcataggcacattgaaatttttgaaaattggttgaatattttaaattttgggttgaacatttcaattgaaagtttttaaaaatttgagtggttatttttcagaattgaattttttatttgtttgtatgtggaccacttaaggacccacatggaaaaatcaatttttccatataaaggtgacttaagaagccgtatgcaaaaataaaatttgagaatttgaaactagtttatctcactcatatgaactctaaattggatgattttctttctaaatgtttctaaaatcatgccctatcatgttattgtgttcttactgctattattttggccatttttttcttgtgactttgttttatcaattaaaaatttgaattttaaaacttcaaataatattttgaagctgtaattaattgcagctaaaaaagttgtgaacataaaagttgtagatctcatcaagacatacaacttttattttggtcatttcttcatccgataaagtgataataatattgttcacaaagtttacatatctctattgtagtttatagaaccagatgagatagatgtaaattttgtgaacaaaggtactatcactttgtcggatgacgaaacgatcaaaataaaagttatagatcttgatgagttatactattttgttgttgataacttttcagttaaaatcatttagtattgcaaaatgttgtttgaagttgttatattttgagattcaaattcaaccggttcaaacaaagtcatatagaaaaatgaccaaaacaaaagttgtatatgttgatgtgttatacaactttgtttttgacaattttttcatttgaaatcattaactacccgaaaaattatttgaatttcttatattttaaaattcaaattttatatagttgaatcaaactcggaaggagaaatgaccaaaagaaaaatggtagatctcaataagttatacaattttgtttttgacaactttttcatttgagttgatttagttccttaaaattcgttttaaagagccacatataaaaaagaaatcgatttttacattgaaaaaaatccaccattttttcccaaccttatctactcttgactcttcctctcctctctctcacagactcacactttctactctatctccctctcacttccctcatccacagcggcacggggcggggcaggcggcgaccggcggctggccgagagcggcgcaacgcgtggcgggcggcagcggcgggcaggctcgcgcagtgggcttgagcggcgggcggcgacgggcgaaggcagcgggctcgactgccgcgacggcttcggtgggcgtcgacggcgtcggtgggtggcagcggcagggggatccggcggcgccgccgccggatctggccagtccctccgccttttggccggagtgctggcggcggcaccgtggggcggcgcatgtggagtggctcggtcggtggtggggagggccgctgcggcgcgaggcggcggagtccggcgcgtgcgtgggtggcggccggtgcacgcgtggcggcgcggagactggcggtgggcggcgcggatctggcaccggccgggggtgggcggcgcgaagctggcgcggccaactagggtttcggttttttttggctgaaaaatatcccttttgctagcatgtaaactaccggatatccgataaaaattccggatagtttccgaccgttttccgattccgtcggatatcacccttactgtattcgttttcgtatccgagaaaaaaatccgaattcgtttccgaattcgagaagttccggatagttccgaccgaatttttccgaatctgaaaattggtccggacggacgaaaattatccgaaccagtttcatccctatttgctacagaatgctagagcgtgcggtcccgcggaacaggtgcgtgccgtgccgcgggggctgaatccacgggaaacctaggctcgcgtactccgttcgcatgcaggcctcgtgtgtggactttgccttctcgttagtttgggccgagcagcaagcatgtcacgggcgttcttctagaattttggtaattcctaataccagaaatcttcaccctcgaatgttcaaaaccgtgcaatcaaggtcccatggcagtatatatgggtggtttcactgatgtggcatccttatcagcaatctgggcccacatgtaagtaaaaaaatcatatgtggtctgcatcccttctttccaccattttcttctttttaattttttttctcttctctttttgttattctctttgtcggcatgccacggagggggagcgacgagcggccagagcagacgggcaagtgcgcggcggccggcagagcggagcggcgcggcggcgggcgagcacgtggccagcagagcgaagcggcatcggtgggcgagtagaacgacggcggcgagcgaccggagcaggctgaggaggagatcgacccgtccactccgctccacgtgttctggaggaaaagttgaatttaggtccctataatataagtcaaaatctacttcgtatcctcaacagcaaaaccaggtatatcaatccctccaactattgttacatatcataaggtattttagatttgtaataattaagtcaattttgtttatgtttgacaaagtttattagaaaaacatagcaacatgtaaaacactaaattagtttcattaattccaccgctgaatatattatcatagtatattgttttgtgttagaaatgctgcttaggaaaaattaaaacactttacaatatgaaacatgagttagttaaaagaaatatgaaacatgagtaattataatagttataaatagagtgaaagtacttgaaagtttgaaccaaatggtatatattttatatgcttagtgcaattgtatattattatttgaaaatgcttagtttaactttctaaaatcaaaatactacctctattttaatgtaggacgcttttcgacggactatgcgtgcctaaggtatttgtagagtttggggaacgttggaactaaggtgtatgcgagatcgtatctagcagacaaggaacaagggtttatactgatttggggcttcaagataaataacaaccctacttcagtttataagtatatatctgaggaaacgtatcacacggattacaatgaaggagcaaagtggctaatctgatctacagactagaatccaccaagcaccgctcggcacaatcttatcggtcactaggcttcaacttccttcagatggtctctcgatgcggctttggctgtggcttgtaatttgatgtcttcaccttcacgggggtttgtatttatagcgatgaacaccttttctccaagtagcactcgaaaaacttgattggagatggaccaaggaggccttttttttaataggactctcacactttctatcccaagaaaataatttctttccagatttactgtattttattaattaattataccttctggtatatcattaagtatgtgatactcctatatattacgaaaccaactataggatgtatgccttattttaacactgacaacactagttattgaattttggaatttacatttgatcattcgtctgattaaaaaactattgatttattttatcattaaagagactagactcgtatttttttgcatatttgcattaactttttaataggataaatgattaaacgtcatttgataaaacttaacaacatcttatgtttaaaaacctaggatggcatacatcttatttaaaaaggtagtggagggagtatatatttcctaaattacattgtcggtaacctatttgcgaagtagcaacagtactgcttactatacaccgactaaaataacccaacacgtgcaagctacttgattgcgaccatacagcacgagcacgagcatctccatgatcgccgatcaaacctccaagctatcatgtaaggagtaccaacaggacactaaatatagtttatataaacttcacattatcaagaaaatagtgctttctccgtttcacaatttaagtcattctagcatttcccgtattcatattgatgtgaatgaatctggacatatatatctatgtagattcattaacattaatatgaatgtggaaaatgctagaatgacttacattgtgaaacggaggaagtatacactactctttcaaggtaaacatcactttttcatacttaaatttaatgctactttatctcacatgatgttttcgatgttgtgtatgtctcatgtaacatctggttttcttttctttacttatttattcacttggtacatcatctttcatttgaggtgacagtttatttaatactatagatatcatcttagtcattgtgatatgactggcctagtaccacgaagcaacggacaaaaacgacggtgagtatattttctcatctaaaaattacacatgtttagtttttttaaccgagttgttcactacatcaatgccagctcgacattttatgttcacaaatcacaaatggccagctctctttaatttgcatccaacgtgtagctcgatcatgttaattaagcgactttagcaagatcacttagaaccagcattaccggcaacaataatggagctacccccatggccctcattactggtcattgtgctcacagcagtcgtcttcttcctcgccaccattctctgccatggccgacgcgtgtataggctcccgctagggccaaagccatggccgatcatcggcaacctcaacctcattggcgcgctgccacaccgctccatccacgagctctccaagcgctacggcccgctcattcagctccggttcggatcatgcagggaggaggaacggcgccggcaaagaagaacgacgccgaagagggtggggcttcggccatcaatggcggatgagaaacgggcggcataaacggcgattaagagctctattgaaggggaaaacatagggaagataaagagggggaagaggaaaaccgattttcgcattcaattggaggagaaaacgcttgtggaggggtatcgacatgacggcggcgctagtttcttcggccgggagaggaacgggcggcggctggaggaagactgtagcgcccgttccgtcgtggcgcctagcgggaaaattatctcttaaaaaccctaattgcgaaatttgtttctttgcttgttgtctagcgtccgtgccatctcaagatctcaaatcctcgatctatcgtcgagatcaattccgaatccaaatccttccaaatcaaattcctccgcaaaagtctattttgcctcccccgggttcgatgggccgaatctctctcggcccatctcctcctccctcccgggcgctctctctctctccccctccctcttccgctctgcccgcgcgccgcgcgcgcgtgcgcgagcgccgcgccgagcgcccctccctcgctctgcccgcgcgtgcgcgagagccgcgtggtcgccgcccggccccgctgccctgccgcgcctgcagccgcgcagccgctcggccccgcgagccagcgcgcgtgcccgagccgcgccgctcgaaccaccgcgtcgcccgttgcttcccgcgcgcgcgtgccgtggtggccgaccgcctggtcgccgccgccgtcagcctctgccgcgcctgcccgcgcctgccgcccgtgtcgtcgcgccgctccaaaccaccccgccgtcatcgccgacgtcatagcccggcccccgccactccgcgcgcaagccgccaagggacggaggcagagccctcctccctctgccgcgacgcccccgctcccctcctccttttcccaaagaagaaaggggcgagccccctttctctccctccttttccccttttttctcccgccggcgtcatcctccctctgccctgtcgccgtttggacgcgagcgccgagcgccagctcgcgccttgaccgcccaagtcggttccaaaccgacattgccgcccttaaagccccgggcgccctccccctcttcgcctccacgacattgccaccgcctcccgtgctctgttcgccgtcgccgttcgtcgttgcgcgtgtcggaggagccggcacgagcaaggacgcggaaggggactccaggcgcgccctctccttcctcttccccggcccgaggccggagagattactcccgcgccgtcggcctctcgtcgttgcgcccgccctcacggtagtgcatctccccgttctccctcctcgttccatctcctccccttagactcgggtagtagcacgagtagcctccccgtagctagccggcgccgccccgaccgttgccgtcgctcgccgtgtactcgccgccgtcgccgcccgagctccgtagcacccgctcgtcaccggcctcgctcggcgtagctccgcccaatccgacgctagcaacggattcccgtagccgcgtagatgctctcaccaccgggaattggcctctcgtgacctcgtcgccgtttcccccttctcccgccgccggttgccgccgccgcgattcgccgccgtcaagctccctccggcgaatccgagccgttggctcgtctcccctcgtctcgtgcaaccacccggtgtgctcgctttcgcctgtatcgccgtggttcgctccgccgctcgccgctgtcgtccgccatccgttccggccggtgtcgtcgtctacctcccgccggcccgcgtggcagccacgtaggcgccacgtcggcgccagctcggccaagaccgggtcgagccgaccccggtcagcccctccccgtgcgcgcgttccaccgtgagccgtgaggctgcgcgtgggcccgccgcatccgcgtccaccgcgaaccgcgcgcgtgcaccgcgtccctccctcgcccgcgcgcgtgcgccgcgtgctcgctccgcacggtgaaccgtgtcaccgacaagcgggtcccacccgggaccacgcgtggtgagcccggtccaccggctctctctctcctcccctcccgcgcgcgcgcgccttgggccgccttgggccggccggcccatttagctcggccggaccgccccatttctctcgggccgcgccctagccgcccgaggaaagtctattttccctccctcttttcttttcttttcttttctttttcaaaaaggatttaattaaatccttttcctttagaccaaaaatccaataaacttagaaattcaatatcttcccaaccgtaaatccgtttgactccgttcaacttccaaaattcctcaaatcccgagatctatctaatggctcgcttagaggtcattaatagggctttattttcgccgtttgttgagttgtcccgtttcgcgtgtagtttcggagcccgaagacccgcagtgcgaggatttcgaggatcaagctccagatctcgagcaaggcaagccacctttgaacatcttgagcctatatttgaaatttaattatgttgcttgaaaaatattatgcattgatacgatcgcacttaatctgtttatcccgtctgcaaggcagattggcggacctacctagtttgttgcatttgatccttcctttgttaattgttataccatgttcccttgtaaccacccagttgcgcctcggaaatcatgaactctgtgcgagtaccgacggtcgccttcaaacttaaaatctgagtaacttcttgggtaaaacttgggttttacaaaagacttggaaaacccgacacctgggtcggtgcttgcgaactaaatggattttccaaaaccgcggaccggggaacgtaccgggtgtacggtttcccgctcttgcacctaaggaccgtttccttggaattttatccgaacataagacaagtacgaccacatgggtggaatgggacacccctggctgagtaactagcttatcagggaagccttgatgccgagagacatgtggattcgccggggtggtgtcggggaggacccctgggctttctggcacagtatggtctgggacctaacctgttgttggtctgggacccctctcgtcggcatatggtaaacctgtgtcggctttggaaatgccttgtcacgaaagcttggaggtctcccgacgtggctgatccccacgggctgggtgatccgggttagtaatgtcgtgtgggtaaagtgtacccccctctgcagaggttaacaaactgttcgaacagccgtgcccacggtcatgggcggatgtgaggtgattcctagcgtagttttgtttgactactgcttgtgaaattgctgttgtggaaaggggttcgatgtttgaaaaatctgcagctgatgggatcagctaggcccgggtggccgtttgaaagttgttggcccgggtggccgtttgaaaagctgttggccgggtgccaaccttgattcaattctaaagactgatacattgcacatactctgaccggacgagacgcactgtctcatccgtgtcgtttgagaagcactcacttagttgtttttagaaaagagttcaaataaaatcaattgcaaaaaaaacaacagcctttctttgaagcctgcattaaacacttatttcccatggcttgctgagtactcccatactcacccttgctctatataaataatcccccccagttgctgaagaagatgaagcggatcctgctgatgaggagttcttccaggagcaagccggctacgatgagttttagggtttcggcctagttcccaagtcgcgcctgtgttgtttggtccaagtcctggcttccgtttcccttttgtaatgcagttgtgagctcgggatctgtccgcagcccaacatgactgtacctctactctataataaagagaccactgttgctatgataatccgtcttcctgtgataccagcactgtttcctgggactggtatcgattaacaggttaatttggagcgtcacgggctagttccggtcggtactagttcggggcgtgacaaagacgatgacggcgccttcctgggccggctgggccgcgcccgagcaagggagggggagcagatgggggctcggccgaagtggctgcagcccaagggacagagggaagaagaggctggccgaggagggaaggaaaaaagcggaaaggctagttagcgcgccggcggcgcgcgttttaggccaagaaggcccagcgccggcgcgcgccccctcctgcacgctctttttttttcctttttttcctttttttccctcactttttgtctgattttttttatccttttagcatgttttgagtttgaaagtttttaaattttgagttgaaaattttcaaatctggatttgaaagttttcaaatctcgatttgaaaattttcaaatttttcaaatctggatttgaaagttttcgaatctcgagttaaaagtttttaaatctcgagttgaaagttttcaatttttttcaaatctggacttgaaagtttttgaatctcgattctcgagttgaaagttttcaaatctcaagttgaaagttttcaaatctggatttgaaagttttcgaatctcgagttgaaagttttcaaatctcgagttgaaagttttcaaatctcaaattgaaagttttcaatttttttcaaatctagacttgaaagtttttgaatctcgattctcgagttgaaagttttcaaatctcaagttgaaagttttcaaatcttagttgaaagtttttaaaatttgactttaaaatttaaaacttaaatcgaaagttttcaaatctaactccaaaaaaatttccagaatattttcttaattactatcattagtgttaagtatattaactaatatatgtaattaagactaaaagggagttcgccaggtccttttgcggcgcgcacgcgcgcgctagcaatccctgggaaaaggaggcctgagaagaggggaaggggacctcagcggcaggtcgaggaaggaaaaatggccttaggatcggaagcgacccaaggataaagagagatttatttttagatttttcattttaattaactctaaatttggtttttgttgttttaaaattatttccggtgctttgaaaattcaagtaaaaaatttagggacccatttagagcatggaggatttcataaaaatactccaagccactttcgaatttttcttgtacatattttagtgcttgagatttcttttagacttttaataatttatattactcattttagaaagtgatttttaacttgggatgaatttatcaggatatgaaaatgttactcctgaaggtgaattctctattgtcatctctattttgactgtttcatgaagtatgaagtatgtacgactatcgttagacgaactctagtccctccgctctaaaaataaattaacataatacgagatataattagatttgtttattttaaagcagatgaagtataatttatcaacagtagtcacacatacttaataattcgtgaatatcccatagtatattagtttattttataacggaagatactatatattagtttattttggtacggacataacagggtagatagatacatagatagatagatagaaatagtcacgcttgctacatgtgagggagattgaagagtggacgtggactgaccgtttgaaacggttgattgacaagaaatagtctcttcttggctttatatctcgtggtgttaggataatgtcgtatttttatattagattggtttgtttgggatagagagagtaggggtagatagatagatataattaagtcacacctgctatagttttttaaacactgtttgaaacaattgactgaccagcaatagtttatttctgtctttgttcctaaaataaagggatgtaatatagcttaacactataaatctagatgaagagatgtccagatttacagtatatgatatgccaagtcctaccacggatggaatagatatctgttgctcgggtgatagagatagatgtctgtcctttttcttttggcaagaacaaactttaagtcgggtgactccgttaggatttattaacagcataaatggcattgcatattttgtatactaatgatgtcccgcgttttgttgcggacggatatatattagatgttggaaaaataatgaaatgatttggattgaaatattataaaaatgatttgagaatgatgatttagcatgtgtatgtttagtttcagaatgaaattaaataaatagtagatataactattatatgcttgtatgttgtgttttgtgtactaatgggttgatgtgacatacttgtatgtaggtttttaggagtgataataaatactatgcttgcatgttgagctttaagtgtttagtgggtattagctttatatagaaagaaggaatgacacatttgatatttttaatcagtctgacaattttaagattttttttcaaatagactagataaacattttttttcctttttaccgaattggacgtagactcgtttgatgcatgtcaactataaagtcataaaaaaatctttaaaaatggaaatatagattaaattgtgatatttcgatctataaatttgatttatacaggtagaaaaaaaatcttaatttgatttatatttgtaatttgtgtttctattgtgtgtatgtcgaatttgaatttgtatgtcatatattgatctatcttattaaattgtttaaaattttttgatagccttgtacggggtcgtggctagaaattgaagacccctgtgtgaaacgcataattagaacccgccctcctaagatttaaaagtacggcgtacaacaaaaacaacgaagatggtgtcttgtatgtaatgtaagtaaaaggaagagttgaagagataaataccaatagaaacaaaatgtagggcctttcttttttttttttacttgtgaagtatgttgtcttttttctctattagtttgctttcataattaatactaattagtactaatggatttgggccctaatttggggcactaaactggtgcgtagctcaatgttccggtcaacggccctaccttctacctcataattaatagtatatgcctgcagtactgtgtatgaactggggctgtatttagattaggggtgaaaagttttaattagtcacattaaatatatatagacatacatttaaagtattaaacatagactaataacaaaacaaattacagaatccgtctgcaaaatactagacaaatttattaaggcaaactaatctgtcagtagcaaatgtttactgtagcaccacattgtcaaatcatgtagcaattaggtttaaaaagtttgtctcgcaatttacacgtaatatgtgtaattagttatttttttatatttaatacttcatgcaaatgtccaatcattcaatgtgacggggtgaaattttttatcattggatctaaacaggcccggatatatatcttaatcttgtccagtccatcgtatatgactgtgggatggatgaactctgctactgctaccagccgtagcagatgcactgatcgagcattctagcgagtcatccatgcactcacattactgtatgtatatgcacatatcaatgtgatatcactaggattgccatttcgatgttaaaaaaatatatttcaatttgaatttgaatttaaattctatgtattgtaagatgaaatagaggagaaaaagaaatagaggttgttgttggagttagaaccatttttagagtctcgaggaaagggggacagcccccattcagggtttatcttatcatttgggccggggttaccgtcaccccgcaatagcgcgataaccgcgataatcacctaaaatcgcacaaaaattacatccaaaaattcgaattcaaaacttggcggtttcgcggtttcaccacgataatcgtacagtttcccgtgataacctcgatattcgcacggttatcgcgagctgtgtgtagctaaaatcatgtaaatgaaaaataaatatggaaaaaaaaatcaaaaatacggttgaatatgtgtagaaaactagaaattgagaataattggaagaatacgtagaatacttaaggcctaatattgtcttcctttttccaatttataaactattttcggtttttccctcaaatttgaatttagctttctctatttcaaaaaatttcttcactattagcaattacaaatcaagaaccacatccatgattttttttttcatttttttttgatttttttccggaattttgaatttggtcaaaattcatccaaactatatcgccggttttccctatcgtaccccatgataagcgcgataaccgcaataatcgtgcgattatcacgcgataagtgaaaccctggccccttttaacctttaggaactttaaaaggagctattgctgaagatgctctcaaagaggaggggttagggcccctcatatctggcacacaaaacgaagcacatattattaattaactattagctaaaaattttaaaaaataaattaatataattttaaagtaacttttctatatatttttttaaaacaaaatacaccgtttaacaatttaaaaacattcgcgtgaaaaatgagagtgaagtcgataactttagacataagaccacagccaaactgcctagtcaatttgcgatcgcattaccaaactggctacctaactccaatagtgctcaatcatgagcatataacacatggtgttagcgctgtagagcacgagactcacactaatcaatctgacgacatggagagggaacttaggtagcaaactcacaattgaacatgatcgatgcacatcaacagtgtgtacccatactaatttaatggaaataaggtttctaaacataaaaatgaaataataaaacatcttcctagactaagtgaagatatctcccccatccaattaatatcctcgcaatactacatgcgcagtactgctcactcacatgtgggtagtcattgagcagtcttgcagacgacttgtatccctccccatgaagcttttcccgtttatgtggctttgctcctatttgttatattgaataagtgctatgcacctaggtcattcaccaagaattaaaagcacataaaagtatggcactccagagggtgactagctggttcaggagcttgactgacataatgccgctagttgaaaggtttaggtcttgtatcaaagtgtcacgctcgaaggcctgcttcaaagatttcttctttctcctcctgggcgcgtacacagttggtgccagatactccctccgtttcgaaatgt

SEQ ID NO: 7434 - DNA, 5272 bp, Oryza sativa
  unsure (1)..(5272): unsure at all n locations
atcggcgggaggtgggggaaggaccctacaggtggggcccacctgtcggtggctcgggggaaaggagagaggcggagtcggttggggggagacgatgacaggtggggcctcgggtccacctgtcgtcgaggggaggagggaggaggctgggggttatgtggacttggaggagggggagcctagctgggccggcccacgcgaataaaggaggtaagtaggcaagggaagggagaatgggccgagcccaaagacaaagaggggattttaattgtttttctttttattttaattgatgcaatgatctttgtgctattaaaactatttatcgagctccgaaaattcacggaaaattccggagagtacattagggcacaaagaatattacaaaatattcccggccaatgatttttaagggaaaattttaattctcccaacatttcacttggataaattgatttaacttttatttaatttctagaaaatgtattattaatgatttttaatcccgaacgaaaatcggggcgttacaaatctaccccccttacaggaatctcgtcccgagattctgggatggctagaaagaaagccggtgctggtcggcggtctgactgatctgcacattgaactaccacattctgcttcaaactgattgattgactggttgatcaaacctgcacgattgaactggctggattcgacctttctgttcctttgctttgcgaaaactggaccgactggttctgcatgaactgacctagactaggactgcggatgctcctgaaacttacttatcttggactgaactgttgaggttggcaattttggtaacctgagaattcaccacgctggctataagaggatgaaaatggaatctggcatttgtaaatcatttaccctatgtccgcttggattggtcccaactcaaatgacaagtaattccaggaaaacctgcttgacctgtctttcgtctgaactgcaaccatcctcgatgctacttctctaagctgaactgttgacctggcctcacgggtgtacattagaatcgaacctgtcgacctgagattggggtgactctgctaatggttcgcaactgactcctttaattacgaaccaatttgctgcactgggttgaacctacaactgaaacggcaacgaggttagccaaaactcatctgtgagacctaccccccttacagggagtagtcttactttcgcctgactgggaacaattgaactgttgtccttcaaatatagccaacacttctctgatttaccaagagccctgactttgaaaactgaaaacttcatcggtccatcaaattgaagcaatggcgatgcactttcaccccgacaagatttggaacttaacccttagttgatgataggaaattccacataaaagtgactctcatttagctcatgaacacactgactcttgactaactttcccataagttctaactactggcatgactgtcctgcttctatcttgacttcggtgtcgagttgcaaaaactgaactaaccgactctgcattggaactgacacaactcgaggagttggggtgtcgctaacaaagctcttgatgtgatgacgctgacgccttactgtggaacaaccctctgagaggtgccctgtcatacatcttccatggatagttggacactttgcaaaaactgcgcttgaaagccataaccacaataggtagcatatattactcctgggattggtggtggcttagctgtgctgatatgctgaggacttggtggcgtactatctgaggttgcgggtgcttcctctttgaaaacaaactgactgtcgctctgatcctgattccggcttgcatctgagcttgtacttgttgttggagacactgttgttgcatctgttgcatcggactttgcatctcccgcatcaatacatccatcatctaatcttggacaccaaatgttgatcacgagcagggttcttctggcactgggataccttgtagctttcaactgaaccattgattggtgactttaattgatcttatctctgacactgaccatccgctgccaggacggaagagaggtggaagagaggggttgctaaagataaggtactaaaccacttgcctactgatctgttgtgagtacacttttattgttcaagttgcttaagcaaacaacctagtatggtcgcatccccaccaatgatgcaaaccatacccctgcacacaagcaaacaacacacgatctagaagctaacgaaactactcttcagggaaggattgggtttaggtcatctccgggaaaactccacttgatcttcgcagaacgacgactctgaactgatcttctcgctccttgcacgaagcttgaggctcgaattgacttgacttccgaacagacatgaagctgacagctggtcctctaggtttgacaactaaaagaattggagagactgggaggagaattttgaaaaactgtttgacaaagaattgccgaagggcgagaggagacaatttgcaaatagggttttcagaaaacttgtccttagggtttgaccatttggctcaacctacagtcgagttggctctgataccactttgtcacgcccagaaatttagcccaaatttccagactattttgtgtattaaatccctgtccaggaccagccagggtacacaaaacgacaagtaatatacagttccaaacgtaaataaagcgtaaaatacttacagaagaggcacttagtcctcacaccgaaacaaaagcagcagcagcggaaaaaggcgatcctagcggggcttcagctccactccacaggcaaaactcaactggggtctgagccttggtcctctaactccatcttcagctcagaagcactacacttctgaaaaaggggaatgatagcaaggctgagtacaaccaccgtactcagcaagccacaccaacgatgcagacgtgcaaggggatacaaggacggtttgtggctatttgcataaaggcggttgtaaaacattttattgagcaaaacagcaaaactgttgagtaattaaagtaatattgaatctccactgatcaacgctacaccacgttgaacaggcccaaccaacccacctgtactacagtgcattgggtcgatttattaaggtgggactaatcacggtgaatctggtcgatcgcccataaccgcgggcacggctattcgaatagttttactctggccagaggtgcacaactgtacccacaagacacaacccaccgacatgtcaccgcgtcatcatgtgcccatgatgcacacgtcaccatgtcgagtgattgtgacgagacccttcgcataacccttccctaaccatccacaccacgctaaggtttcacccccacccctcaaaaggcagtgggcggtcccctcttgcgccgcggtgaatccggcagctggacaaccggacaccccggccgacccaactccatcacgcccaccctcgccaccggtgcctaggaaagggtcgagctatacttcagatcaagcagttacccattcccgcttgtggtaagcactgtaagtcttccagggtttcccgtgaaccggtctttaattgccatgggtgcgactcgcaaaaccatgcacccacagcccaccattcagtcgcattttagttggataattacgaccatgaaacatggccagatgtctcgagcacgcggctcaacaagatactagaaaggtctaaaactgtaattatcccatcaactgagctagtggtaattaagcatggctaagcatatagttctagctaggtcacataagtaacacaagctagtcgattcattacccaaggttgacaaagaatagatatcaagtaaacatggcacaagcgagcagataggtaatacccggatcccatgtaattagcaaaacatgcatatttatttgtaaacggtaaaacatttataaattgggatcaacatgctcaaggggaatgtgtgacttgccttgcttcttcactttgatcttccgaactcttttcctcgcgaccgcggacttccgaaacgacggaaactacacgctggcacgcaaaacgaggaaaaactctaataaaaaccaaggaaacagtacataaaaactaaacaaacatgtagagctcaattttagatgaattttgcaagttgaatggctcaattcggagttcgaatgaattagatatgaattttagaagttttgagccatttaaatgaatttctataattatttacgaattattgcgcaattattatttatttttacaaaggaaaaggactgccgctgacgtcagcaaagggccggcgccgacaggcgggccccacacgtcagcgagtcaaagggggagggcgctggtacacgggcccactcggcagcggctcaaggggggggcacggctggcaagcgggccccacggctccggcttcacgagccgatgtaccggccaggcccggtatcaagccggccggccggccatggtaaggcggcggcgcgggcatgcgaccgccaccgacggcgagcgncggcgcggtcggcggacgtcggcgcgatcgtctacgaccgaaagcgacagcgagcgcgcgaagagggcggcggcgcacggggaaaaaaaaagaagggaaggaaggggagggagacctcaccggaggggcggcaatggccggcggagaaaaacgagggaggcggcgaagaccggcgatgccgaggtgcggacgagcgacggcgacacctagggaaagagaggagaggaattagggcggaggaaaacccccacggcgaccatccacgccggccggagtcggaggggagagagaactcaccgacgacgcgagggaaatggggtttcggtggtattccggcgacgcagagcagcggccgggaagggtcttgcggcggcgaagctagtggtggcggtggcttagtgcggcggcggctctagcgacggcggcacacggccggagtgcggcgacgggcggcggcgtaagtggcggcggtgcgagctcggtagggggcacgggatggagcggtgagagcggaaaacgagagaggagggcatggggagcattttataggcggagggggaggcggacgtggccgggaggcgctccgatttcgccggcgacgtgggggaggagagagagaaggtgggggggaagattcaaaatcgaatcccgcccctctcgtgcgctggcgcggccgggagacgcggtgagagggcggccactggcgtgggcgcggcaacttggcgtgggcgcggggaaagcgg

SEQ ID NO: 7435 - DNA, 3787 bp, Oryza sativa
ttttaaagagcaagcaaggtcacacattccccttgagcatgttgatcccaatttacaaatgttttactgtttgcaaacaaatatgcatgttttgctaattacatggggtcagggttttacctatctgctcgcttgtgccatgtttacttgatatatgttctttgtcaaccttgggtaatgaatcgactagctcatgttacttatgtgacctagctagaactatatgcttagccatgcttaattaccactagctcagttgatgggataattacaatattagacctttttagtatcagagtgagctgcgtgctcgagacatctggccatgcttcatggtcgtaattatccaactaaaatgcaactgaatggtgggctgtgggtgcatggttttgctagtcgcacccatggcaattaaggaccggttcgcgggatgccctggaagaacttatcgtacttaccacaagccagcgtgggcaacggctgggcttgtagtgtagcttttctctagccgacgtacccaggcgagggtgggcgtgatggagttgggtcggccggggtgtccggttgatcggcttccggattcaccgcggcacgaaaggggggctgcccgttgcctgctggggacgggggcgaaccctaaggtgtggtgcgatcggttagagggggttatgcgaagggtcctgtcacggcctctttccggtatgtcgtggcggcatgtcggcgcacggaaacgtgtcgtggggctgtgtcttgtgggtacagttgtacacctctggccagagtaaaactattcgaatagccgtgcccgcggttatgggcggtcgaccagattcaccgtgattagtctcacacttaataaatcgacccaatacactgtagtccaggtgggttggttgggcctgttcaacgtggtgtagcgttgatcagtggagatttaatgttactctaattactcaacagttttactgttttgcccaataaaatgttttacaaccgcctttatgcaaatagccacaaaccgtccttgtatccccttgcacgtctgcatcgttggtgtggcttgctgagtacggtggttgtactcagccttgctatcattcccctttttcagaagtgtagtgcttctgagctgaagatggagttagaggaccaaggctcagaccccagttgagttttgcctgtggagtggagctgaagccccgctaggatcgcctttttccgctgctgctgcttttgtttcggtgtgaggactaagtgcctcttctgtaagtattttacgctttatttacgtttggaactgtatattacttgtcgttttgtgtaccctggctggtcctggacagggatttaatacacaaaatagtctggaaatttgggctaaatttctgggcgtgacaaagtggtatcagagccaactcgactgtaggttgagccaaatggtcaaaccctaaggacaagttttctgaaaaccctatttgcaaattgtctcctctcgcccttcggcaattctttgtcaaacagtttttcaaaattctcctcccagtctctccaattcttttagttgtcaaacctagaggaccagctgtcagcttcatgtctgttcggaagtcaagtcaattcgagcctcaagcttcgtgcaaggagcgagaagatcagttcagagtcgtcgttctgcgaagatcaagtggagttttcccggagatgacctaaacccaatccttccctgaagagtagtttcgttagcttctagatcgtgtgttgtttgcttgtgtgcaggggtatggtttgcatcattggtggggatgcgaccatactaggttgtttgcttaagcaacttgaacaataaaagtgtactcacaacagatcagtaggcaagtggtttagtaccttatctttagcaacccctctcttccacctctcttccgtcctggcagcggatggtcagtgtcagagataagatcaattaaagtcaccaatcaatggttcagttgaaagctacaaggtatcccagtgccagaagaaccctgctcgtgatcaacatttggtgtccaagattagatgatggatgtattgatgcgggagatgcaaagtccgatgcaacagatgcaacaacagtgtctccaacaacaagtacaagctcagatgcaagccggaatcaggatcagagcgacagtcagtttgttttcaaagaggaagcacccgcaacctcagatagtacgccaccaagtcctcagcaaatcagcacagctaagccaccaccaatcccaggagtaatatatgctacctattgtggttatggttttcaagcgcagtttttgcaaagtgtccaactatccatggaagatgtatgacagggcacctctcagagggttgttccacagtaaggcgtcagcgtcatcacatcaagagctttgttagcgacaccccaactcctcgagttgtgtcagttccaatgcagagtcggttagttcagtttttgcaactcgacaccgaagtcaagatagaagcaggacagtcatgccagtagttagaacttatgggaaagttagtcaagagtcagtgtgttcatgagctaaatgagagtcacttttatgtggaatttcctatcatcaactaagggttaagttccaaatcttgtcggggtgaaagtgcatcgccattgcttcaatttgatggaccgatgaagttttcagttttcaaagtcagggctcttggtaaatcagagaagtgttggctatatttgaaggacaacagttcaattgttcccagtcaggcgaaagtaagactactccctgtaaggggggtaggtctcacagatgagttttggctaacctcgttgccgtttcagttgtaggttcaacccagtgcagcaaattggttcgtaattaaaggagtcagttgcgaaccattagcagagtcaccccaatctcaggtcgacaggttcgattctaatgtacacccggggatcctcaagagttcagctgcaggcatgcagcatcgaggatggttgcagttcagacgaaagacaagtcaagcaggttttcctggaattacttgtcatttgagttgggaccaatccaagcggacatagggtaaatgatttacaaatgccagattccattttcatcctcttatagccagcgtggtgaattctcaggttaccaaaattgccaacctcaacagttcagtccaagataagtaagtttcaggagcatccgcagtcctagtctaggtcagttcatgtagaaccagtcggtccagttttcgcaaagcaaaggaacagaaaggtcgaatccagccagttcaatcgtgcaggtttgatcaaccagtcaatcaatcagtttgaagcagaatgtggtagttcaatgtgcagatcagtcagaccgccgaccagcaccggctttctttctagccatcccagaatctcgggacgagattcctgtaaggggggtagatttgtaacgccccgattttcgttcgggattaaaaatcattaataatacattttctagaaattaaataaaagttaaatcaatttatccaagtgaaatgttgggagaattaaaattttcccttaaaaataatggccgggaatattttgtatattttttgtgccctaatgtactctccggaaatttccgtgaattttcggactcgataaatagttttaatagcacaaagatcattgcattaattaaaataaaagaaaacaattaaatccccttttgttttgggctcggccattctccttcccttccctccttcccttcttttttgcgtgggccgg

SEQ ID NO: 7436 - DNA, 11548 bp, Oryza sativa
caacggcgtcaaacatttagggatggaggaagtatatactgcatgggagatctaagtaagtccatgatgaaggaacaagcaaaggaccttgcggaggaactggggcgcttgggagcttggcctgctagggttggagagcgattccgcctcgaagatggtgacgtgcatcgtcccatggagcaggatcttcgccattgttagattaaactatctatccctcaacacgatctcgatgatcacccctgcacacatacaaaaagggaaattgtgtttaccatgatgcaaaatctcatgctcgatcatagacaagttcatggctagaatctatacataaatccgtcagataagaaaaaaaataaagatgattaattatctgcaatggcgaacgcaccgattgatcgaacagaaggagaaggaacagggagagaagaggagataaggaggaagaagaggaggaaaggacggtgaattaatttaggaatttctagggaaggtgatccgatcatccgaaaataggaagtctagtgttgcagcggacggcggaggcaacaggggagcggagcagccgggcatccaccatccatccatcgctgcatttttttttcttttttttgtccccggttgcgccgcgccaacgtgctgacatggaacatcaagccctggagtttgtctcgccgagcatcaccaaaggtcctcctatttcatcctcaaaactgatttggagagattttagttaaaaaaaaacactccaaccctgctaccttacatgatttttggagtgtacaataattttttcaaccatagcacaccttctgcactgtatcaaaagatcgaaaacggaagagtcctcttcttcgagaagagtttttcccgcagcaatgcccagacaagcaaataatactagcaaattcgcaaaacaatatcatagcaaacaatatgtgcgggttggaatacttgtacataagtagtagtattaaaaacttgcaacacgcggaaggacaagggcctttagcctagtggttacaagcctcaatagcaccttaggtcctagattcaactttgcgaattttctaatatttaacggctttgtgctttcaatggtaggcgacgtactcgtcaacagcgaggtgcctgtggcagggtttacattaccggttgaccactaaatttcgagtcccatcggtatcacaattttcgataaattttaactaaatttagaccaaatctattgtttaaccttcgaaattccaattgaaacttaattccgagccatgtcgaaacgtcgaaatttcgcggacatgtgtcagtgtgcgtgtccccatgggagcgaattttccaggatttaatggacctatgtgagtgtgcgtgtccccatgtcttcgaagatgctcataggggtagggtgagtatacatgcgttgtgagtgtatacgtggtattgtgtagttctaaaaaaacttgcaacacgtgatttttttccctttttgcacaaatatcgatgtgttctaatggtacagaaatcaaaattacgatgtagacaataagggcatgtttagatcccctgtcaaaatttttcaccctgtcacatcgaatgtttggacacatgcatgtagtattaaatataggctaaaaaataatcaattgcacagattgcaactaatttgcgagacgaatcttttaagcctaattgctccacgatctgacaatgtggtgctacggtaaatatttgttaatgacggattgattaggcttaataaattcgtctcgcagtttacaggtggaatctgtaatttgttttgttattagtctatatttaatacttcaaatgtgagtccgtatatccggtgtgacacgccaaaatttttcaccgttggatctaaacacaacctaagtttgcaatgtaactagatgaaccctgcatgttgctgcaggagttttgtacgataatagtagaaataacacgttggatagctagatgacataattttatatattttatataattttcatatttgatcaaaattttttaaaaaatataatggtttataacaatttaaatcatatatagattgaccatttaaattaatgtgaaactaatgtgatgtggcagaaggaaaataaagaagataatatagattattcatccaaagtaatatgaattcataagagaagaaaaggagaaaaataattcgaaccatagatcaatcatctaacggctaaaaaaattaaggtgatatgtcttaatgagattagagaaatagtattaaccacacttagtgagcatgattttatagatacacaggattacccacatttgaaatttcttttttttataaaaataaaacccgagacaaatttttaatagtctcgtttattatgtgctactaccgtgtgtaaatagggagtataaggaaagtaacatctgtcataaattagtaacagcagcgggcatttggtctagtggtatgattctcgcttagggtgcgagaggtcccgagttcaattctcggaatgccccattttttttccagttctttttttttcttaacctgcacactcccgctaacagcaacgcgacacgcaaactcgccgcgctgctgccaccgcggcgcgcgcatcgaaacggacgaccgcgacgcccccacccccagtctgccacgccgcagatcgccggggcccccgcacctgctgcactgcacgtcgtcgtcctcctcctctttgtcctgtcgccgaatatatcctcaccgtgcccatgcccatcacgcattcacgcctcacggagtcaatagcgtgaacaatggtgtccatggcgccttcctcctccgccgccgccacccgccgccttccccttcttcttctcctcgccgccgtcctccttctccacccatgccacgccgccacggtccgttcttgccttcttgctccctctctctctctctctctctctctctctgtctggtcgtctgacgcgtgcgtgcgtgggtgttcgttgcaggaggcgtcggcggcggcgaggcgggagtgcacgtacacggtgcgggtgaagacgagctgcgcgtcgccggcgcggacggcggacattgtcagcgtcgcgttcggggacgcgtaccggaacgaggcgtacggcgcgcggctgccggcgggcggggcgtcgggggcgctcgaccggtgcgccgtcgacgcgttccgcgtcggcgggcagtgcgggtacggcgtctgctacctctacctccgccgcgccggccgcgacgggtgggcgccggagtgggtgcaggtgttcgagcctggcgccgccgccggggagaagccgtccaccttctacttcggctcgccgctgcccgacggcgtctggtacggccacaaccgctgccccaaggcgtccccggccatggcggcgcgccggacgaacacctccgcttcacctctaggctagggtagctgctcgctccgcaatgtactagtagtactacggaattggcgattttcggaattcggatgcatccatccatcactcaagaataaacagcctcgtgtgtgtgagaaatatcggaaataagagctttcggatgacacatttatttgtctttgttcttttgtgttcaaatgataaactttaacttatcgaattctactaaattttgttagtccgagcaaaatttagtcatccaggaaaaggtggttgaaagagaaaaatactgcattgtagaatattgctgctccctccgtttcattgtatacgctctctcaaaaatcgttaactcaaaggtgagaacatttaggcctctttggcaaagggttttcataaggttcaaattatgaattttttccctataggaaaagaaagaaagcttttcatagggttgtattcatatgctttacgtttcatagaaagtttatagaggaatgcaaactctcttttgttttcttccatcgcactatcaaagagctgtaatcttttcttgtaggatttaagaatcacactacaatttccagtgctcctatcgaaaatattctttccaacaaacaaatggctatcccaaaatcacttcgaatttcttaggattttctcaaattacaaggctcctcgggacgtaggattatcaaaacgcacaaataggaaaaatatatgaataagatgtcatgtcacatacttttgattcctatagggtattaaacacacaggaatttcagattttttgtgcatttggatggtttgtaggaaataaaactcagaatttttggaggttgttgttttgtgtgtcagatatagtagacagacaaagggatactgcatgggacttcagactcctttggatttggctaatcatggtgcatgataagaaaaacataggaattgattgccatggctaggccaaatcctacagaaagtaaaatttcagggatttgctaaagagcatgtttagttagtccataggaaaacctcaggaattgtgaatgaaatacttcattagaataaataaaatatgagagataaagagacatgttgtcttggccttctcaaaggaggaaaggaagcgatcctacagaaattttggaacccagtcttacaatccaaaggaccttatagggaattttctataggattttaattctttgaaattccttggttccaaagagagcttatgcttatatcctatggaattgaggcataggaagcaattccaaaggatttttatcaatcgcattcctatgatccaaaggagctaatagggaacttttttttttctaaggattgaaatcctccaagtttcctttgaaattccttcagcccatagggattttggattatttttaatatgaagtctaatctctaatatccacttcgtgacacaggattatagaaaaataggaatatgaaaagcataagaataataggattttaaaacacaggaatcctgaatttagttccttttataaaaacagaaatagagaggaactagataggtaaataaagcacaacatttttcaaaatatttaatgagtatattaaaaaaaatcaagcattaataccagcacatgacacccctctacatcattcaaagcatttattgcaaaatgggtactcccaaaataatatacatatcaacatgagctatcgagatcaccgtgggcagcaacaatcagaagcgagagggatgatgcagcgtctccaaagtgtgcaggtttgcaagatcaggagggaagcaaataggattgctcatgctttagctcaaatggctatgaggtctagatcgtatgaggagtggaagttgtgtcctcccgcagaaatcttagacttgataaatcaagaatgcaattctcttttccgtaatcaataaaattccctctttgaagtaaaaacaaaaacaatatacatatcgcatatattgtaaaatagagagaatccgtgaacacatttaaagatgaggaagctacacatgaccacaaaataaattcatatcatgtttgcaacatacatatacttctgtgccgtgcggtttggtttgagccattgaaaaacatgtgtgttgtaccgaagaaaatgtgataggtgcccgtttataaaatccacatgtagagacgaagaatcaaaacctctggtagctaatcaacgtcacttagactgccacacaggagcacaccaactccctactagaagtagtagaacgccacgtgtgcaaaccaggatttggatcctctgcatagaggatgaatagtaccgtgtttatttaaggtacccggtagccattcgatcgagatcgaacggactaggtaacacgctgtgatatttgtgatgttgtagccaccatgatttaccacatttcagttttagcacaggacacattttattgcactacaagagattctcttgatttattttaggacgggtgggtagttttctgcgttttcttttgtatttttggttgaaacagaagtccacggaagtcaggaaccagtttagatgagacttttgactttttactattgagctctatctattcacttattcttatactaaccgaatcgcttattagcaaataaaaatatatgtttgtaggtaattattttatatacgtattacaaagaaatactgtaaaataaatttagataaaatgccaaaaaaaactcaatttcaaactaagttgtaaattttaaattttgatctgcataagcatgcgaaacaatgagaccttttgatgaaaggcctggttttgttcccaaatttttttttcaagaacatcgcatcgaatctttggacacatgaatattaaatatagattaaaaaaactaattgcacagttacagtaacccacatataataataatggattaattaggctcaaaacattcgtctcacggtttacagacgagttaatcccttctaaacatctaatacgtcgtctaaaaatttccttttcgcaagctaaactggccctttgcattcgaagccgcaaagtgcaacaaagaaaaaaaaagtgcactttcctggccggctgcactgcagtgacctcttctcacctcccacctcctctctctctctcccctttcctttacccgccgccgccggcgtccaagaagcgcgggggttggtagggcggtgaccggcggcgaggtcaaagggattgcttgctgctagtgctgggcaggtacaaaatagtcgcttactcccattctctcactacctcaattccacctgctgctgctgcctgcgacaccgtattccagatcacgccgtggaaaaaggtctctcatctttcgtttatttccttccctttttttttctttccctcttatttatttctttcaggttggttctttttctgccaattcctggagaatcgcgcccttttttggctcccaagattcttcccccctccatttctgcgtcttttccacgccacggtgacggcgacgagcttgctttttttttttttttcttttttggggccaattagtgattctttgtccggccttgcgattgctggagttgtgttggggatcgaaaccgaggtgagccgatgagcaagaggagttgcggcggcggcggcgcgcggttgcaatgcgcggcggcggattggggcggctgcttcctcgcgctgccaccggcggcggcggcggcggtgccctcaggcggtgacaccgatggcggattcaacctggcgtggactctccaccagtcgttccaccctgcctccggcctcttcgccagcgtcggcgtcggcttcccggcgacctcctcgagctcgccgtcgccgccggacgctcccggagacccgtatgccaagtatgtctcgccggagatcgagcaccatgctctgcccggtcaaagtgtggaggtggagctaatggagaaggggaagaagaacaagaagaagacgaataaagcattcaagctcaagatcaaggtgggcaatccccacctgaagaggctgatcagcggggggatcgccggcgcggtgtcgaggacggccgtcgcgccattggagacgatcaggacgcatttgatggtggggagtaatgggaattcgaccgcggaggtgttccagtccatcatgaagcatgaagggtggactgggttgttccgcggtaactttgttaatgtcattcgagtcgccccgagcaaagcaattgaggtaaccgactgatttactgatcatggtggagtcatactttttttacagtgtttatgtgtaatgtatattgatactgtactgtgctttgtttgtgatttacatacaatgggggaatcctgttaatggatttttgttttacaaaatatgtaacccttattcttacaaaatggtactccctctgtcctaaaatgtaagcatttttagctatgaatctttgtctagattcgtagccaaaagtggttatattttgggacggaggtagtaagcattaatgtttgttgcaaatcaatgtttgtttctttccgcttttcgtgtgcttaattgatcctgtaaacggcaaaatgtgttttctcccttatgcttaggatacattatgcaaattgttaggtatgtggttcaaataaatctaggtatatcttttatattttaagattaacccctgttacccaagaaaagctgaatagctcttttggcatagcttaaaatttgttgagagattgtgccattttggtattggataccatagagttaagttatataggtcagtgtgctagccttgcgcagtatgcaatttcggagctagtgtaaggctgaaagcatcgatgtaatttctgttataacacatcatttcatcagcgttgtgctatcttgaccttatggatgatattaatgggaaaaaatagtgatgattatatacccaaaaacaagaagcagtttgcagtttagtccaccggtacgtaagaattgctcttatctgttgccataacatttccctgctcaagctggtctgaagataagtagcttgaacagagtatggtcttcataaatcactatttttttttattttaacataatagaaacttggtatttgctttctctccagtgaaccatacctgataatttacacaatattagacaacagctgagcgcaaaccgaaggcacatacaagacaaaactaattatatccttttttttttttgagatttccattcccagaggtattggcctgattaaaccaaggttttgatctgcagctaaataattcctatatctttatgtttgagtgagctgctccaaacctcaggcaacttgttgcatgattcatgtaagaaaaggtttgtatgtttcaaggaagctacagtcagaaagttcttgtattgattttttatcgtaattaaaaatgtaataagggctataaaaaggctaattctcatgcttatttgaagtatgaaaacatcaggcaggtccttgcattattgttggctttcttcaaattttcatttcttttatcaagaaaccttttctggcattcacagttagagggttgaacagaacacagttgggtgtttaatttttatgttctgtttgttgcttagttcacacatgttggatgcgcatggttgtgtatatcatcggacaactacgatataaatgatggatgcatgttgaaacataaatagctagttgtacaagtatttgtgcacatacatatattaatatttggccgtcccttctttttctgcagctcttcgcttttgatacagctaacaagttcttgacccccaaatctggggaacaaaagaaggtcccactccctccttcactagtggctggggcatttgctggtgtcagttcaaccctctgtacttaccctctggaattaattaagacacgattaaccatacaggttagttctatccctctgtatgcctccctgaaactagagccttttaacttcctgagacgcaatacacgaatgtcatacgatggttgtgccttaaaatgtgcagagaggtgtatatgataactttctccacgctcttgtcaaaattgtccgtgaagaaggccctactgagctgtaccgaggtttaacgccaagtttaattggagttgtgccatatgcggcgaccaactactttgcttacgacacccttaagaaggcctacaagaagatgttcaagacgaatgaaatcggcaacgttcctaccctgctcattgggtcggccgcaggagctatctcaagcacagctactttccccctcgaggttgcacgcaagcacatgcaagttggcgcagtcggtggcaggaaggtctacaagaacatgcttcatgctctcctgagcattctggaggatgaaggggttggagggctttacaggggtctggggccaagttgcatgaagttggtgccagccgccggtatttcgtttatgtgctatgaggcttgcaagaaggtattgacagaggaagaggatgactgaatagtgtgtccttacactcttcagagcgcagttttgcaacttttttgactggaggcatcttttgggcttgatttggaatcaaatcatgctggaatcggatgaaactcgtgtagtttcttaagaatttttaccccaactctgtgctgtcagcttggcctgataaaacctgcctctttccccagttttgcttcaggatatcatatgcagagaacatgtccaataactgatttctgctgagtttatgaagtggttgaaacgcaaatgggcagtcataattcccaggtggtgaaacaactacgagactctgtaatctgtgtgcagctttgcaagtgcatgaaaggttcatttgatccatttcctctgtgtttgtggcctctggtttatctgtcgagttaagatggcatcaacaatgttgtaacatcaagaagtgtgttctcagtgataattttttttcagagctcaataagaaacttccaaactagcccagcccagaaagcaggctaacaatgtccatgtccatatccagcccatttgtctgacactacatgggcttaagtgggcctatcgcagcagagctcgctgaaggcccataggccgaaaccgtagcaggcttcctcacttatgtacctatagcttttattatggaaattacaataatagattggggcagagctaaaacgaaatggaggagcttaccacttatttgttttactctgctttataccaagtttatatgtataattctataaaagaaattaatgggctgggtttgtgggtgcctccttgattcctcatgtagctccgccccccataatacgcaatactaatttctttcaagaaaacgacaactctctgtaacatgtggtatcgatacatcgtttgacgtaagagaaaaagttgtaattttgtatataaaaataatgtgatacttttgtagtagtttcgtgaaatgcaggacgacataagagaacaaaagtgcaacaacttttctttttatctctagttttatatatgttcaaatcgtagtgtacagatcggcgcacctctaaataaatatatcatgcatgactcatgtaacacgaggcacgacctaattaattgtaacaaagtggctaaactatatgttcatataggtccaacaaaggtactcctattgatcatataacgtaaaggaacgataacatcgtcatcagtatgtgtatattaattggtttctcgaataaacataactatatgtatattggttaacacaattcaatgtttcaggttgtagccataaagtacacatcacggcccacatactcttggaagccctagctagagtaattgaaaaaattccaaggcaatttgacaatattgatattgcaacatatatagatttatcattttcttaagaagaattcggagttctttcggtagacaaacaaaatagacaagtttcagagaatatacaatagctttatcattttttcagatttcaacttcagtagtatttatctcttgtgatttctctaactacataactatactattccatccgtttcacaatgtaagtcattttagcatttcccacattcatattgatgctgatgaatctagactgatatgaatgtgagaaatgctaaaatgacttacattgtgtaagggctgcag

SEQ ID NO: 7437 - DNA, 5040 bp, Oryza sativa
ccccccccccccccccccgcgtctgccataggggtggtgaagaagcctgcctgcgcccgcgccctcactgaaaagagaagagagaaaagagaatagaaggagaagaaaaaaaatgtgcagcttacatgtgggccctatgtattttttaaaaatattttgctgactaggatgccacgtcagcgaaaacacccatatatactgccatagaaccttgagtgcacgatttgtgtgaatttaggggtacatagaaatttctggttttgtggttaaggaacctcaaaaaaaatctcgctgttaagttgagggacctccggtaaacttattccacgtgaaaatgccggtatggtaatattgataattgagcccacaatattctgttttttttaaaacaatcttttagacgcgcgcacatcacacttaattacacacacctaggtttacaaatacgaccataactgctcgggtttagaaactatcgataaattggccaagttcaaaaaagaattcaaaatttagtaaattttgttcaagtttcactgtttttgtccccccaaaaaaaacactagggagcggttttcgttgacgaattgcccttgtatgaaccgttctcactcaagcacgctggtttttgctttgcggcgagccgccggtggtgttgctcctagctaggccctagctagttaatcttcttctccagcggattgtgtcgatcgaattcaattcgaatctcatctcacccctacatagtggatcatgtacgtatcacgtactcatctcctacacatcatctccaattaatctaattcagattttctcagaaagctcagccattacatcatccaattgcatatttgcattctcatctccatgaaaagatcgaatccggttccttcggccaactcatgtcccttcttctccacgtcgtggccgacgccgcaaaagctactccctccatcctatataaaatatttgacgccgttgattttttttaaaatatttgaccgtttattttatttataaaatttaagtaattattaattcttttcctatcctttgatgtattgttaaatatacttttatgtatacatatagttttacacatttcacaaaaatttttaaataagacgaacggtcaaacatgtttaaaaaaatctaacagcatcgaacatttaagtaaataagggagtaattttcagctgtttgatctcgattgccgattaattagttgacctcttcgcttatcctctacacccgtctcgatctttcgctcaattccgctttaatttggtgacttggcgatcgatcgagcgagcgcgccgccggttcgccgccacgtcgccgcggaactagaaacgccggcgccgggagggaatccggtaaagccgtaaattaaaggtgagtgcatgcatggaatcttggaaaattggaatcaaagctaagctagctaagctaggagagattgtgcgaatcatctagctcaaaattaatctctctctctctatatatatagcttcatggctgggcgatcgagctgcaacgacacctgcaggctagctagctaacaaccagctgagaggttaattaattatgatttgtatgagagatcgatcgagaagaggagtagcgagggagaggatggcggcggtgagcgtgggcggcggcgggaggaacatcggggtggcgatggacttctcggcgtgcagcaaggcggcgctgcggtgggcggcggcgagcctggcacgccccggcgaccggctggtgcttgtccacgtcaagccctcgttccagtacgagcagggcgtcgcccacctctgggagcagcaaggctcacgtaagcttactgctaccactgtcctatactacctccgtcccaaatatgggtaaccgtggatatccgcgtctagtatttaactgtctgttttatttaaaaaagaattatgaattttttttaaaaaaatactattcatattttatcatctaataacaataaaaatacaaattaaagatttttcaaataagacgaacggtcaaacgtcatgaacagggtaaaactatacttattttgagatggaaggagtattataaattgctttaattttttttatagctaatttttaaaacatttgattaagtttatatataaaaaaaatactaacatacgaaacaaacgtatcactaaaacatatttaatggaactaatttagtgctatagatatagcaatatattttttttataaacttagttaaatccaataattaattagaaacaaatttaaaacgactttgtaataccaaacggagagagagcagagagagggagtatttaatttctttcttctagcgcgtgctaatggcgattcctcaccggccggagtgcagcgatgatcccgctggtggagctggccgacccgcgggtgagcaggatctacggcgtcgcgccggacgcggagacgatcggaatcctcaccagcgccgccaaccagaaaggggtatatatactgaatggtttactgttcgatcgtctgttaatccttgtgtggtagtagtatatattgaatgcccattggtgatcgatcgatgatcactggagaaatgaatggatggatgcaggtggaggtggtggcgaaggtgtactggggcgagccggcgaagaagctgacggaggcggcgcaggggattcccctgcactggctcgtcgtcgggaacagaggcctcggcgccgtcaagaggcaagcacatccatgcatctctatctctctctgtatggtggtgtttgtttctattaaagagaagataaaattaggacataaaaaatgaaaatatattagcgtataattaattaagttttagttattatatattttaaaattgaatttatctaatattttaaatcaacttttttatataaaaagttttcaactagagtatttagcaagttaaaaggtgtgttagcggaaacttaattaggaaataatgggacatatatctatcatgagtatcaatcatctcatgatagtacctactccttccgtttctaaatatttgacaccgttaaatttttttaaatatgtttgaccattcatcttatttaaaaaaaataagtaattattaattcttttcctatcatttgattaattgttaaatatacttatatgtatacatataattttacatattgtattttacaaaagtttttgaataagacgaacggttaaacatgtgctaaaatattaacaatgtcaaatatttagaaatggaggaagtactactaataaagtactagtacgtagccgatcggtaagctgaattacacggcgaggaatttgtttaatttgtttggttaattaatttgttgcttgatatatatgtagggttctgatggggagcgtgagcacgtacgtcgccaaccacgccacctgccccgtcaccgtcgtcagggagaacctgccgcctccgccgccgccgccgcagccaccgcagcccgtcgcaacggcggcgagctactactgatggctgatcagctgcgatttccccacgtatgtctcggtcagctgtaaagtcggttgctgtgtgactgggagtctgggactgtctctgcttgactgcttgtgcatagtaaaaaaaaaaaaaaagggattcctaaaactgtacttttgtaataattttgtaaagcaaaattaatgttgtaccatcttcgtcccaaattataagaatatatatgttacaaatattgtaacactagaccattctgattttaagtttttatattttgaaagggatggatagttatgtgtgaaagtattggatcgatcagtcgttgaacaaaaaattctagctagtgtgtgtgatggtgcagctgtagatatacacgaatctatcattcggtttaaaattctgatatccataattaaacgatgtgcgtgcttaattataatcggtgtagaagctagaagatgctttcagctttctctatcctaagaaagcgaaaaatacttctattactatttcctacgaaagtatatagacttttgtgtctttgagatggattcaggctcatccgaacaaggacaaagtcatttacccgttccatcatttcgtttatgtttacgtttgtaaactaaatttaaattttaaaatttaattttatagttaattttatgttttttcatcatagtttattttatataatttgctttataatcactaacatggcgtatataaaaattttactataagctattttttaagttaataataaatggacacgtatataaaaaatttactataaattattttttaagttagtaataagtggttcgtaaaagcatagacctatatatttgtcaacaaattttctcctaaaaatttaatagatgtaattatagtataatcatgatgtaattacactgtaacttattacactataattataatgtaattacatcaaacaaatttttagaagaaaattttgtcgacaaatgtataacaaaatgaaagcgtatgcataagtgagtgagtatgataatccccagatcaaccctacatatgacgggctgaattctgacctacgtgttatacagcccagtcagatgagcttcgacttgtgagtgcgtctggctgggccgaatcaaagtaatataaggaacaagttcatctgaggtgtcttaacttgttaacgaatccgattttcgttcttcaataaaaaaaaacagatacaaacggatcccttaactgccaaaaccggtacaaaataagtctcaagacgatttggacggcaatttaagctgacgtggcgcctacgtggcaatttaatttggaaaacaataaaaactatggcccccacaagtcagctacaccaaaaagattaattaaaatggtgaggcccacgtgggcctcatatgtcattctcacccctcctcttcttcctcctctctccgcatcgcccctctcttcttctctcttcacgtcgaggattcgtggactacccagacccgccggcgttgaacctagaggtgtctccattcctcggcctaccttcct

SEQ ID NO: 7438 - DNA, 17479 bp, Oryza sativa
ctccacataatcagtaacacttctccattgttagaggagctgctttcgctcatttttctcacgtcttctatcattcatgctagcaaaacaagtgcatcgtatagctaagaaacgtctttgttgctgttgtacatgttgtaaggaaccttatatcttttctaatgtaaaatttaatgtctcatcaagatcgtaaattcctttcctttcttgaataaaaccggtttgagatatctcctgagcatacaaccataaaaatgtggtctttgtcaaacatggaagatcagaaaaccacatatgcatgtaggcctaaacagtaaaaaaaattattagaatctttcactcatgcaacaccaattgagtccactgtattcacttaagttgtctatactatcatcaagagacttttaaaaatttgctatatacaaaatgataatagagtgagtaggttatttaatatcatatctctctatcttttactcaattgtctcttagtgaagacacagcacagtgatgaggcatcagaggggcatgtgggcccatagaaagtgggccccacaaaatcagtaacacacgtctgtctttagaggagttgtaaggaaccttatatcttttctctataccaagtcatcaaggttatagtttggttgtttctttaaaaaaaggttattgtatttttttggtaaaatttgctccaagacatcatagttttgatgttataaattgtcgcaagctatggtattggatatggaggttaataatacatgtaagaaactttctaggtatggattattttttttcatgtggtttatgctaagatgatacccggagtgtcaactgtgggtcaattgaatgaatctaccgattattgaaggggaaaaaaggtgcactttttttgggaaaagcaaaaccacatgcaaaaggaaagtttacgtatacacatgtgtgcaaacggtttaatgatgatttgaaatggttcagttggtaagcatagctattcttaaggctaaacacaacaacttgaaattcgataataaacagatataaaaagcactattttaaactatttgaattgatccgtttgagaactttcacaaatttcgtcattttgcaacaggcaatggctaacaaaaataaactgatcagttgctctgaactttgttcatatctggccctgagcataatcatgctgttgagacaaatttaaggccaacctggttgaatttatgaagacaaaagtgccagagccaagctactgctttgaccagtaaatcctagcgcaatatatttatgaaactataacattacaaaatcattttttcgagataatacaagagttccatgcagcttatactctcaacaagctctatatagttctatgctgtacattcaaaagttagatgacacacaagtccatcatatacctcaatttacagtagtgtagtttttttttgtgtgtgtgtctaaattaactctaatatttcaccaaaccatgttttgcctgtctgatactctgatcttgaactttggtaccttcccaattcacagctagcttaacaaaaatttgcattcgcaggagtttccagtagagaactctagccacatcactaacagcactactcgtgtttgtgtattatgcaaattccttgctggtgacatcatcttattcaaactcattctgatacccaatcacatttagaggagaacatcatcgttgtcatctccaaggattgacagagagaatggtgcaattgcgacattgaatgtagacgacccagctttgtcgatgtgcttcatctcaaaatcaccttcctaaatccaaaagagaattcaggtaagtttgctttgcagacatgcaacacgcaaacaacctaaacaataaataaattgcaggatataactagtctttcttaattgaacattactatttcttctttcagcttcaatcaaaacaattgatctagataccatgttaattattgggcataaattgatgccagctatatgcaatcaagagatattagaaccatacgaatctcttgcacagctagaatctaaaaattactttacaataacctatttacaagtgtgacaacataggttgtggaagatttagatgttaccattctcccatttggtgtgtttaatgggcatgcagatgagtactcaaaaccagtccttggaaatatgacaggttgctctcccacaacacctacacccctggcatggcaatggagcaagtctttattagctttaacatacggttcttttggtaaggtgagagtacaatagagacttaccaaatgttctccgtccttccatttgcatcagtgacaatccaatgtcttctgagaagctgaacagggcgctgagaattatttgtgattctgattctgtaggcaaagaagaactggcccttcaaaggctggctccggctttcaatataaacactcctgacttgaactctaatcccctaaattcaacattaaaaaatatcaggaaatctagttaagctcaatgaagaatctgagaaaatatttgatctacattaactaaagaattattacagaacaggtgacgaaaccaacggaggtggttcatctgtagtgcatgagattttcgtggaaaaaaagaatggggcgcctgaacatatgaaagaaatgaagtggtgcccaagggccaacgcacacagttataaccaactcaaatagattcttgatgaccttcacgtattaatctcttattttccatatcctgccttagctatttttttaggtcactacttgatacccaagttccctggtgaaattgcgtgaccagctgggggttttaaacactaatatactgccatagacaatgataatgtttcatagcctcaagttttcaaatgaccaaaccatttcattcaaaactatgatactttatcgagtgaaagaaacatgccagagttgtagtataacatcactaaatcattggattgtaagataccagggtagtagcatcactagaacattttaggagggcgtgtggagccaaaatcttcagttcatctctgtacttagcagcatcctggaaagcatgaaaacagagaaaaatcataaacatggtgaataaaagatgaagaaagaatgccttctagactgacaaccagggggtatgaaaatatctacacaaatcactattggcatatgattagcgtaaggagcccaaattcagcactatgtaatgatgaattcaaagttctggtcatgaaaacacaactccaactattacaagtagaaaagtcaacagtgaaggaagtaagtgaaacatgtgtattgagatgatttcttgacacttgagatttcctctcattttccgatgttatcatacaatatacagcacggagagaaaagaatcaagcatacaacaaaattgttgcatgtgcagtcgacaaaaggacacatcaggcatcactataaagcggcttttggcattttcggcagagacattgcagcaactaactgaggctgcacgtctttggattaatcgtcaatccacaaacatcgttagcaaggatggattgggacagtctcacaatccaactttgctaatgcctaatggggatatcacaatttacaggattctttttttagactacaattcacaagattcttgtatggaaatgtatcaactgaaacaagcaaatatggtaaggaaacaattgctatggatgtccaatacctcgaacctctcctcctcaaccgccttcttgagcgatcggcggagacgaagaactggctcctcctcctcgaatgacttgagcgaatccctcagcctcgccgcctccttgtaatcctgcaaccaaattattccaattcgcagtaaaccccaattcggatggattcgattgcaagttcgcttgttgaaagaatccaatggagctcgtctcgtctcgttacctcgaactgggcggccacggcgagctgctgcttgagcatggcgtacttctggctccgcatcaggaaggccgccgccttctccatccgcgccgcgtcctccctctcctcctccacctcctcgccgccgccaccactccccggcgagttcgagttcgagctcgagttcgcatccggcgacggcgacgacgacgacgccgcggcggccagcaccacccggcgcggccccggcgacggcaacctcgcggttcttgccctccgccccatccacaccgccgccggcgccgccggtgccggcggcgagctcagcgccgcccactgcatcccaagaaatccgaatcgaccccccaagaaatcgaattgagcgcctcacgcagagagatcagcgaggattcttggagagggtggcttggccaagattggctcctcttccctcgccgtggctgactaaaaatgggcgccgctcttggcccccatttctgtggctctctccatctccatcgccgccaagaaacgagagggagaggagtagaaaaaaaaaagaaaagaaaagaaatgtttgggcttaactggtgcggattagcgattggcgcgtcattattggatcagataagaacgatcgacatgttggaatcgcacgaaaaagatcccggattttgggtgtgggcacaggggcagccacgactccgcgattgcgatcgacggagaaaaacaacaggaaatgttttgtatgctgttagtgttaggtttaatagtatagcccactactggcatcaaatcatctatagccaacgtaatggtcaattcatataatagttgcttactatcctattaatagctggttccacctgtcatacacacattacgtcttggagtccgtactgcagctagctacagatctgtagtccgctgctcttctctctcttactttatctctttaaagtatgtttatagctagcttatagcctgctattgtacctgctcttagcttctttttgtgtgtttgattatgtggctagatttagggtgtgttggtaagttgggattggaaacccatctcctccgcacgaaaaacgaagcagtccgttagcgcatgattaattaagtattagctatatcaatatgattttttaagcaactttcatatagaaatttcttttgtaaaaaaacgcaccgtttaatattttaaaaagcgtgcgcgcggaaaacgagggagaggggttgggaacttagagcaccgaacacagccggcatgttcttcccactcatttctcaactaacatccctcgttttcggcgttcacgttttttaactgctaaacgatgtgtgttttaaaaaaaattacataagaaagttgcttgaaaatcatattaatatattttttaagtttttttactaatacttaattaatgttgcgccaatcttttactttgtgtttccatgtgaggaggcaaggttaactcaaccttatcagtctagttaccccgcacgcagtcaaactaatttaagtttaaaatatatatgattatactagtaaaatataggaagtacatttgcccttaagcgtaacacaatttttgtgaatgtccatgataaaaaaaagataataaaattgtccaatagattggactcatgaaggtcacaactatccgcccctgcttgtagaccagatgacacactactaccaaataaccaaagtggaggtctgcatcatagagaaggttctcttctcagttctcaccatggccatgaactagaatgccactaaggctgtgtttagtttaccgtaaagtttagattttgtttgaaattgaagatgatgtgactgaaaagttgtgtatgtatgacatgttgatgtgatggaaaaggacttaagtttggatctaaactttagatctaaacacagcctaagttttggttggctcatgatttagatgatcaagtgaatacttgttacagtgggtttaagatttggtttaagaaatagaatgagtttatccatcatcacttcttaaaaccacacacttaggttaaaagaaaggtatattgcatattgggctacttattgttgccaatattgtatattagatcaagaatattcgatctttagactttgaactagataattgtacatatgttttacgttggactgttcttatcttctttgttgatctgaaagctgttgacaccttctaagttctaacttgaggtttgcccctttcctactctcaagctcaggcacgtatgtgttaattagccccaaactcaagttctgcccttggccccgccaccatgttcgacctcaagcacaatctttatttattaacctgagcttaaccttgagtagatttggaggggagtaaaataaaagaagtatattagtcatgcgacctaacttgagtgatatgattgactcatagatatactcctactcaagcaagtcagcaacgcctattagagcaggtacaataacagactataagccagctgcaaatatattttaaggagataaatcaggagagagaagagcagcgggctacagatttgtaaccagctgtagcacggacttcaagacgcagtgtgtctatgacaggtgggactaggtattaatagtatagtatgtaactattgtataaataagctattagattagctatagattaattggagctagtagttggctatactattgaacttgctcttagtgcatagctcaaggcatcataaatatgttaccactatcagtgctaaaatgtggtggtggtgggtgtatagctcaacttacgacatcataaatacgtggggaggcaaccgatgaggagtgagaactgagaacattaatacttattactcacctgatggcatcttttcctccatgaagaggaaagaatgtaagcacagagaagagccgtagaaaagcaggatgggatcaatattatgattgaaattgaaccttttatgaaattaactaatctaaaataaaaatattctataagaataagtagcctaaaataaatttactaaaaataaaacgttccatcatattattttgtttcaaaacagacaactcttttgtcttgcttgaaaaggctcaagatgatggcctcatgttgatgaaaaaaatacacacactgatctaagagatttgcttagcttcagtgcaggtccaaggaccaaatttcactgttaacaccccatccattttttcaatgccaaccaaaaatgatttactcctaccttaatgcgtttagtctgagttaaaaccttcgatgaatttcagaatttgaataagtactcttctaaagtgtacaactcagaatttagaattcttttaatgcaatgccaaaacacgccatctattttagaaaaaaattaatttttaataatgaatttggatgagcacttatccggattcctcctcaatatttgtaatttccctttttttcttaatggagtactcctgcagagatcccggtataggtgtacaactccatacataaatgccacgtcgcattcagtatgtggggcccacaacgccatagccgccgggcccattccctgccactctgccagtgcccaccacgaaaaaagaattgaaaaaaaacactgtaaaaaaagaagcctttttcccctcataaaacaagtttttttccctctctctttagtctcagaagaaaaaaagaagtttttttcccctctctctgagtctcaaaaaaaaaaaaagaagtgttttttttcctctctctctgagtctcagaggctccccgcgcgcggagccggagaggcggagagcgagacggccaggtcgccgtcgccctctctcctcccgcggcttccagtggcctctcactcgcgccctcgcctcgccgcccactcgcgccgcagccgcagccgcagccactcctcctccataagtagcagatggcgtctcctccaccgcgctctcgcgtccgtgtccgcgcgcgcgttccgcgactccagggcggcgttcgatcgatttgatttgatttgaggcggcgccattgttgtgaccaagaaaccgtggacgcgtggttgtggaacgcggcgtggcgaggcgagatgcaggccgtggcggcggcgacctctagagcctgggcggcctccccgcggcggcggcggcatgtcgcctcgtgttcttctcctcctcctccgacgacgacggcgacgacgactacgtcgtctctcaatcgatgcccggtcgccggcgcgggcgcgccggtgctgccgctcggcattcgcggggggcgcatgctgctcgcgcccccacttctgtggaacagcggcgccgcggcgaggaaggcggcggtggcgacggccgcggcggcctcgccaccggcggaaggcggcgggaaggcgaacggcggcgccgtcgccggcggcatttcgcggacggtgcagctcggcgccatgatcctcgtctggtacctcctcaacatctacttcaacatcttcaacaagctggtctgcacatatatttttttcccccaattcgtcaatttccttctccttctcgacatgttctttttcgtctctaatttgttcatggcggatcttgttggaatccatggcttgcaggttctgaaatcggtgcccttcccgtacaccatcaccaccttccaattcgcgtccggatcattcttcatcaccctcatgtggttgcttaatcttcaccccaagccaaggctctcccttggacaggtaacccactgttcttgtcaaaaaaaactggaataatggaatcttctattatatactaaaagtccatgagactttctacaaacgctctcaagccgccaagtggcgctctaataaaatagagaaaatcctagaaattctaagaaaaaagaaaaacaactaccctttgattttcacttaaattggtgagtccaatattatacaccgttagataaaatcgatcttaaaacaaactaaatatcatgggtcccacctatcttcctcctgcacgttggcaggtggcaggtggagtatatacgtacgtatacattatacgtacgcttccttcctttttttcttttttttttctttttttcttttccatttatatatatatatatatatatatatatagtgcatatattttttaaataatcataattttacaaaacaaagaatctaccatcatataacaaaaaatcttcctttcaaataatgcactattttaaaataaattttacacaattatattatgtacctattaaataaacaatatctatattaactaatttatacgtgcacttaaactgatggccccattatataaatcatcggatctattttttattacattggtatattattctcaagtaatgcactgtttcaaaataaggtctacaccattatattgtgtacccattaaattaacaatttaaaatatatattaactaatgtacacttacactagaactggtggacttattattataatcatcgtatctattgtttgctaataaataaagcgtccgaaattcttttttttttgcccgctgcacaatgcacatttgcacctttgcctttcgcatgggtgacaaggtgtagtgtttgagacatataaggtgatcacaaccaccgtagagctaccgctttgccatatatcaaatcatatatggagatgattaattttgttaataacatgaaaagaaaattaaaggtgtgatgcagcgagagaataattaagcaccatgggttatgtttttctcaacactaattagctctgtttaagttgaaaccgagagttgattatataataattataatgtatttgtgttatgtcgtatttggattttgtactatttgttcgtaaaggtgaaagggatcattatgttataaatgtgagcgtaatattgacgaatattaatagaactcttactatgataagggtgataaagggagtttaaggccctttatttttttcccgattccatattttggatttttgtttgcacactttccaagtttctaaatagtgtcttctttaaacaatattctaactttttagaagtcaattcatttgttatacccttaaatagctatcacataaattatataattcattaatttcagctatcctgaaccttaagtactacatattttttttcatgcgagtcatggtgataaatcattaaagtcgtaaaattaatatgtaagagttactctgaacaattgtaaataggtgtcaaaattaattgctattaattagacatctaatggcttgcaagccacaaaattaatttcactctacatgtatataaagatggacgaagttggaacaaatattaccatatgtcccatacatatatattgcacagttaatattctaattacatgtgttaagtcatttaaaattcatgaaaatgctctcaagctgcgacgtggtgctctaataaattagggcaaatattagaaattctaaggaaaaaaaaatcaaagtatctatttcttgattttcacttaaatcgttaggtctaatattataaaccattacattaaattgatcctagaacaaactaaatactacgaggtcccacctctcctcccgcggcatacgtacgcacctacttacatgggtacgtacgtttcccctcccttttttcattttttctccttcttttttttttaccatgcatatgcttccctccctttattcctatatcatacgtcttcatgagacgatttaatcaaaagaattttgagtatcttgcactcgcatttttcatttgtggccatactacacggtatatatatagatggactatatgataattaactagcaatacctttcaataatataagtgcccgtgcatacgcgcgggccaccttcctagttattagaaatgtcttatattgtggcaaaagtttgtgtattggaatactacaatacaattctagaaatgtaatgaattgtggtaaaaaaaaatgttgttagtgcagtatgcaaagatcctgccattggcattggtgcacacgatgggcaatgtgttcaccaacatgagcttgggcaaggtcgccgtttccttcacgcacaccatcaaggccatggagcccttcttctctgtccttctctccgtgttgttccttggggaggtacatgctttgttcatgatttttatattttgtcttaaaaagaggagacatataaccaaagagactgatcggtttatgctttgaaacaaatcgtgtgtttcggcagacaccctctttcttggtcttaggttccctcgtgccaattgttggtggcgtcgtgctagcatcgatgaccgaagtttctttcaactggtcagtggtatctattatctttaattccaatgcctaagaactgaggagtccttgatgctttgacttctgtcttcgtatttgtttaagcaatacaatgcattttgttgtaatgtagtatcgtgcaaaacttttgataaaacaggataggattttggagtgccatggcttccaatcttaccaatcaatcgcgaaatgttttcagcaagaaacttctggctgataaagaggtgattttcccaacccatgaagttgtgtagttcctcctacaagaatatttttcagcacaaaatgtatattcggacatttacagtatggtaaataccgtgaagcactgtatacctttacgcaatttgttcatatcgcaggaaacattggatgatataaacctcttctcgataatgactgttatgtcatttttattatctgccccactgatgctgtctgtggaaggcatcaagttttccccatcgtacctgcagagcaacgtgagtgtttgggctgttctgtattatctttgctaaccaatgttttattcaaacactgtctttttgggcatgtagggagttaatctacaggaactatgtatgaaagctgctcttgctggcacttgttttcatttttaccaacaggtgggctaaattccagtataaaaatagtttttatggttgtccaacggttcttagaattttgtagtaatttttatggtttgtctgcatggatccaaattttctagtggtggctagtaatacatgagtgtatctgcaagtttttttaattaccatggtcaatctctttcggattttgtttaattaccttaaccaaaattatttttgtttctgaggcaggtttcttatagtttattggctagagtatcacctgtgacccattctgttgccaactgtgtcaaacgagttgtggtcatcgtctcatccgttctcttcttcagaactccgatttcacctattaatgcccttggtaacctcacaaccaaattcaactgatcctaacagctcgcttttcaatttacccgtactgaattttgtccttttttctgcattcaggaactggcgttgctctagctggagttttcctgtactctaggttcaaaaaagctaaaccaaaggctaagactgcatgagtcaacatacacagctgcaatttaactagaagattcaggtttatctcttcttgaggtgaaatgggccgccaagcaatcacttggcttctctccaatttgtcttttgccagcttgtctgggtcttagaagcttgtgtataagatttttctcaggaaggtagtgatggaccggcaccaaaataacaaaataacattgtcagaagatttctcaagagaaatgaattttggcacatacttttgaaattcctgtccaagaatattgcctccttttttactggttcacttaaaatgtgagtagggatttttattcattccttttgaatttggctgaatgctcaccagatcagactacagtttgcatcacacaaaaagaaagtttagaagcttctatcttccgcctgttcttttttgtaggccatgaaactgtagaaccttctctctctgttttttttccttggtaatgggtgaaccagactggattgatactctagctggtaattgacagccatactagccagtcaacagaagatgactcctttgtggatgagaagttgggaatacattcaccataaaaaagatcaaagttgaaaggaaaatgttgaaaagagaacatgaagcaaagaagctgaggaggtccttgtcctacttcttgttgagagaaggatggcgcttcaatgattggtctatccaactattcaacctagcaccactagatgtttattttattttcttttcttttttgaaaccaaataaaatgtttattgttatagtgaataaaatcccaatttcaagggtgctactattactatctggtgtagaaactgttcctggattgaatttttgcagtctaattgatgatatgacagacaacaatacagtctcaaaaatatgtaacgccgttaactttttacgtgatgtctaatcgttcgtctaatttttttttaaaaaaatataaatttcatttattttgttgtgacttgttttataaaaaaaactataatcttaacttatacttttacatgtttatactaaattttggaataagaggaattatcaaatgttatgaaaaaaaatcaacagcatcatacatttagggacggatggagtatatagcagaaatgcaacaaaatcaacaaagttcaaatccatagtgtgaaactagcaaatctgtcataacaaatagcaactcatcatgatgtttcactgcattaatgcagttgttattgtccaaaataaatacagaagccataaactagtgtggtgttcttattcaaaagtaaaaaaaaccaaaataaatctcttctcattgacgataaagcgcacagagaggttaatttagctcttctttaagtggtcaaaattggcgggaggtagtcggatttggcgccaaggatccgcgcctgggtgtccgggaagaactccacgccggggagctgcgtgatggtgccgtcgccggcgacgccgacggggtaggtgagcaggtggccggggaggtcgcgctccggcccgtcgccggcgtagaggtcccagcacctgtccgccatggcgttcaccttgcgcacgcagtcgaggctctccggccgctggaacgcctcgtcgacggtaccgaggtgctcgtaccacagcgccatcctgaacccgtgcacctgccccctcgccggccgccccgccgccgccaggtggtgcggctggtacgctcccatggcgatctccgagtccctcgccccgtccatcgacctctggttgatgttcgccgacccgacgatgatgtactcgtcgtccactgatgaacacacaaccaaatcgatcaagaaatgcatccaaaaacaatcgtggtaagatcaatcaggagatatatacgaaccgatcatcatcttggtgtggacgtagatcatgaagcggcgattctgctgcgcgtggaagtagccggtgtcgggctcggcctgctccggtggctcgtactcgccggcggacttggcctcgcggttgccgaggcagaagaaggtgaggtagtccttggggtcggcgtcgatgcccttggcctggatggcgtgggcgatgtcggtgtacatcatctccatagtgcggcgctgccagtcaaggatggcctggacggagccgctctccgggatgccctccggccacatcggcacgacgacgtagacggtgaagcgctcgccggcctcgatcttgctcaccaccttcatggagagctccttggggatgaggtggagcgcgccgacatcttccggcttgacgccgtcgttgggcttccagcagtaggagctcccgaggaagtactggttctcgatgtagatgaagctccgcgccctcctaatggcggcgatgtaggcgtcctggatgctccggtcgatgatctggtccttgccgctgacgaggccggcgcgggcggcgtcctcgggggtgtccgggaagccgaacgcggcgccgccgtcgatggagcggaacagctgcacgttccacgactcggcgtcctccgggaacatcgccggcgacggcgggatgaccgtctcggcgaggtcccggagctggacgaggaggtccttgccgccctgcttgcgccaccgctgctcgaagttgtagagcacgtcccacgccacggggccctcgaggcggcagtggatgtcgtgccacggctcgcgcggcccgcccttggccaccgtcgccgtcgcgaagttcggctggtggaagtcgtcgtggtgcgccgtccccagcgtccggaacagcgagtggaacggcgtgtcgtacctcccgtcgcagaggtccagcccgccgacgaagctcaccaccctccgccgcccgccgccattgccgccgccgtggcgcgacgacggcatgtcgtggtcgacgacgacgatcttctggtggtgcgtgaacatggtggagatctgcaggtcctgcacgatgctgccggagtcgtccgggttgcgcgggcacagcacgcagttcacctccgtgccctggaagtagttcatcgtctcctcgtcgtgcgtcgccatgagcccgtccttcttgagcatccccaccgacgtccggtcgtcccacaccagcatcagcaccctcacgccctcgccggccttcttcttcagcagctcgccgagcgtcacgccgccgccgggcttcggccggtcggcgtccctgatcagcgcgatctccgtgtacaccgaccaaccagtgatatagataaaatgcctcgcgccattgatggcgtcgaagatgtcctcccagcaccggtgcggctcgtagctccggccgccgtcgagcgggatccgggggatgaacccgtcggggacatgggcgtcctggtacaacgtcaccttgcatccttgccgctgcgagaagaaggtgtagggcacgccggggtacttgccgctgcggacgccgcggccccagctccgatccttggagatgtcgaagtactggagcttgacgtggaccttgccgccgccgtcgccgatgggggtgcgcgcgtcggtgtcgtcgcagagggggagccagcggtcgacctcgtcgccggcgaggacgtcccggacggggaggtagccgacgccgaggagggaggcgccgatggggttcttggccttgagggtgaaggcgacgtgggtggcgaggtgggcgcagtagacgtggaaggactcgtaccagcgcggcgcggcggtgtcgtcggcgagcgtgcgggtgcggccgacgcgggccttgtcgaggccgatggtggcgtacaccttgctcgtccccttgcccacgcccaccgtgtcctcgatcccctccaccagctgcgtcacattcgcgcaaatgcaaatgcagcttcatcagtactcctacagttttctaaatatttgacgccgttgacttttttaaatatgttttatagtttatcttatttaaaaaaattaagtaattattaattcttttcctatcacttgattcattgttaaatatagttatatatatgcatatagttttacatatttcataaaagtttttgaataagacgaacggtcaaacatatgctaaaaagtcaatggtgtcaaatatttagaaatggagggagtaacagattctgagtgaggatatttaaatttgaccctttttttatatctcagtttgtaagttgattttgtgaagtgttgtatatatgctgtatgaatgttgtcaaaagaatttttcataattatttgaatgggtttttgacaaacaagagacatcatctcgagggatcaaaagagtttaccgaggcaaagcattgcaagctattttttgatttgatttgaaaaatataaatttcaacaaaacactagtactccctccgtcccatccctccgtcccaaaaaaagacaaaccctggtttccgtgcccaatgtttgaccgttcgtcttatttgaaaaaattatgaaaaaaattaaaaagacaagtcacgcacaaagtattaatcatgttttatcatctaacaataataaaaataataattataaaaaaatttcatataagacggacagtcaaagttggacacgcaaacctagggtttgcctttttttaggacggatggagtatgtttgtagactagctcgtcctatagattgaaaatgtatgcacatgatgatgctactgatggtaatttcaatatgattatgactcgaatatcgccgcacacatttccattggatagaagagagaagagaggattagcaaaaaaaaaaggaatagaattggactgtagcaaaaggagcaaatcacgttcatgcatgaatggatggcaagaaccacttccggttatgactgttaaaacaggcaccagctaaaatctaaattataaaacgttgatttcagtttttattccattatagtctattttccagcattgctttctaaaacacaaacaacacacatatataaaataaaatcatcaccataaattatattcggttgctttcgctcatttttccatgacttatcagccatgtctcaaacgatcagggtaaaacactagacaactcgttcgttgtacacgacttgaaagttgaaatcaatacggcaaataatatactccctccttacttaaatatttgacgccg

SEQ ID NO: 7439 - DNA, 13719 bp, Oryza sativa
tatgagttgttttatcactcatagtactttaagtgtgatttatatcttatacatttgtataaaatttttgaataagacgaatggtcaaacatgtgagaaaaagtcaacggcgtcatctattaaaaaatggagggagtaaattccggcagagctcctgccgtcgtcttcctcaaaaaaaaaatctctctcttcttagctgcaaaatgcatggaatttactgttgatgagtatatttaacggtgagtagctcattcactaaatataagctaattatgtttatttatcaatctggacacgtagaacatccggctggtgattgacgtacatcagtaagacgtacatgaccgtcgttcagaacaacggccgccgggctgccgcagccgccgccgccgccgtcgcggtcgccggccgcaaggacacgtcagccagccggcggtgtcagtgagaaagccggtgaagatggtggcggcggcggcggcgagcagttgctgcaacaacgacaggacgtacggcttgttgtgtgcatgcgcggctggctgatagcggtgtggccatgctgttcgccgccatggcgttcgaggcagcgctgcgggccgggcctgcctttaagccatatcggagacgcaattcgtatagacagaaacgaagttttgtaccatacggaaaatctacagcggtttaaacccatataaaagaggagacgaacgagttgctcccgccgagctcggtggcgcgagcttgtcaccccagccgtggggggtaggagttggcagtgtttggccgttgttgtggggatcgagggtataggagatatctctctccccgggggatgctatcatgatgttacatccggtctcaattgagttgagttgccactggttgaggtccctacgttctaggctggatagccctcgtgtcgttagattacaatgtctaggtgacttctcaattgagttaccgttctaggctggacggccctcgtgccgttagattatgatgtctaggtgacttctcaattgagttacgttctaggctggacggccctcgtgccgttagattatgatgtctaggtgacttcccgctcacgagagaagccctactgtctatgctgctaactcctctttttttttttaaagcacaaatgcttattaactgtttttttaagcacaaatgccattttgacggccctcgtgccctatgctgccaactcctcttttttttaaagcacaaatgcttattaactgtttttttaagcacaaatgccattttgacggccctcgtgccgctgactatgacatctaggtgacttcctgctcaagagagaaacccaactgccctatgctgccaactcctcttttttttttaagcacaaatgcttattaactgttttttaagcacaaatgccattttaccttcttattaactgttttatattataagtcgtttgatttttttcctaatccaaatttattatgtttgaccaagtttatagaaaaaacgtagtattatttttaccttcttattaaccgttttatattataattcgtttgattcttttcctaatccaaatttattatgtttgaccaagtttatagaaaaatatagtattattttcaacataaaacaaatatattatcaaaatatattcaatgttagattgaatgaaactaatttgatagtttaaatgttgctaaatttcagatcagtttacctttaaattaaaacaacatttacttcccatagccatgaggtgacaaggaggtttggccagttagaaaaaaaaaataaaactacatttacctcccttaactgcgaggtgagtttgattaaaacccggtataaagacagctaactattaaaatcggatcaatttatctttcaaggaggattggccaaagttagaaagaaactaaaacaacatttatgtgggacccacatgtcagggtgctctcttccctacctgccttgcttccacggtctctatgtgatctcttgatgcaagcatggaccatagaggcagaacggagacgaaggcgaagcttttcggcgatgtgcatggtggccgtgctaggtggaggaggaatcggaggcggtgctcgatgtcgggaaaaagtcgaggctcgacagccttccgaggtcttcccccatgctgtcccaggtcagccccgacatgacggatgctggccactctcgtgcgggttccactgttgttcctctttacgacctcgagtccgagctcctgcatcgagcccacccatgtcatcgcccctgcgacaccactaggtcggcatctcacctaccaagctcgggccctagatcagcagccgcctatgcttctcgacaaccgctgtcactgatgccaccggcgccccaccgcacaatagatttctccttgatagtagcgacctctcacctacctcttcctccctccctccagatttgccactatggttgagcttgtgcttgtgactcactcatcgagtagccgagttcgccaccaccgcttcctcgctcctcagttacagtgtgctcgctcacctccgccgtggttcggcagagtaccctctagcctctagagcctatgccttgctccgactacccacaccacgccacgctatagctcgcgtccctcagttcactgcccgctccctccctatcgaatctgaggtgctgatggatggccatggccaacacttgctggagctcttcctccactggcgtctgggacaacagagatagaatggggaatgttgtggagagtggagcttgataggtgcggccaacgagttttttttaaaaaaatttctaggtagatgccacgtagatcgacaagtcaacactatgtactaggtcaatatctacctcatccgaaattgttgtaaaaactgggggtggcaatttccccgttgggtccgaggacccgcccctatggagccgggacggggtagtactcttacccgcgggtgagcgagatagggacctcgtaacattccagatgggaacagggattaaaagtaacccacgggtgatccgacagggccatgtgttgggagctacctctttaaaatatcccatttcaagagaataggcccctctggcctattctaacttccccatataaaacctcctaaatcccctcaccctctccctcacccggcgaggcgtggccgccaccactcagctgcggctagaaggctggccgcagttgctcctctgcgctggatccccttgacaccaattttgactcttcaccacgacgccttgcctcctatttgtcatgccgccatgccttatcgttggtcgttgactcaacggcgtgcctccttgtcggccgccgactcttcgcggcgccgcctcgcctcctcatcactgagtcgcctagacaccgcactaccagccgccatccagcccctagccaactttgcagcccctgatgtggtgttctattttttattgtgttgaacatattttggtgctcaattgatttcattgtgagatggggttttctagcttgtatttgtaattagatctggctctttccctagtttcaaaatatgtattgtttatcctagtttgttgtgttactattgctcattgtgtttgttgattcaaggaagatttgactcagtgcggggccgtggatgagcattgatcgatttcgccccgttcatccctctggggctggggtcgcggaaacccgcggaggagcagggcggggatgttcatgtcgaacccgccccgttgccatccctagtaaaaaccatcgagagagttaatttgcattggttttaatagttgagggagtcttatatccggttttatggttgagggacgcaaatcaaactcagcctatagttgagggaggtaaaatggaatttttttctttttgttactatgctgcgttggacttcggcctaggaggattgtggatggcatctaaacccagcccaattgtggtgatagattgcctcaacagacaagccatggctctatcctgccccaactcctcttttatttttatgattttttttcttttaactagcaaggtctggtaatggtaatggattcttaccaccgcaaaaaaaaaaaaagaagaattccatgttggttagataacctagctctgatgttagatgatttgtttgctgtaacatcctgaaaatttccgataacaaaaatcactaaaatttcaaactttttaaaacttttacatcatgctggttgttatgattgctattgcttgccaaaccgtaaatgatcacaaagaaagtaaagaaaagatctaaatttaagcaatagatataatttatgagaatatgttatttattattaaccctaaaaatattagtgcacaagaaagcaagtcaaatattaatttctattataaatcacagatcagatattaaatattcgaaccatgattgatagcttgatgtcacaattagctaaagaaatagtaaaatcaaatctaattcatttgaatcatatctaacatgaaatataagaacacatgaaatgatgatcaccactataatgatcgtgtttataaataagtaattcaccagaatatatagattgatacttagaacattacgccgagttcctcatgacatgaaaatcactcatataaaataatggtcatataaataaattaagctttatatataaataagaatatgtgagtgtttaattgaacaattagattaatgttgtactgagtctcaatttatatttatagaatgaatagacccacataaaatgcattgttatacaaataagttcattcaatgtgctattataataatagtggccacattaggatattttaattaattttagaaccctcaaagcctccaaaattatctaggttaattttagaattagacctcatttaaataatacaatagaaaaatatatataagaataaaatatgggtaatattaaaatttggtaaactttcatctaaattaaaacatatattgggtaaactccatttgtgtgaaaattagggtttatagaacaagatctgaaaaggaaatcaatcaaataggcaaaataggaaaaagtcactattcattagcccctaggtgttcgatgtggtcccctagcccttcccactcctctgccacaccgcgcctagccgcctcgcgccccgcgccaccgttgccatcacgtcccgtcgccgctgccgcgccgtgcgccgtcgccgtcgcgtcccgtccccgctgccacgccgcgcgccgtcgccgtcgcgtcgccatcgccgcgcgccgcgagccgtcgccgtcgcgcttctgcgccttcgagccccgcgccctgtcgctgccgcgccgcttgaccgtcgccgtctgtctcgcgccctgagccggcgcgcgctgtcgccgttgcgtcacttgtcgtcccgtcgccgtcgactcctctgccgcaccacgcgccgtcctgtcgccgcgccgcgttccatcgcgacgccgtcgcccttgagccccgcgccgtggcttgcccattgcgtcaaccgccggcgccatcaccgcctcgtgccccgcctgcgccgcgcacagtcgccgtcgcgctcgccatcccaacgctgctccgcgccgtcccatcgccgcgcgtcgccatcgccccgagccccgcgccgccgcgccgtcccgtcgtcgtttaaagccggccacccctcccccgagccgtataagtaccccctcccttttcccttccctccccacgccattgccccttcttctccccttttcccctttcttccccaccaccgacgccacattccgccaccacgccgccgctgccgtgccccggcgcctcgccgccgccacgccgcacctcaccgccgtgtccccgccgccgtcgccgccggtccggtaagccctccctccttccttcgtcgctggtagtcgcgctgtgctgctcggtcgtgagagggagagaagaggaaaacagagaaagagtgagagagaaaagagaatagagaagagaggttagagtgggcccacctgtcaatggttcataggatttgctttagaaaaataatccggtaggaaagcaaatacaatcctaaaccccacatgtcagtcacttggagttttggataaagtttaggaataaaaataatggattaggaacagtacctttttacaatttctcggatttattcaaatttgaaactttaaactagcataactctctcattttaactcggattagagtgaaacttgaacctaaatttatctaaattcataagctttccaatggtatataatccactatttgataaaatacatttataattattaaataattaatactaagataatgcataatagttaaaaatgtgctaataaataaaattgatattgtactgtaaagtagatgtcaaataattgcccttaacatgcttcctcactgtaaaacctatgtaaactaattaggagcattgtttcaaattaattaaagcataggaaatactagtgccacttattaatatatgtcaatatataattatactcatgacgtccaaattgtataaataatgtttagcctcatactttgtgactaaaagttgaacacacgtagatgagtctttaacttgtttatgagagataataacagagctagtgtgactaaaatcacccgcatgaaattaattaacggcatttcctatacagtagtatatgtttaggttggaaatcgacccttaagttgtatagacggtaactcactcataaatccacttaaaatcacatgtactgtgtagctcgtagtaaatagtaattattcaaataaatgattcagtattaagatattgtgcacacacctatactgtacattctattatagttatacggtatagtattaatttgcttgttgcatacattaaattggagggactatatgacagacatgaatattagataaatactagttataaatcttgatctcatataattatagttcaattgtaaattaggattattcattgtaaaattatgtgatgggataatctgtaaccataatatgattaacctaaacaactctaacatacaaagcatggataattattaaccttttctaatttattgtgacaagtaaaatattttcataattaaagcaaagcctccatcaataaaataataatacaaatggttccctgcgattaattgcttgatcccaaatccatctaacaacagaacctttggtatgtaaccgtgctatttagatagatgcatatatagccataatccttccatagccatttgatagaataaatcgccgattagccaaatatatatgtatcccataaatgctatgttggttaactcctaaatagaccacgatgacaatagaaagattaagaagccttagccctagcatgattgaaatccattagcaaacacgaatagtatgagcaaccccaggatcgaccccaacaattatcttttgcttgtgcatatttgcttgttgtttgaatattggtttttctcgcgtattatagaccttgtgtatcggttagtcgtgaggcaacgtctgcaacttccaggaggtgaaggttgatcaaattatcctaagcaggcaagtcatcactattccttgaacatgttggtcccaattgcgaaattattttgtttacaaataaaattacatgcaatgatgaacatcctacttgtgattatgccatgccttgattattgtttaccccttattccttcgtaaccatgtttacgtatgagtccctagtcaattatgacaattgcttagaaatgctattctagaatcatgcatactcatatttatcaaatgctatatgcttgggcaattacctttgggaaggtaattgagatgcggcatgtggagacatgagcgccacattgccatgaaattgatgacatgatttgtgaaaggaaaataaagtgaaaacaactgttttcgactggggcggacggaggatttgggtggtatctggaaaaggctagtaccgtccccggtcaattaaggaccgagccatgaagttaagcatgaaacgacccccatacaaccgcacttctcgtatgggtatagacctagcggattagatagccgtgcggaggcagtatccctgcatagatggttcacccctgagtgaggcaggtgcgctacggtgggacagccgttgaggtagggccgagaagcgtgccctacatcagtgtcaccattggtagggctgccatgagtgtgtgagagagaaactaacttaatgagagtgtgagacttctctttcccgggagcgccagaactcctctcactgctagaaacatggacgtctagagtgcatgaggatttaagttcatggagcgggtactgccaaggcgaggttatcgaaaagctttgccgtgacgcgtctcatgtgttgggacgaggctcatgtgttgggcagtcgcggagtgcgggtaaagtgtacatccactgcagtgtgagtaaactaaatctattcgaatagccgtgctcgcggttattgagtaccgggacgtgtattacacttggctagactcaaaattcttaacttgtgtgggatgggatactgcatgatgatttttatgctgatggagccacttcctaagaggagggaaggtggatgtcctcagaaaaccatgacgactcaatggcgggaagctatccttgggatcacaatggatggtggacagaaccgtcgttgtttaatgtgaacactggtattaaaacttaatcagtctatgctaggtcttaggcttgtgaaaagaattgcaaagcttgctttacgcaaaagaaccggagcccttccttgaaataccctctatcatatgtattgttgttgtggtggtttgctgagtacggttggtactcacccttgctatttatatatcttttaggagagtgttgaagagaagcccttgtcggtatgcttgcgtatccaacaagatgatcggagtgcggtcttgttctaggtctcgttccctagtcgactgcctgtggcaagttaaccgggcctttatattattttgtcttccgctgttgttctctgatagttgttggcctacctggacctaatgtaagtatttaactcttttagcctgaattctttcgtgatatgttgtgatccaactatgtatgtgtgtaccaactactgatttagggattgatacggataaagacagaagatttccgatttctaaaatcgggggtctacatttgcttacttccattctagagggctgttttatgcaactgttgtatggacggtttacatgaagagaagtgctacaactatgctgctgcagcgctgctgttgttttaagctgacagtggttcattgcccatttattcttgataaataccagtctaccgaacaagacatggtcatgcttctgaaatatgttttttttttttgcgtgtgtttgtgcagctagtatgctgccatgctatcatatagaaagaaactaaaagacacaacaagggttgagcagagttctgtcgataccacaatcctattgttgacagttgtaagatcaaagtgtgttttgattcttattctgtgatgaacaattggcatctgtaattattggttttgatatttggagattactgtcgaagtagttttggagataattgattttcaggtgatgaacagggtttgctgttttgtcgggatcggtcagaccgggcggtggttgccggtcagaccggcttgtgttgagcggtcagaccggccggcccgcggtctgaccggccgacgctgtgtcggtttcggtttcgggttgttttctttggatatccgtgattgtttcatggttatggcttctagataaatactatacgtatgtaatactgttgtttgctactaatgagttaagttggggatagcttggtctcggaatatggtttctttgtttgtttcatgtgtaggtgactcgatgcctcgggagagtatttgcggtgatggaccgggagtcggcttggtggtaagacgatgtccgtggtggtcagatatcatgcggaatactaaggctagagttgatgcacgtggttgatggagattctatatggcatacgatggaggtattgtgtgcgtatgggatgcggagtcgaatttggaaggagtccaaatttagtacgattggttatgtaaagtttctttattgtactagtgggtttcctaaggtgtttaggactcctagtatgagtttggttcgtggctttaggctgcctacctcatatataaataaagggggagcgtgaggcttcccggtatcgcttttgtatcgcttttgagagtaattgagttgctagtttagttagggtttcgagtttagttgagatttttgtaaggagtgctgttggtgcactttgtaaacacaaagagaagcaataaagttgtcatctaatttaagagttcttcgatttgcgtttaccaggtttcggcggtctaaccggcaactcaccggcggtcaaactggcggcattgcggctgtcagaccggcgggagcacggcggtcagaccggcggcggcgacaagcgcggcgagcagcttcagcggtcagaccggttgatctataccggtcagaccgacggcatccgagcggtcagaccggcaaggtaacttcggtcagaccaatctccatcgatttcgagggtaacttttatttccgctaaaagttttcggtttttgggtatatcaaccattcacccccctctgattggcttagttcttgtgattcgatcctacaacagtcaatgttaatttagggacggtttgagagtagagggttaggctgagttcctaatcaaattacaaacacctaaacaaacacttgggtgaaggtaatcagaggaagcagcaatgactaatgactaatgtggtctctagctctgtttcccattttatgtgctcaataaaaacacattttgcttattttcaggcagccacctgagtttgttatcctacttcaccaaatcttcacctattttataattattctgctgttactagtttggtattccttgccaaaactgcaatatcatatctagctgaactagctagactgtcacatgaagtcgagaacaagttacaatcgcagagcaggtgaagtacatggtgagtttgagtttggcagaatgagaaggtgtaccaaactgtattcaatcatccaaggtttgcatatcatcgaccggcggcggattcagagagaggtggagtctagagccaatctgtaggctcctgaatcatcatccaacgcaatggcccatggcctcaatccctgtttctcggttacaaagttgttgcatgattggtccaatactccaattcacagaaactctgtagtacatgctcttggtctgaccggtgacctctggtagaatactgtcagtgctctctcaaacactgtcaaaaccatcgccgacatcaaacgttcaaatcaagtataaattcactacatttgcatcatgcacatccatgcgaatttcctgttatttgtaagacaacacatcttgatcaaattcatatccaaggctgaaggctcgatctccgggctagtaccatcccatgttacgtacatcagttctcaaagggataaaccttgatagtgatgagtttgtaacactaacactacctaggatattaagagatcctgaacattgaaaataaattaaggtggcggcgatgctgtgttcgattgagcctctcgctgtcttttcttttccttccgatactcgatgatcttgggccatactaagctgataaagagggtataggagccaaggaccaaaagcacaggtaacatccacctgatgacagtccaatcactcgagatggccaagacaaaggtgcaactggtgctaatgatcaccgtgaacaatatggcattcatgagtctcatggaatgactagccaaggacctccctaccgccaccagcgtgatcagaagcgccagggcaatcgtgaaggtcaccgtgttgaacatgatataccaccgtatccccctcatttggccctcggtgagggtggtggcggcgtgttgttgaggacttatcggggaaggagcagaggcgaccgtggctcggaatattataccgctatgcttcatgttgtgggagctaaacgcctgaggccagtcatcggggaaccaggcaggcaactgtatcgccgcctggaatgccatgcccacgaacagcgtggccaccgccatcagccacccgcgcttgttgttcaggtactcattgtcttccctcgatgttcttcgcaccaaaccaaggaatgtttgagagaattatatttaaaaaaacatgaaatttggtatatatagtacttaattatttaagtcatagtatcacaagactacaaatttagtatttgagatagattaagatgaagataaagttagggtacgccaatcgagaaagcatttaacgcttgattaatcgagttttaattattataaatttaaaaaacaaatatatttaatattttaaagcaacttttatatagaaagtttcgcacgaagtatatcgtttagcaatttgaaaaacgtgctaacgaaaaccgaggtaaaatcagcatcttaattagaaaataacatactttagaaattgagtgtcatgttttttccttcacaaaactacagatggatcatcgtttttttttttacgcaaaactacacattttaaaattttacaatggtaagaggtgtagggatagcacatctaaaatttgttttgaaaaagacgatactaaatctatgctttgagatacaatgatttaaatgtaaagctttatgataaaattatttctatatctgtagttgtatgatactatggtttaaatatgtagttttgtgttaattttatcaaagtactagtttagtgaaatttattctttaattcatttttatactacttcaaactgaacacaatctcaaacaagttttttttttctcacggcagcccttgaagagctgtaggtaggaagatatcacaatttctaattatatacaggtaattgagtttaaaagagggcactaccaacaaaaacaagccatctatatcgaccattggtgacgacatcataatttttaaactatcactgctgacaaagactaaaacttccgcacattctcgaaacaaaaaaaaattcttgtcaacattttttttgagggaatcttcttaacatttagaccaatcaagcagaaaaaatgatactactagattgcaaacagaacctgaacattttcgctaggctcgctgccggctggttcatgcggctgatccatggtctgcccgtgcgcgcttgctgcactcctctactccctaaatatccgtgtatattcagagtttcagatagaagcgctagctgcagttgttctatcttaatcaggctgctgccgctgcttatatagactaaccaaagttaattagatgcttggagaccgttctctttggactggagcaaggaatattaatcaaaccggtgtactggtaagtactactatgattctttgctatatcattaatcaataaccctcctaccattacctttttctctgttttctgaaatttttttctcctcggaatagctgccacgttgtctttattggtacagagctcctcgattggacaagaaactggcagcaagctagtatatcaacggtcatatcactgtttccctaaagaagtactccctccgtcccataatataaggga

SEQ ID NO: 7440 - DNA, 23209 bp, Oryza sativa
  unsure (1)..(23209): unsure at all n locations
tcgtttgtgctcctttgttagtctagcggcagtcggtcacgcttagcagcggccggtccggtgttagccttctcccggagttgtgtattggcactgtcagtgtgggggtggtggtatattttttttccttttcctggttacgaccctccagggttgtaatcttgtaatttttttcttgctctatcaatagaatctaacaccgtctcgtgcaggtcgttcaaaaaaaattatttatgattcaaaattaaatgttgtaaaataaacttcaataaaatctcacaaagttaactgtataaatttaaaagtttagcttataaaagcataaaacaaatgataggactggacgagtgatcgcgcagctttttctttgaaagggagtgggctaagtaaggctgtgttcgttggttgtggtcttggggatgaaactaatccctccgatacataaaacgaagcgatttattagcgcataattaattaagtattagtttaatttattttaaaaaatagattaatatgatttttttaaaagtaacttccgatttgaaaaacgtacgatttccggaggatatgagttggggaataacacaaccccgatcgctcgttggcatcacggcggcaggttggagatcgccgttgtgtagctggaccacggaggagatgccagatgcgtttcttgaactccatgattgatcattgaaccccacgaccccccctgggcccacatgtcatctgcccactggcaccatggccccacataccatttgtccattgttgccattttgtcatggtcacctgtctcctctctctctccgagtcttcgtgcagcagtaatggcatggcagatctgggccgttgatcgagatgtcaacagccctgcggtggggccggcatgagacaaaaacaattcaaccgacggtgtggatccgaggggagaaggagaagaaaaataatgggaatcaggcgaagctgctgcctgcttgtacctgtagtgtactgttcgtccggtagtgggggggtggcccacatgtcattggcactggttaggctccctaccaacctaccgaacccaccacaccaggtcaaacgatgaccaaaatattagtagtactacacgtgtactagaagcaggacgaaatgggccaataggagagccggatctccgaacgtggaccagcgccaaaataccacccccacaccacacgcgaaccgacgaaatgcaacatgacctaaccccctaaggtgttgtttggttggagggactaaagtggggctaaactttagtccctcctacataaacataagtccctgtagttcacaaacacctcctaaatacggtttagtactcactccgtcccaaaatactgtttggattggatgtatcgtattactacaaatctagacatatcagattcatagtactaggttcgtcacatccaactaaaacttgctatattttaagacggaggaagtaaatcaccactggaacaatagatttctcattgaaaacaagcaccgactacaaacgggaaatctagtttttcctttcaagtcacccctggaaaatttttgataagtttgctaccatcgaatttcatgtaatctctaactcctactgtttgaatatattttttaattaatgacagctgaatcgagggatgacaaaacgttggaatttcgtaaaaatcgaccggttttcataaaaccactatgtcaacgatttatgaaaaccgatctgtattagcctgtttttgtaccatgttgattgaaagtcatcggtttttatcgattttgtgttggatttcggtgaaccggcgagaagcgatttttactttgaaatcgaaagttagaccctggttgaatctcaagattgatttggacataattaccacatcaaatgtttttccagatacactccatctgtcccataaaaaaccaatctagtactggatgtgacacatcctaatactatgaattaagacatatgtatgtgtcacgtccggtcttagattcgttttttatggaacggagggagtataccgtaataaaacagttttttttgtgagctgtgagggggcggccatgtcagggtgcatcagcagattcagcagacggctggcggtgacacgagcaatttaaaccgttgctttgccgattagttgttgtatagtagctctattgctgattttttttttcaactaattgccttgaaaggcacttcattttttttcctacgtgtctcttttttctatttgaccgtgtatacgcactaaatttaactattttatttttcttataaacacattacaatcgtaaacgctcacaatacgcgcgtactcatccatataaatgcacacaccctacctctttgagcatcttccgaagattgagtcggcatatcttaagattaatgaagtcaccacatatacatcgtctatcactaaaagaataattaggcataaatacaattcggatgggttggtttcaccacaggaacctaacgagttaagctatacttactttggtttctactgatactaagtatggacccacctatatttttatgtgaattcgctattggtcttggcataacgtggaccttaacctaaataaattactttaatttaatttaatcgtgcccaagggtggaacagaaaaaagaaaaactaaaaatctcagcgttcatcgaggatcttatatttatccccgtctccgcgctcgtctcggctccttctttgcccacttcctgccgccgattttgcatctcgcgagcagagcagggcgcgcggctgcttccgccacatcctggtatggatccggatcctcttttctcatccatctctctttatctccacccactttcgtctcgaatttgtttgcgttaacccttagcttctcctcctagatctggaagcagccattttctttgaccaagtagtagcagtttgttcttttcccccaaaaaaatatgtttggatccgccccttgttacgcgttttacttcggtttgtgatacgaagattcgattttattttatttttatgtatatgtataagatgagattaggagagtataaatggtttgaggtttcaagaaccaaattgattgatttgagtgttgttggattgatcgtcgcagggggtggaatgcttgccaagatgcagtcgtgccgatggatcttggcttacttgctcgtcgttctcgtgagcctgcacggtggtgccaatggcttctacctcccgggcacattcatgcacacctacaccccaaatgaggtgatctcagccaaggtcaactcgctcacctccattgagactgagttgcccttcagctactacagcttgccctactgtaagcccccggaaggcgtcaagaagagcgccgagaacctcggcgagatcctcatgggtgatcagatcgacaattcgccataccggttccgagtcaacgtgaacgagtccgtgtacctatgcaccacggacccactcaccaaggagcaggccgagctgttgaagaagcgggcgcgagatctgtaccaggtcaacatgatccttgacaatctgccggtcatgcgattcaccgagcagaatggggtgactatccagtggaccggattcccggtcgggtacaacccgatggggagtaacgaggattacatcattaaccatctcaggttcaaggtcttggtccatcagtaccaggcgcagggtgatgttgtgatcaccagtgaggatggcgttgccatggtggagtcggatcgcaagagcggattccagattgttggcttcgaggttgtgccttgcagtgtgaggcgtgatcctgaggcgatgtccaagctgaagatgtatgacaaggttgattctgtcaagtgcccattggagcttgagaaatctcaggctatccgtgagaacgagaggattacattcacctatgacgttgagtatgttaagagcaacattaagtggccatcaaggtgggatgcatacttgaaaatggatggtgccaaggttcactggttctcgatcatgaactcgatgatggttgtcttcttcttggctggtatcgtgtttgtcatattcttgaggactgtccgtagggatctgacacggtatgaggagatggacaaggaggcgcaagctcagatgaatgaggagctctcaggatggaaacttgtggttggtgatgtcttcagagagccttgctgctcaaagctgctatgtgttatggtcgctgatggtatccagatcactggtatggcagtggttacaattgtctttgctgctctgggtttcctctcacctgcttcaaggggaatgctcttgaccggaatgatcatcctgtacctcttccttggaattatcgctggatatgtcggtgtccgtgtttggaggacaatcaaaggaacctcagaagggtggaaatctgttgcttggctgacctcctgcttcttccctggcattgttttcgttatcctgactgtgctgaactccatcctgtggggcaagaagagcactggagctttacctatctcactgtttttcacactcctggccctgtggttctgcatctcagttccactcacacttattggaggtttgctgggtacacgtgctgcaagcatagagtaccctgtccgtaccaaccaaattccacgagagatccctgagcgcaagttcccgtcatggctgcttgttttgggtgctggaacattgccctttggcaccctcttcattgagcttttcttcatcctgtctagcatttggttggggaggttctactacgtctttggcttcctgttcattgtccttttcctgctggtcatagtctgtggtgaggtttctttagtcctaacctacatgcatctttgtgtggaggactggaagtggtggtggaaagccttctttgcttctggttctgtcgccttctacgtcttcctatactcaatcaactacctcgtgttcgaccttaggagcctaagtggaccggtctcagcaacgctctaccttggctattccctgatcatggcccttgccatcatgctgtctactggtgctattggcttcttgctgtccttctacttcgtccattacctcttctcatctgttaagattgactagaggcacccacactcttgctgcaataggatcacctgagcatggtgatagttatcccttagaaacatatcacacaataatattgaattgaaaagaaaaatgtaaacatggcaacgcccatggcttttggccctgattaattctatcatttagcatagcacagtttctttaagttcatgcttatgttttgtaggcatgtctgcaatgtttcagctatgttttttgactttgtaatactattatgttttgttttctctgggcatttgtgagcagcctttgttggaacactttgacagatattcaatattaaagagctattcgattacagtccttatgtttcttcccctgatattatactgttgaatgcttggtaactgctacttgttatgctgcttccgcttgctctgaaacttgtaacgagataatgctgttgagcaattttcttgataaacatgtatgtgtctacatgagttgctgtcaaccttgccgctgtgaatactcgttttctgaattctgaaggttgtaataaggtcacagtttttcagttagttgccacatgttctgacgtactatgtgacatgattcactgtttctggtaagctgtaacagtagaacagcatacacagcttcaaacccctccaagccctgtattctgttccctgttcatggtctgcttacagtattctgatgttcgcattatttgcatcctgtgttgtctggtattggatcaaatagattaataaaacatcaaactgctatatctggccttaacgcacggctctcccttatgtgtatttacaaatttaatttgaatttatatgtttatatgcatgatatatcttatcaatttatcttgttaatcttttttcatgatatatcttatgtgtatttacaaatttaatcttttttttagttaatcttccttgtcatgttaggatttcttttatttttggttggtgtgcttgtttaattttggactgcgccttttagtgtgctacttcttataataattggctgtagctctcatgagcaaaggtcgggatgtttcactccattatcttaaaaaaaagacatgaaaaacgagggttgtaaacactttcccctttctatcgttcctttcccttcgtggcaaacgtccaactactgctttattagttgtaatgcagtcgtaagatgcagaaaagatgttaattaattaacaaggttggttagagtttattttgtctaggtagtgggcactggatggtgatgttgtctttgtcctttagtaatcgcagttatcagaaggtagatcactgttcagttaatacagtcgtaaccaatgatactagagtgtgctaatacttagtacaaagatactagaatccttttctcatggatctagcatgtgcccataatttcttggatgcttgggcaatgttgcatttgtagtttctgttttttttttaataagatcaggacacacacaactaaattattaattaaattgtggaccattttattcagtctaattatccatggttcatactatgcatgtcaaactatcaggatgaccaaacttgattaacttgacatagtgattcttacaagcagaaagcaatgcgccatagcagtttaatacatacctcctccatcctagaaaaaccgagaagttgttggttttttcaaggatgaagatttccacaagaagcataaaaacacacacaaaaaaaatgcatcagacaaaatcatcacgcaatacatcaactgaagtgagttagtgacagtcggacaatagtttgctaaaaataccattctgccaagggaaaacctaatgtccatttctctttcctcttttcatgtcataatagctaaatcgtttgcaatgtatgtatttatacaagacaatccactggctcttgtttgaagttgaaagctcgcccatgaaatttgactgacaactcggtatctactgacagttttctgatcaatggacagactagtgtataattttccagctccttgtagaaagatcactcaacctttgcaaaccctccttccggtagactactgtcattaactgcttctcgcacaaatctacaaagcaaaatggtagcgtcaaataacacggatcagttccaattgaattaatccatccaacgccactattattctttaatgttgcgaccaaaatgggagagagcagtacatctccaggtaactaagctagcatgattatgatcaatacagctttaaaagatgatttatagaaattgggtcagtgttcaacctacaaaaccaaaagcatgcaggatgcaaaaaattaatgaattctcattatttttgttctacgtagccgtgaatagttcagtctcagcctatatacagaaaactaactgaaaggtgaaaaacaaaccttgtcaacttttcctgagatgattgcaggacgtagattgcaaggatgaaggatagaacaagccctgcatatataaaaagaagctattttaggacacaaatgtgaaagccattagaactagaaaactatcacactttgctatatcagcatagatggcatcagaacataaatgttccgttcatgatataagggaaatcgcaagagtagtatagcatggcaaacaaatgctatttgagttaaaacgaactcaccagatccaaacaacacatagaaacctccaggaacatctatctccgattgctcctccctgaatgaatcatttcaagtccttgaatcaatttcaccctagtttgttatggtaaagatctttttgaaaggtcatagtaaaattttaaattacaaagtaagtttttaccatgtatatctgaccagaacatattttggccaattctgttgatcccagaaattcttccttatgtcaggatgatgttcaacatctggataacaaaatgagcattggttagcaattagggaaatcgagaaacaaaacaacaaaatcagcctgtgaataaaaataatttactaggtgaaagaaaaaccactctaaaaatgatagctatccttgaaaaagtctagtctattggaaatttacaacatatgctatgtgcccttatacaaggcccgaatattgctgcggtattgagagagagagagagagagagagagagagagagagagagagagagagaagtcatgagcatttgctgataactcccaaaagggctgctctatgagctcaccattagttcactaccgaaaggtaaacaaagttgactacttgactacactaagataaatctttaaagattcccctgaactgaaaaacaatgctcataatgggtttatataaacgaactacgttcaggaaaacagacatgcaaagaacataacttattaatgaagcgctgctacacatgaaatgttttgttactatttggcaaacatatgtgtacatggtactgcttgcatgagaaataataacaatactaaatatgatagaattatataagtttagacatatgcaaaaagatatatcacgaggacaggtgataacaatacatacaaatgtgtacatggtactgcttgcatgagaaataataacaatactaaatatgatagaattatataagtttagacatatgcaaaaagatatatcacgaggacatgtgataacaatacatacaaatgtgaggcatgtccactactttagctgtgacaccaagtaaatcatttccagagtatttctgcgtaatcaaaggtagatcaaattaagcacagagacaagtcttgctggaaaggtatatagaaactattaagcaaggactcaccaaatggaaatcaatcattggaacttcagagcttttgcgatttatgacataaagccaaggaaggtggaacttttcgtgaccaatttgaaatgttctacagtgtcagaatcaggtaagattgcaaaacacatctccagaaacacactcatatacaggttgtaaatctcatatgttcataacatttccaaccttactaccatttactcttttagttctctacaacagtcaattgaactaaaagtcagttcgtcttaaccttacaatgagtattataacctagcacaaactatgcagaacaccataccttctgaattctctctctcaaaaatgaaaaataacaagaaaaagttttaacaatttatgatttcagtcacaagattctggtgtcacaaaatcatcaccgattatgatgataaccttcaaagtcatgccctacagcttactgaactcactgttctactcaaaattgtatagaacagaagtgtaaattttccgtctaaaacatgaacaacagcagaacatcttactcacatcttgtaaggatctgcaccggtgaacccagtcggcttggggatcggcatcataacctgcacaagagagaccaacccaaatcaccaaaaccactcccccacacacatgaaacgaatcagagatctcgacccctctctttccaagaacacacccccatctcacctcatggttgaccgcgaaggacgggcagtggcgtcccaccacatcgaaccacaccgacctcgactgcaaacaaacaaaaaaagaaaaaccccacctcgcagatcagatcgcgccgaagaacaacgcaaatcagcctcagaatccgaaggctaagcggctttgctcacttacgccgtggtactggccggagcggagcatggggacgatgtcgccggggcggtaggcggacgcgaggggggcgaggagggccgagaagaggaggaggaggaggaagaggcggtggtgggccgcggcggggctccggcgggcggccatggcggcgaggtggtcgccggagttgggggtggagggtgagattcggggtaaatgggttgggttcgatttggagcgtcagatttggcgatgcctattggacttttggcttcactaattttggcccattattcagcccagtaatggtgcatgtagtagggattttggcccaattaattactgggcctacaaacatatggaaattcggttctgtttgtgtttatattttttcttgttgaggttggaaatgaacctacgaaatttgtatggaataggcagcaggaagttacacaatttcatttagcatagtttttttttttacctctgtatgtatatttctgaaaaaaaaatgtgaggcatgtccactactttagctacatgtatcacactttcataatatttgaaattcattatatttttttttcaaataacagaatagacaatgctgagtgtagattagttggttaggtttcttacgatgaaacatttaaatcataaacttgtcgcagatgctcctatttacgaccaattgttctatcagtggtaggtgatgtacctatcaacaaacaggtcatatgtgatgattttgctaactttaagacatgctgctttaatcttcagaagtataattaaagtagctatagtttacatagggtgtaaatagaaaaccatgcaatacagcttcataaaaccgtcttatactgaactagtatgttccttttacttcatagaatattctatatttgactgcattgagattgtggatgcggttgaaaagtgttctggtgcactggtgctaaagatagatgagggcatacttgacgttgacatcccccagttccataattcactggtggatagaatgacataagaattagacctataatagtcccgcttttcatttagtttatgagaagatgaggttatcgaatttacaaaataaactaaaatttggaagttagaaaactcaacttttctatatctcagaagatggctaccaacaaaccgtttttcagaatcataagttctgccaaacaggctattaagctcggttcgaaaactcgtttatctttttaactctcttgatagctaggagcaaacttctaaacgatttattttgaacaagaagtttttacaaaagctttttaaaaataaaataaactcatttttatttatagtgattaatatttgattaatcacatgttaatgaatgcaactaaaagcctaccgccaaaatcactattgaactaagcataagccttagtaattattagtacactgcatgcgcttagtatgttatttattttcaatggttttgtagacatatagttataaaaaaagaagtccttttatatctactttaacccttatacgaatggcaaactttgtgacgatcgacagaacatctcaatttctttttaaaaagtaaaatgaactgtttatccaaacattaattttgtttatagctgatacacaactcttctctcccacaaaaaggggaaaaaaatgcacaactctacatgactacatcccagaatagattaggcagcattctgacgctattgcatggacaaaccattatccaaagaaaaaaaactaccgaaaaagtatagaaaatccacttcttaagctttttactagtggctagtatgattttacaaaggctgatgtaaaaagaaaagttaaaaaattgacgtaatttcaggtcgtatttgtggtgcaacaaccgttcaaccaacacagctagcaacaagagtagaaacaaaaattcccctcctattttttaccaatccccagccataaaaattaaaacgagaaaaaaaagaaataatccccacaaatattaattgtataaataaaatcgaaaagaaaggaaaaataaaaaaaatatccaaaaataaaaccccctccactcccatcccgtttctccccctttccccttctcatggagtcgtgtagcttccgcaccgccgcctcgccatcgccattcccctcgcttccctcctcctcccgacaagcgccgccatgctccagcctccgattccccgtaagaagttccctccttttacggcgggtttatggaaacttttgggttttttttttctgatgtttttgggattttttctttggttgttgcagagaccaagaaacgggaggatggtgggggtgcggaggagggcgtccggattcgaggccttccctcccctacctggtaaggtgttcgtcgaggaggtgagcttttcttggtttttgtttgattcatgggtgtaaagataagagttttcttggttaatttcttgtttggtttgaagaagtctggcttgccctaggcgcaaatgtggtattaacttcgattggggttggatttgctctgtgcgacctccggattaggcagggattcagcttgctctgatgcttctttagaatacaaactgcacatctttgggagaaatcaatgccatttaagtggttcatgggttaatttccatcttttcttatcttggttgtactagtggggtggaaagttagctcatgcttcttccatttcggagcattggcgagtttcgtctaaaacagggcaagtgactaagtgagtttcatttgagtttgatggttccctttggtgaattatccccagtattgctgttcttgtagttggtgggttcgatgatgtagtactcttagctaaggagtagatttttagttctgttgcttggaatcttggtagtcagttaattaccatattcatatacttggatcacttatgactaacatttctgaacgttcccaagctatggtttatattattccattacatgatacactcttcgaggataagagctgtttacctttcatttttgtaggccaggactaattagatgtgcatttgttttttaggcaattggagctgaatatggggaaggttttgagacatttaggatggatggaccactcaaggtcgatgtggtgagtatacgtcatttaacttacatggcaattttttctatatctagcatcctgtattacttccttaagttacattttgtataagtttcctttcattgtttcaggattatctgaacgaaaaattgcaagaatgcttccttcaaaggataagacatgctatgaagccagatgaagcatgtgggcttattttctcatgggacaacgtaattgtgagtttttttttttgttcttgtgctagtttgtaatagtgcaatgtctactagcctactagtgatatttatttcttctaagtggcacattaggccttctcgtctgcagttactcgttgtgaagatcattcaaacaaactctaccttacgtgttaataatttaaaatttgtttctgtttcaacttcattacgggatgctttgtttttttggtttgaactacactggttgattggtagagaagaacaagagtcagcttccttaagtccattcttctcagtagtttatagagctgttacaatggggaaacacttttaatcacctaggtggacatccacccatttgttgcatgtcaactaaatgggtatgaaaagaaaatcaaaaaaaaattgacaagatatattcatatgtaatatatcaccccacaaacatgcaagttcaaattcgacttctacaagttgtaataaaaataacaaatcaaactctgagtagtatacgcatattcacagttaaatttgttatttttgtttcaacttataaaagttgaattttaagttgcatgtttgtgtagtgatatattttatatcaatctatcttgtaaatttttttgaaattttttcatgatcatttagttgacatgcactaaatgagtggacgtccactcgagtgattagaatccacctccattacaatgcccattgttgcatctataattgactcagatttgtcatcctcttctgttctcttaggctgatacagactcactaaagttggatgcctggagacagcttgctttggaagaaggtatacctttaaaataaaaatattcagtgtaaagttttatgaaacatactattcctataatgttattgtatgggtccttttcttttttccgacaatgcaaactgtagaaatcattttcttactcgtttaagttcatattttgtcttcacattcagattctcagtggtatattgtctgcaaggtctgaggagcacatacattaacttactataaatataagattcttattgtgcaaccttttatgacttctcattcaattttgactgaataaaatcggtctaaactacttatttgtcattgaggtttgtgtttacctcactgccagggatgctaccttgatattgctaataaatttatttcatgcagggaaggatatcccaaatgctggtcatgtccaaaagagtattcttcatggtgctgccgaccatgtgcttagaaaggtatgagttttctttatacatacggaaggtctatgttttagagttgataccatgcttgcatcatcaattagctttggtactttttagtaacactaatttgccactgaaagttattttgctgcaaacaaaataataataataaaagcatactctttgttgggcacattctttctattgtgcatatggctttccttttgcaatttgcacccagtggcagttaaagtggcaactctacttgtccttattcaggttttatgttgggcaaaagatgaaagtcaaatggaaagactgaaggcacggcttatagagttatactacgaaaatctcttcaaagtaattatttctacgcttcttttgggataaaagatggcttaaattatacataattgtttctgattaagtatgttcatttcattcagcttgatacaccagtaaatggattgcgggaatggttggatgctgtccagacagcaggcatcccttgtgctgtcgcatcgtccctggataggagatgcatgattgaagctttggatcgaatggaactaagcaaatacttcaaggttcttttttttgtatcatcctaatttccaagttttaccaaaacattattttctgaaatacattcttcgaatacgatgtatatcagaagttaattttattcattcctcctttatatttcaggcaattgtgactgacgaggatgatatggagtcaatagcacataggttcctctcagctgctatgaaggcatgcttctgctccgcttcaaaatatttagctgttttcaggatatactgctcacatgtttgtcaaacctgtcttttctcaccagctggatcggaagccctcaaagtgtgtggtgtttgaggatgacccgagaggcgtaaccgctgctcacaactgtaccatgatggcagttgcactcattggtgctcatcctgcgtatgtagttctctcatttattttttcttttttggaataatattctttgaaattagagcacagtttgttccattgctttcagatctttctgttgaactacatagcaaatcttggctacttacctgcggaatatacattttgtatgacatgtaggtatgagctggtacaggctgatctcgccatcgcaaaatacagtgagctctcggttatcaatctcagaaggttgtttgcacataaggggttaagtttcatggacttgcagaagcagatcatcgagaggtcacctcccaagaggaagctgacagtagacaccatcttctaatgaattctttacctcccaatactgaaaaagagagaaaagaaaatagcaccatgcatcctccctactgtgctgtgtatatagcattccatgttggttagattacatagaaagctgatgttagatgatctgttgttgcatacctccattctggatgtactagatgtaaactgatgtttaaccattttaatcatgataaatactaccagtctaccaaacagaatcatgtccagggttatgaagggtgtgcgcttctgatgtgtgggcctatggagggtgggccccacctgttagggattgatgccccctcggacttggaacaatgcatattatgtacacacaagatacatacgtattgagggcctatttggtagagctccaactcctaaatttagctccaggagttgggtctggagtggagttgtgtagctgcctaaacccagctccaccactctagttcattttgtgagagctctgctcttatgttaggtggagctgaaactgtttggctgagctccagagctagagctgtgctaaacaggcaaattgaaaggcgcacacctgcagttagataagttaggggctctctaaaattgggctattactgaatatatgctcagagcaattacaatttattctattgcttcagttggataagatggaatacaatttgttgtattgcttttagatctttttgttgaaactgtaccactaatctttgcttcttactaccattttgcactccttacagatataggcaagagctggaacttgctgaacagcttgagcaaatattccagaggtcgcctcctagcaggctagtctttttgcaatgggagatttgctctggtccagcaaaaagtatctcgaggtaacggtacctcacggtaccaaatcgtttccgatcgttggatctacctggtcaggatgtacaatgttagatccaacgatcgtaaatgatttggtaccatgagataccggtacctcgagctactttttgttagaccggagaaaatctcttttgcaatggaacatagcgatgttaccgtaggtattaggatttaagtcagctgatagtagacaacatcttataaaaaacgagcgattccttttactgcttaattgtatttttcctctttgtttctatcaattatcttaaaaaaagggaacaattccatgctgtttaataacatattaacatagcgctgagccgctgatgttagatgatctgttgcgtagctccatttctggatgcagcagttgtaattgtatggatggtttacagggaaggatcaactgctagaaccatgctgctgctgctgttgacctgttgttgtaagctgacattagcagatgatccatttattcatgataaataccagttttccaaacacagacatggacatgcttcagaagtatatgcattcttgtgtgttcgcagctggtatatatggcagacgtacgtagtatcatgctaatgctagcagattgaaagagacgaaaatatctttattttttttcccttccttaaaaaaaaaaatgaagagaaagagactgaaaggcagcacggtagttgagcagagttatattcctgttgacagcaacagttaattttgggacagtttggatgaaaagggattaagcaaacacttgggcaaaggaaacaaggaaaacccctgttatttttcctttcttctcagccgagaaatttgataatttaacactttttttcattgtcgaattactttaattgatacttatgaggatgacatgtgagaccatctgagtggataaaattgagacaagatgtcaaataattgaagctctaattctgagccccctgttttgtgctccgttcaaacaccagttttcttttctaatattcagacacctgaatgtttttgctctctctcacctcaccaaatcttctctaatttgtcctaaatatttagctgttagtagtttggtagtatctcttcttaaagatgctcgtgccatacgttgtaatatcataccgggtcgatggcgactgctgcgtctgcttaataagaagagcatcaaagcaaaaaataattcattttgcgaagaacaataattagtactcccgtcccataatataagggattttgagtttttgcttgcactgtttgaccactcatcttattcaaaaaaatttgtgcaaatataaaaaatgaaaagttatgcttaaagtactttggataataaagtaagtcaaaaaaataaataataattctaaattttttttgaataagacgagtggtcaaacggtgtaggtaaaaacttaaaatctcttatattataagacggagggagtagttgatagctgagttagtaatagtattaggcagcttctcttgccaactctagtgagactgtgacatgaaaacttagaattgcagagcaggtgaagtcgtgaagatgcaggagcagagtacataacaatggcgttaggattacacgttcagagagtgagctagagcacatcgttgatttttgttcagcgatcatcgatggatagacggcggattcggcgagatgtggagatcgaatctgtcgccgacgactctgccaattctgtccaggttaaatctctctcttcttagatgaaaattgcatgcgatttactgttgatgagtatgtttaatggtgattagttcatggattaataagcttattatatgttcatcaattgcatggtgtagaacatcaggctggtgattgacatcggcgacaggacgatccaggtccctctcaatggccacaccgtcgcgcagaacatcggccgtcaggctgccgccgccgtcgccggcgattcgtcagccggcggtgtcagtgagaaagccggtggcggcggcgaggagtggctgcaagaacaggacggcttgttgagcatgcgcgggtggctgatggcggtggccacgctgttcgccgccatggcgttccaggcggcgctgcagccgccggggtggatgccgaggccgcgcgactggttcgcggcgctgctcgccgccgacccggcggcggccgccgtcacgagggaccaggccgggaaggcgatgctgtacctgatcgtcaacacctgcaccttcgccacgtcgctcgccgtgctcctgatgctgctcgccgtgggcgacgccggcggcggcggcggcggatgcgcgtcgaggagggtcaccgcgaggctgatcgccaacatgatgacggccgtggcgctgttcgccgcggcgacgttcgcgctctgcgccgccgacgactaccggctcatggcgttcgtcggcaccgtcgtcgccgtgtacgccgccgtcaccgtcgtgttcgtcaggtgcaaccttgctctgccgttccggagaggcggcggcggcggcggccatggttgttgtagctgggtgtcaagattgtaataagagcagataatactgggccggccatgcatttgattcagccatattactatacacgcgcggcgcaacgcacaataacggagtttagtaccacatggaaaatttacagcggtggagacctgtataaaagaggacgtggtcgtgttgctcccgccgagcttggttgtgcgagcttgtcaccccagctgtggggggcgggagttggcaggattggccgatgttgggaggatcgagggtatagataagatatctctcctccctggtctcgttgggttgttgaggcacagatgctaattctatttgtccgactttggacttagggggaggactataggtgtcatcaaaccccaggcccaatttgcggctggttgagagccctgcgttgtttaacgtcggtggcctcctggttgctttaacgatagaagcccacggtcgtatcctgtccaacttctcctcttttttatttttatttttaatgatgctactctcctcttttctttttatgatgctatttttcttttacttttcccttcaactagcaagtggggtgaagatgacaattagaattgcagagcaggtgaggtgaagatgcatgagcagagtacaaaacaatggcgttaattatgttaggattccacatttattttaggattccacattcagagagtgagctcgagcacatcattgatttttgtgcacagatcgatggatcgattgattctgtcgccgacgactctgccaattctgtccaggctaatcaactcagctcaagtgcttgcaatttactgttgatgagcatgttcaatggcgattaattagttcatcaggctggtgatcgacgggacgatccaggtccctctcaatggccacaccgtcgttcagaacatcggccgtcaggctgccgctgccgtcgccggcggtgtcagtgagaaagccggtagtgctcggtggtagcggcaacagcggggcggcttcggcttgttgtgcatacgcggatggctgcctggatggtggtggccacgctgttcgccgccatggcgctcgaggcggcgctgcagccgccggcgtggatgccgaggccgcgtgactggttcgcggctctgctcgctgtacctgatcgtcaacacgtgcactttcgccacgtctctggccgggatcctcatggctgatgctgctcgccgtgggcgatggcggcggcggctgcgcgtcgaggagggtcacggcgaggctgatcaccaattaacacgatgacggccgtcgcgctgttcgccgcggcgacgttcgcgctctgctccgccgacgactaccggctcatggcgttcgtcggcatcgtcgtcgccgtgtacgccgccgtcaccgttgtgttcgtcaggtgcaatcctgctctgccgtttccgggaggcgacgccggccatggttgtagctgggtttcaagattgtaaacgcgtctatgcaaaattgggtcattggctttgtatccaaaccacgcaaggacacattgattctgcaaaatcacgatgagacgaaacataataagaccggatatgataatttactgggactgcgggccggcctgtgtttaattcagccacagcccatattattacacgcgtaatgcataagagcaatgttttgtaccatatgggaaatctacatcggtttaggccagtataaaagaggacgcgattgagatgctcccgccgagctcggtggtgcgagcttgtaatcccagctgcagggggcgggagttggcaggtttggccgttgttgggggatcgaggtatataggagatatttctcccccgggtctcgtgccggatgcttgttctatatccgactttggcccaggaggattgtggatgttcatccaagccctacccaattgtggttaggttgcaactagtttgtgagtactctagcgttgtgttcgggtcggcccttgcgccgcctaacaaaaacgtctaggtcactccctttctactcacgagagaagccacaaccctatcctgtccaactcctcattttttttaaaaaaaacatggtacattcttattttcacaccctttccactcacgagatcatccacggatttgatcactacaatcgatcatgagagaagcgacggtcctatcctgtccaactcctcttttctttttaaattcatggtacattcttactttcgcaccctttccactcacgagatcatccacggatttgatcaatacaatcgatccaaactctaaatgtgccaaatgggtttaaagcattaaaacctatgtcttagaggatcaacctaaataaagattggaaagaagtagaggacaggttttagaaaaaaaaaagctaagttgttggaaaagcaaattattatctgcaggtagtaatccaactcttgttaattcaatgttgaggagcgtaccaatatttatgttaacctttttacgatcctttggggaatttttttttaaaaaaacctgattataatgattgggtattctaaacttgaatgagcaaactagatgtttgctccgcaaatggttattcaggttaataaatgaggaaggggtgtggcaaaatattctttgaaacaaagttgatggaagaaaactatttctttagttgaaaagaaatcaagcgattctcactttttgttaggtttgatggtcaaacatgagttttgtgtccaggttcttttctgttaaaaaatggaactcaaattcgtttacgagactatatgtggcttggacggaaaaagccttaaagagcactatccaatgctataggaaaaagtctgaattacccctatgtactattgtatgagtacgaattactcccataaaccacaaaatcaaacaaccttcaccctcaacttttcataccgaacgaattgcccccttgactcgctctagagcggttttggtcctacgtgacacacacatggcagttatgcttcttcctctcttggtctcctcttccttgactcatctcggtcgctgtcgatctctacccatcgctcgccacctcaccggccccagcccaaagctaagccctagcagctcgtcatcttcgtcatcgccgctgagacttgctgcacctgaggttggcgcttgctgggaggtgcccatggcagtgggggagccgacgctcgcggacagaccagagatggcttggagagaggtggaggtggccgacgggtgcgcttaggtcatcacggatgtggaggggaccgcctggcggcggccactcatggaggctgccgaggaggcccaacacaggtgatggtggggaagaggtacaggcctcggcgcaaagacggagggcacaactagtggcagtgcgacaaggagtcatcctcgccccacaaagggagagcagatctgacacacccgtgagctggtcggcgatcttcgccaccttgcgctacaagaggagcgtgtcacactcacatcccccacgaccaacgccatggcccgccattgagggtaggaggaggctgctgcctgcaccgtgttgacgagagtgtgacgggattgggatggtgtctatttttaatatcaacaatataatttatggggtgcacaggaccaagaaaagttggtggcatagaaattcctaatcaaacactttaggctaagggagtcagaggaagcagtaataatcatagtgatctctatctctgccccttattttgtgctcaaccaaaacatcaatggtgataattttcagctacctgaataatattctgacgcagctgcggatcgaggcagctcccgggtctcttgttaatttcacaactcgctaaacctcactaattctttactagagagtctcttgtcttaattattctgctgttagcagtttggtggctgggtattagtcagctactctgcttctctagacttgccaattctagtgaacaacttagaattgtagagcagatgaactcctgccgattctgtccaggtcggttaatctctctcttcttagacttgtgtagctggacgtttaagcctccttaagttgtgtctctatttttttaatcaaggatctgtttgtactctgttttccttcttaattactacttccgttttttaatagatgacgtcgttgnncnnttnntnnnttnntnnannnttttctctttttaaataaactcccctcactttttatctttcctctctaaactcttctataaaacaactccctctt

SEQ ID NO: 7441 - DNA, 22665 bp, Oryza sativa
tgcgctaataaatcgcttcgttttatgtatcggagggattagtttcatccccaagaccacaaccaacgaacacagccttacttagcccactccctttcaaagaaaaagctgcgcgatcactcgtccagtcctatcatttgttttatgcttttataagctaaacttttaaatttatacagttaactttgtgagattttattgaagtttattttacaacatttaattttgaatcataaataattttttttgaacgacctgcacgagacggtgttagattctattgatagagcaagaaaaaaattacaagattacaaccctggagggtcgtaaccaggaaaaggaaaaaaaatataccaccacccccacactgacagtgccaatacacaactccgggagaaggctaacaccggaccggccgctgctaagcgtgaccgactgccgctagactaacaaaggagcacaaacgagatcgcccaaagtcgagaggctttggctagaggataccaaaaacgacgtcttcaagaagataagcgacggaaaaaccgtcatcgccgtccgtcggggctcaaaggagctaagatagggctttcgcccggcaaccacccttgagtgctgagacagcacgacaacgccctcaggagggataattaaccatcgttgtcggtccggccaaggccggactgggttttcacccgctactcaccacccgcgaatccacggttgatgcaccgatgctccaccatcactcaacctctgccgacatgtgggaccactgcaacagtgcccccctcccccctccccggcgcggccagccttcgtgcgccgaagaccgcaccacatccgccgacagctcctcctcgcaccgaggtcgccttctccaccgccggtcgcgcctctcgtgccaagccagcctcctccattggacgcgcctctcgcgctaatccggcctccctccatcggccgcgcctctcgtgccaagccggcctccatctccgccgcctacgcctctcgcgccgagccggcctccgctgccatcggctgcgcctctctgcgccaagccggtctctgacccctcctccaaacgctgctgcgcggccagatgcagccgtctgccacaccctcggatagccgtccgaggccgtcatgcctcctcccacctcagccacggtcgtcaccaccgtgccccctcccaccgcaatcacagccgccaccgccacgacgagctccgcgcctgcaacgacgctactgcgacggcctctgccaccacaccgtcagcgtcaccgtcgcagcgccctgccgccgagcagtcggccgcgcctccatcggagaggccgctccactgcccttggccggccaccacgtcacgcggccgccacgctgctgctcggaccctcgcgctgccgcacttctgctcggctgccgcgccgtcgccacgcctagggtgccgttgtcgcgaaaatagacaaggtgtatataaaagttatattcataaattatttttagttggtaaacatttgtataagcgaaatggaccccgtcatctccgaggtctcaccggtttgcggctgccgctttgcatcgatcgacctgccgcccgcacgttagatttgcaaattgcaagcaatcgtgtttggtggagaagagggtcggtggggtgggagaatccgcgacatgaacagacgaacagcccaacaccaagaaggcaaaaaattaaaaagaattctgatggaagaaaagagtttgcgttgcatcagcacggaaagggacacgtttcttcaggaaaacactacctgcatgtgatgtgcatactagtaccttccagttttgaagtagcccagatcgcaattctcacagaaaaaaaaggggggtaaaatggtgttgcatctggagcaagaaacaaaacacatgctagtttgccatacaagaatactgcttcaagccttcaatagatgatagaccactcaaaggaacaagcagtgtacagtttcatctctgtaagggtgtgtttagttcacgtcaaaattgaaagtttggttgaaattagaacgatgcgatggaaaagttaaaaatttatgtgtgtaggaaatttttgatgtgatggaaaagttggaagtttgaagaaaattttttgaactaaacacggtctaagtatcctgaagctgcacagaagaacaagtttgtcgaacactggtggaatcttgtgctcctcagtaacactcaccaaccactcagaactctagtgatcctggtatttgggaagtatggtacggacgtaatgtaagaattttctgttacaaagcagcaattaacggtggcatcaatcctagctaagatcaaggaggaaacgagagcatgggtgaaagtaggagtatatatttagactctaggagttcggaattttgggagaaacttattacctaaggactcctttgtacatacgagacaaagggtgtgtttagttcacgctaaaactggaagtttgattaaaattaaaacgatgtgacggaaaagttggaagtttatgtgtgtagaaaagttttgatgtgatggaaaagttgaaagtctgaagaaaaagttgggaactaaaccaggccaaaccttatatcctccctttaaaaaaaagcctgtgtaggtaaagtagagctgtagaacagtagaaaacaatgtggatcagtggatggggaggtaaacgctaaactacttaaagcaacccatatcgacatcacccttttgctggtgcattttgtatgtcatgactgttgtgactgacaaaaacaggccaacgccaaaggggacagaataatgcagaaaaccacaacagcaaagaatgagacttgcttccagaaaaaaaaaaaggtgaaataaaaattcagggattttgttatgtcattaactcaggaagacaactgagtactgaataaagcaccatctgaacttaagttccaactgccataataagaggagtgttcagaagttcctaatgacgaaaatgctcaagttgcctaacaatgcatttcaccagagaatagatccatcaacaatacatatggacactgaattgtgtgtgaagtattgttcaagctacccaacgatatagcatttgaaaggacacgctcacctagcaagatgcaggcagacaggcagagcgttgcaacctgtcattttcgcaagtaagcagaaacacttgcaattaataatggtttacaggcttacagcaacgattagaatgacataaattgaacgtgcctacatatggaagtactccctccgtcccaaaataagtgcagccatggttttccgcgctcaactttgactgttcgtcttatttgaatttttttgaaaaaaaattaaaaacataagtcacgagtaaattactattcatgttttatcatctcataacaacaaaaatgctaattataaaaaaatttcaaataagacggacaaccaaagttgggcgcggaaacttatggctgcacttattttgggacggaggtaatacttcctacgtttcacaatgcaagtcattctagcatttctcacatgcatattgatgttaataaatctagatagatatatatgtctagattcattaacatcaatatgaatatgaaaaatgctagaattacttacgttgtgaaacgaatagagtactgaactactaagaactaatcggatcggcggcggcgcgtcctcctgtcgagaggaaacagaattgggaatggggaggggagaagttaaggtaaattcgattttgggcccttttttaaggctattgggtcgttgggcctgaaataatgagggaggaggccttttgagtgggatttctttagatgaatgggcctcctttttttttctatatacatatgaaatagggaaatgttacaagatggtatcccattcgaacgagacgatacctcagagatatcgcctgatacctggtaggtccgttcggacgagaggtatcatcttgtccaaatgggataccatgcgcacgcactggcaagattcgacctcggcgtgcgtgggttgtcgcccgccgccaccaatccggcctccattccccacgtgcaggctaaggtgaagagaaagggggagagaaagagagagaagggagagagagggaggaggaagaagggaaggagagagaatgatatgtgggccctataatatttttttgtgtgaatgacaaatgagtctcacatatatttttttaattctaataccacgccaacgtcacgtgaagcgaagactaaatcaacaccgctgtgtcaacggaaccgccctctaaaaccatcgaagaagtcaagttgcaccgattttaatagtttatgggtcgagatatccggtattatggtttagggatatgaataagattcgatcactagttaaaagagtccaaatgaacttaccaataaagcctctcattttgtttgggccatcttgatcagtccagagaaatccatcatcagtgcataaacacaatcaacttgctctcgttctttctctacttttacggtggttgcatctatcgatagtttttttttctttttcttctctctgcttactctcgtcgctctttccactattttgatagatctggtaagcgcgcagctgcatcattaaaaagaaaatgtagtcccaaaagtttatatatgcgtttgtccgaactgcaagctaaagtgagcaggagaagtgtattactctctctgtgctatagtataaggcatacacacattccaaaattcaactttaaaaacatttaaccaacaataataataatataagttaaattttatttgctaaaattaatataattgaattgacatttaaatttactttaagatggttataattttgttgcaataaactttatagtatatgagaaattataattcaaagattagttttgaagattgtgccaagtttgaccatgccttatattatgggatggagggaatattgaattagaactgcagccgcctcgtcgaggtcttccctggcattggtagcctcgcggctagcgccctagccatgccggctcgggctcgtcgctagagatgttcgcgcagcacaggtgtcgggtacaaccgacgtcgtcctcgacgctgacggtggggatgaacatcttcggtgaaaagatgggagagggggtgaataagaagatgggcaatttgatccaaaaaatctattaagtgtacagaagggtcaagaagtggcatataactatgaaacaacagtgacatgattttaagtgcttaacgatttgccactaggcccacatgtcatagacacatgaggacccacatgttatagatagggtgtggcaaatcgttaattgccatgtcacaagagtggcaaatagttaaatttccctgattttaaatagttaaatagtaatggtgtatttcaaaaccatgaaaattgtagtggtatagatccaattaaccatttttacatacttacctctattcagattcgtgtataaatataagaaacttattttaggacttcattttactctgatggttacatcctctgatagatatgaaatgttgagccatcgtctgtacaccagtcatgaaaacccgcgagacataaaggataatcggttcatgcggcattcgattcactcagccaaaaatattgttttgaacatgggaaattacatgattgaagagaacaattgttccatgttattgcattgaaaacttgttggaaaagaacccctctttgcacttggtcctaaatatacaaaagctccatcactgggtccaaagtaaacataaacttacagtcacaaacttgaaccttgcagatctctagttctctggatctttggtacaaaagaatgaagtctatctgtggatctatgttcccataggaagttacagtgagaaagatgtggagcatatccagatacaatcatacaatatctgttgtctaagtttcaaggcagatctgctatcttgaaggtaaaatcctcccaagaacccttttactgctagtagatactagatagtaatgttaaataaacccaaaaatgtaactggaatgttcattacaatctgggttggcttccaaccctactatccgcctaccaaattgaatcctgtataatgccgccttctaaaaggaaggtattttcacgcccttgagtactttgagctccacatcggtaccttgagaggctcatcatcaaccactccacctccattctcaactttgctcagagagtctgagatcaaaggagccgaatcgccttctttcgcctgtaatatatggcgttttgaagagctgataagatatgtgggaacaattgaaacgattccagaactaatggtgaaccatttgcaagcaataaaattcagactggaagctacctgttgtggggagacttcggcgtttttttgctggccctccaatgtgcagaagtatgagtataagaccattccaactactgcaattaggatgccgagtatgtttctccagctaaatgggtcatgaagcaaaacataaccaaaggtcagtactaggcatgttttaagatggcccaggacttggtaagtgacaggagaagtctttccgatcacaaggaaagtgctgaagttcactgagacagatatcaagcacgataatacaatgaaaaactgcataagaaacaagggcaaaatcagaatcagataaaacaaggtcaaagtaagtcttcgaaagttgtttcactgcttaccacaacttgggatgtgtagtcgaatgcaaatacattttggttagtcaaaaatccatcaaggaatggaccaataaggaagagggtcagtgattgataggggcaagattggtataataattgggttgaagaaaccttgaacttcttctggatagtgtttgtcatctaatagctggttaaggatgacagaaaccaacaacaaaatagagtactacaaaattgtgatccataatagtgatcaaaaggaaaacaaaaaaatagttacactagtagcttctgtttatttagaaagggagcgacatcgcaagagatactgttggcaaatatcgagttatctaacattgcaaatgtaaacaagatgtattgcctacttgaatactcaaaccagaatcaagtgtgactgaccaaagatgataataaaagcctgaccgtgtatgaaaattctactttctcactacagggtgattatgcataaaatttcattttttgggaagaggaaaataagggctgaagttgaaggatacaatttgcgcgatgcaggttgtaataattgccagcaaggacaatacggatcccacagcattgagttgcagatcagtcactgttgcaacaccgacaccaaagaggagcactgaaagggacagttggatactccggctacagtgtcaatccagacaagggttagctcaagacatcatcacacgggcgcacaaaggtataaaacacaaacctgaacttcttcctgaagaaaagagtctccaaaataacagtgcatgggatgatagccagctttgtcatctagacataaaggacatttcggcataagttaggtggattgattagtgtggaagaaagggcacatcaattgaaataaatgcttgcaataaaatgttgtgctgtaataaaagccttctgtaataagtttattgtacaaacagcaatagataaaactgcaacacatcaacaagaagatatttactttacctgtacctctagctatcattgtaccaagggtcaaaaataagtatcactactagtttactactgtaccagacacccaataagcacaggactgcagtgaattaactaggaaattctggccggtacaagaatcaacgtaaagaagatcgcaaaccttgtacctggtaaaatccaacagaattaaaaccaagactcaagttgaggaggccaatggagatgccattgagcactccaaatcccatgacagttctcgagtcgaaaggcttgtgctcgaagaacttcatccataatgctacatggagggagcaaaatgtgacaagaagatgccaactcgtcaaggtagtggctgcaaaatacaattccatgtatggaaaaacagttggtgtcatttatattcatgtaaattctacaaacactaatacattgcaatgcatttgagaaaagaagtaacagaaaatggtaggtgaaaaaggaggctacaatcaacacaagtcaacctatgttccgcacaaaaaaggcacaagtcaagcttgacaataagttccacatacagtgcatgagttcataattcaaattgcagcaccagatcaaacaaggatattactcccctgcgtcaagcaacctggtagatgtgctactaaagcttgttcactgcactagtataaacaagtgaatctaatccacaccatcaaaaccatcaaagtttcatattcactactcctcttagcaaattttttttgttcaaaagcttcaccagaactgcatgagttcgagaaacattttatcctaccactatctctacaatgatgctctccccatctctaaattaaataccacggccaaattcacaaaaatcaaacactacaaaaaaaaatctaacaattgatctaagcacataaatcaataagcaatcctcgctgaaaacaacccctacgaaattcgcagagcatcacagatctacgcgaatcacaagcgaccaatcaagaagcttggggggaagcaaaggaaaaaaaagagcccagatctcccaacacccaccaaagttgaagccgagggagctcatgagcgccttgttgcagatgacaatggagacggatgacaccacggagaggctcagcgcccccaccgtccccagctggaacttctccccgccgacacccatcttctcctcctccgccgcccgccgcccgcccaccgcaaaaagggtacgaagatcaaagcttcccgatcgagggcgccccagccacgccgccggatgcacctgcacgcgggaagagatcccatttcgatcatcggagaggcaagaagcccaagaaacccaagaaatcgagcgaggccttacccggctgtggatctgggcgaatctggcgggggcgtggagggtgggcaatggcgccgaggcggagatctgcgggtggtggtgggattcgcggtggcgaatcgggggatgggagggaaggggggaggggaggagacaaaggtggagtttttatacgggggaaggtcgtccctcttctcgcgtcgtcggtgatgagatggattggaaatggagagagatgaatgaatggagagatggatagaaagatagagagaggctttcagatttgggagctattgattgactcagagtaaatgcatgctattttcttatggttttgtgaggcctgctttagttcttaaagtttttttcctaaaaacatcacatcgaatctttggacacatgcatagagtattaaatatagataaaatgaataactaattgtacagtttgtatggaaatcgcgagatgaatcttttgagcctaattagtccatgattagacataagtgctacagtaaccaacatatgctaatgacggattaattaggcttaataaattcatctcacggtttccaggcgagttatgagattagatttttcattcgtgtccgaaaaccccttccaacatctggtcaaacgttcgatgtaatacccaaaatatttcttttcgcgaactaaacaaggcctgaggttcatgctattttcttatgatttgatgagcttcttttcttcttctcgttaaaaaattttccttccattgagtattttctctctaagataaattttggagggttttttttatgttcagatgatggtttgttttcatgttgtgatgtttcttctttaatatgtaacagaagggtcaaagttaaccgctgaaacggtaatatacatctcgacggctttatgtatactcatttgtcggttttgtcataattaataaagtacttgccgcttacaatgatgtgttactttgactcctttttagcttctagcgacataacttgaggcttgcttcttctaacaaagaagggtgcgagagatagaggggctttcacatgtgggagctattgactctgagagtaaatgtctgccattttcttatggttttgtgaggttcatttcaagggttgggctggtggacctgctcaaccttatttcttcttctcaccaaaaatagtcccctccttttgagacttttatctccaaaattttggaagttttttctttaatgtttggggtgatggtttgttttttactgtggtgtttgccttcaatatgtagcaggagagtcaaagttaatcaacgggatgaatatatttcttgaacggttttctgtttcacttatttgatgttttatcatgattaattaataaagtgcataccatttatggtgatttgtaacttagactttactttgaccaaaaatacatcttgtcgatttgctacatttaattatgacttgtttcatactctcgttgataaaaccatgatgtagatccgtggatttgagttaagcgtacttcttttaacattttttttatttatagaatttgaatttatccaatcgaaaacattttattgctttcatgttgcggtgtttgtcctttaatatatagcagaagggtacatttaaatgttgaaacggtaatatatatctcgatggctttctattccactcatttgtctattttattaaataaagtatgtgccactcacaaacaacaatatggtactttgacttctttttagcttctagcgacataatgcatcttatggatttgaacgtatagctacattaaatcattatatatttatattagatttattccatactcttatcggtaaatttgtgatgagatatatttggttgagctaggcgttacttcttctgacaatttttaattgaattatttgaatttatggttttggcattgatatttattgttgatagatatgtaaataaattagtataatagttttattactatatcaatatataattttataggattttggagacttttttatagggtgatgatttgttttcgtgttgcggtgtttgcctttaatatgtaacaggagggtcaaagttaaccgttgagacgaaatcaaagttaaccgttgagacgaaaatatatcttgaacagttttctgtttcactcgtttatcggttttatcatgattaataaagtttgtgtcatttttgtcgtttatggttatgtgttacttacactttactttgactagaaatatgtcttgtctatttgctataatagaatcattctggacttatttcatacccttattgacaaaacaaccacatagatctagcattgcttcttttaacattttttcattgatagtatttgaactcattctactaataactttttattggctttagcgttgacattaaatgttgctagatctgtcactaaaaatcattatagtataataattttattactatatatcaatataatattataaaattcctggggaaaaataaaatgttgtaaaaggttaaatcaaaggcagcaacagttttataaacatgccaacgatgggatggtcctattatcaatactaaaccatattctattcatgttttaggatccttaaaattatgtgaggtcattatcttggcctaaattaaaaatagagccttagtgggctatgaacacatgcaaagaaatgtatagtgtcagtttataaaccagcctggattccctgatgtcagtttgtgcagcctcttccttgaaaagaaaaatgcagtgttccaatctccaccagaacaagcaggaactcagatcagggtgttagtattccctgtaaataaaatagtccaattcaaaaccagtgaactatcataaacactggccaaatcaattgtgaattctcttttctttgggatgaacatgcaaatattgtttagaattgtgcttagccccaaactatgatcatctgatgcaactctggactattatgggactttgaccagagtagtttgcttgaaagctgggtctaattatagaggagcacaagacaacaaatatgttggtaggtagcccccattggttagttcacttcattttagtttttcttcttggggtcatttccatgggaggaagacaggggaacagccaactagaagaaatcaaaagaccatgtggatcagttgaccctgcctaaattttagaacatttaaagctagattaaaaaaaaagacatggctatccatacatgaagaacacttctgaccgttagatcggcataatctatatcatcggatggtgaggtagtttagtttttcataatcactgtcttatcaaatgagaggcttctctagtgaagttatggggttctgggcatagatccaatgccactctttgttttaggcttgtttggtgatagtaccggagcagatcatgtgcctcataaacaatgttttggtgaggtaactgcagttcatttttatacttggggagttaatcaaagtacaaccatcattattagcattgtaaccacaatgtgatggcaaagctttatagatgcaaaggatcaattattttgctaattctattcctttgctttgctaaatgtgctgtttggtggtcctttttattatgcaagaaaagtggtttggcctatcaagaggaaaagaattggggtttggtatagtgtgaatggttgtcttctcataagccctagctttttggccctttgacatgtgagcaattttgcattgataccctgtccagctaggaaaaaggacacctttccatgtgctgcaagcaaaaacttgttgatgctagttaccttttccgattgttttttcataccaaaagcttcagtttttgggactatatatttggatctgttcaataattgagttcaaattacaatttttcattcgttggtgaaaataacaagtggccttaacgcgttatgaaacatattccgttagatttcatgaatgttttttagataatggattggtaaaaaccagacctctatattagatttcatgaatatgattaatccataatagcggaaataatataatacttcagcttaggtccaaaatgatatgccgattcttttgttcttggtcaaacaatggttgtgcatgaggtattgaggcagtagtgtctaactaactagcccaatcatactgacaatggtccacagatgtcaactgttagtttcttcttttgtgtcctcgcataattaagttggactgcaactacttaggcttcgttctatcctctaacttcaaattacaacttccttgtcttcgttttccgttagaacaattatcaaactacaaactatgcatttttacaaaaaagaaaatatagaatttccttaaaaaataaatattttttttaagtttgtaataattgcttgtacttgattaattatacgttgatgcctgtttcatattgtgtgcccctaaaactaacctagaatttcatccctcgaatgcagctgtagaagttactcttatactttaatcaattaatatatgagtaaattgcataaatctccggtattatgatccaacttgcataaaactatagggaatttgatatttgcatataaccccaagtattatggcattagtatttcacaaaacaacaatattaacaaattttatttaaatctgaacatgcataaaactcttaaatgttgacataactacagtggataagagaacttgtgtagaccgcacaagtcggattttcgttaaattggtcaaattgtgtggtttagtgaaagcatcatagtaaccggggctatatgctacgtgacaaaactcctatgattttgtacaacttgaatcactatacccatggttttgtgtaatttattcttaatatatgaggacacgggcacctaattgtgcacttcctaaataataacatagtcatgcatttgctgaatctgattttaattctagcatgcaaacaagtttcatgtgacacatgggcagatctcaagtacttgccaacaacagtaagtttgatagatggcagagagtatgaaaaaagcgatcatttttccagggtggaaagcaagtcaaggcatatgttcagaagttctctacctgcacgatatcaaccttcttgcttcatgtagggtgtacataggacttcctctagtcaaataaaaagatttggagaaactcttggaactttagtttggccattaatttaatatcagaatgactttaaaatatactaaattaatggtattatgacaatatttttcaaggaaatctacttatatctttttttttctaaactaagaaatcattgatggtcaaacttttaaaagtatgataaaatacagtcctaaacatcattgatggcaatttattatcgtaaatgactatgtaagttagaaaatcgcattgttgtcataatcttactgattatgcaggttgaaaatcgcacggtcaacctcacattggattggatgctactattatcttctaaaacaataatctagtttgcccaagattagaattgagggccaggaagaaactgccaaaaatttgacaatttgactattttgaaaaacttatttgaacaataaaccgtgcaaaaaaacttattacaaaatgaatcgcaaccttagtgccaacccaaattgcaatgagctataacgtctcagcgccaaaaccgttggcgcggagatcgtgtccggggtgacacgagttcgtcaatgacaatggcgttgagctctgtatgacttcaaatagattaatagtagtagcatatttcaaaagtatgaaaattataatgacatggatctaattaaccctaaatttaaatgcatcccttgatggcaaagaaaaaagatgttttcttactacaagattgagttatgcaccgctagtggtggaaataggagtagggcaactagggctgcaatcctactcctaagccagatatccattacaaattacattttaaaacccccaaaatgtataagataaaggcaaaattatgtaaattactctaattgagccctaggcttgagaaaattttgactacacccctgtgcactgctaagaacaaatatgagttattagagtgaaagaatgccctcagactggtgcagattgttagtgaaaaggtccaatgccatccttctgataatttatccttattgacatttaaaatcccaaaatcaaatttatatgctgcgtattgtgtactactactacacaatacacagcataaagtctcaaaatcaaaattatttaattgtattggttagtttatgttatgagaatgatgttagtctataaaatagcataaatgtttctgtaatccaaacgttgtgagttgtgaccatgccattttgtttatccaaagtctggctgctgctaagattgttgcctacaacaattggattagcactttgcagtgatcaaactgataaccttttgttatctttttttccaaaaaaaaaaagaaatttcctttcaaaaaaatttatatttcaataagtaggagtaaaaaccctagacaatatagatggtcatatggcccgaggcccggctcaaggcatgccattttggcccggcccaagcacggcacggcccgactcagggtcgtgcccgtgccggcctggcccgacagccgggctgtgcctgggttgcaccctcggcacggtgggccggcccggcacggcacgaccgaataaaaaaagtagagggacgcaaaatagacttaatgaaccatatcagacagggcctaaagagaagaggaatataaaatagacttattttcagtcatatggacccagcccacagagttgagggatgaaaaatagacttattctgtggaataacacgatgggccctcgtgccttcgggccggcccggcatagcccaagtcatgttgggccgtgcctaggccgtgtgtgcggcccgtgggctagcacgcacggcccgtattgtaggtcgggccgtgtcgacccgactaacctcgagccaggcacggccgggcctgggccatgccgcccgtttggccatctatactagacaacaaacgccaccacggctggctagacaaagtcatagcacacacaactacaacccaacaccagccacgaggccactaacttcagaccatcaacaggacccaaacacatgtcgtcgttgtcgagcttgtgcattaatgacataacatcttcgacttcgcggtgaatgcatgtcatctttactaaacgtgtgttatctcgttattcaacctgctaaaacgatatagcagctctgactccacaacgatgggcctcagcctttgactctgcagcatcacatccccgcaaaggccaacaccaacgccgagcaaatcaacacggacgacgtacattaccttcctgcacgacactacaaggttttctcaagaaagaatcgtgcaaaatagagaaaaggtcttcattccaattccctttgacagtacgattaccacttcttatattgtcgccactctcaattcctattccccaacaaactcgatctaactcaatcctgatttattaaaattttaaatacctggcttatctctaagatgataacaagacaacctactccacgatcgctctcgaggtcgtgttcctacgacgaggtcggcggtactgcagctctcccacatgacatgaattctgtgtttcgaaaaaaaaaagaaagggtattggcctaaacgattatgcaagttagaaaatctcattttttgtaattgtcttactgattgtgcaaattgaaaattcccatcgtttttaacctcgcatcggattatatgctactattatcttctaaaacaacaatttagtgcgtgaaagattaaaatcgagggcagggaaagaaacagacaacacatcccaaaaaacaacatacacacacatatcttagagcccatgatgacataattgtccattgggcacgtcctaccttttcagttgattttgctcaactatacaagagaaacattcccaaatgaacaacgtaccagaagcaaattacaggttaaaagaagcaaatcagagaacaaagttcctgctgtcaaactcatcattgattggattggaaagcacaaggataatccacacatttgacaaagttgacagctgatatgcatatcatctttcaaagatcaagcatagattgatagacatcactatgcccattacctgacgacagttataagagtacacaagaaacgatattgattatcccatcacattgcaagacacaacacagaattcttagtagccggagaagcaacagtgcacaagttatagagcagcagcaagctactggtagaagagagagagagagagacacaggaaagcatgcattgccattgacagaaaacatccacaaagcatccgagaaggatggcatcaggatcactagctttggttcatgttgccatcaccagtggtctcttctggtcatgcagcagctgccgcagctcctggtagccgctgcggtagtgctcgagtgagaagcacagttgcctgatcgcctcgcgcttcccctcggcgctctcagagatcacaagcttctgcatctctacctctttctcgagctcgcatacccgagcatgcagttctgacagggacttgcgggcaagatcggcctgtgccattagcttggaatgctcaagctgaagctgattcagttgatcatccatctgcttcatcttttcatcgcgagttgtgatgtcggttagtagagtggttactttgttgtccaccagggatttctcggataacagcaattccagatcggttttgacattggccagttcttgattcagcctggagatttccttctcgctgttgagggattcattagccttttcgtcgtaaacttgtttgagctctgcctccacggatgccaacttggcttcaagagaagcattggcttcagataattttgaaagctcagcactcagagaggacttctccagtgaatggttctgcaatgaatcatggacagcctgctccagctccttaatcctgtcctggagtactgatttctcctgtagtgttccctctatctgggctcccaagttcttgatggtttctggtagctttgcaacctccatgcctgaattctcaaagtcccccaaaagttgctcaaattcaagaacacgttctctgagcacttctttctcctgtgaaaccttttctaattctgcttgtgtatccttcattagttcttgcagattaaccatctcagaaaccgaataatttgagctgttaactgactgctcaagctcttcaacccgagattcgagcatcaatttctcctgtgatatttttgcaaagtcgtcttcaaaggttttgatgactccctggagctttccaatttcagcctcaagagcagatatatcatgcagatacttctccgaaagtacctcaagctcctgtttgcacttatcaatttcagtatcacgatgcgcaagttcaacttcaaactgcttggctgccgataccattgattccttcagcctatcaatttcatctttgttcaccaatacaacagcttccaatgcttccttttcacttttgacttcatcaagatccttctgaaggctactggtttccacatctgaaacctgttgcttttcctcatgttcagacagttctgagttagcaccaaaattacaatggcaacgcatgttcttttcctcggaagcatcaagtttaccccttacttcatgaagctcatcctcaagctcaataattttttgacttagggcataaaaaatgctattgccattttcttctttagcctcatcaagctctaaatcagattctgaagatgatgaagacccatcactccccttcttggatacgtcagaactcataccagagccaatagaaacatcaaagcaatctgatcgcggtttttgcttttgtgacatcttctcttgcaagtcacgctctggtgatgaaggagactgtgcctcagaatctgattctgagatgccaaaggagacagatgattgcagagatgatgggatatttttgcgcaattctccagtcacattgccatatcgcttggcaagaacacgatacatctgctgaaagttctgtacgtgagtaataagaaccccagccttttctgcagagggttctccttcctcaataagctccagcgtttcttttatctgtgtctccatcactgttcatttaaaagaataattatgttcagggaataaataactagcatactagttaaattggagactaatattgaaaccatcatgaccaagatcttacaaatctcatggctagcaaacgaagtatgttcttattccagcatgtaagacaagaaaaagattatggtctcattccttaccttctaagttatcggagagccacttagaactttttggactaatatggctatcccaccaccatgagctggatttccttgattgcgtcttttgcattttctccattttgataagataatgaaaacaattccctcaagggtgaagacctgactgcatttccaagaacaagtgagaaaatgagaaaaatgcacatacactagtaatacacttgagaataagaaagaaacagcaggaacattatctgtagtacaaacttaaagcagacttcagtgacccaaaatttcaagttaatcattgattcatctcaacattcatggaaaatgtaatctagtactacctccttttttaatatatgacgtcgttgatttttttgacaaacatttgactattcgtgttattcaaaagtgttgtgcaaatataaaaatatttgagtcatacttaaataacatttgatgataaatcaagtcacattaaaataaatgataattaaataaattatttaaataagacgaatgaacaaacgtatctaaaaaaaataaacggtgtcatatattaaaaaacaaagagagtacagaaagggcaatagtcagtagtaaatgatcttgaaacttgaaagccagaaatgtaaactgctaataaaacaatgttcttatattcagctcccattaagcgacttgctcatacaaaggggaaaacaaaattatccaatggtctaagacaacagaagagtaggtcttgcacactttgtaaaatagaatgctaaattctatcaaagaaggccaacatataacttactaatgaagatgtccaatatgcaaaattagacaaatcagatgcagaaacgcagggaccagaccattgacagctatggaggaggcaaaagtatcatatcatccatgatcttatcagtttcactgtcggaaagcccataataacatgtactagcgaacgatagtgatgtttcttcttttagaaatagaaagaacatactacttcgagaatatcactatattagaaattgaataatatataagaaacgtctttcaaactgaccaataatagatttatagtaaagtaaattgccagtgtactgtacgactattttctgaaaaaaaaatacattttacataaggagtgtaaaaataacacagcatccgtaacaaacaaatcatgtgcttctataacccagtcttctcaagtcaatatagataagaaaatataaggtttgtatttgcatactccaaaaactggaggagtcaaagttggtcaaatcttgcaactacaaaatcgtcaaaaacttatttgcacaataaaattggctggcacttggttatctatcacatatcacacgtccaactgcaaaagacacagcaactacaggcctgttgctgatatgtaggtcaggcaacaggataactccctccagacaagaagaatgggcaacacaaattctgccccacatcgatcaaaactctgtgcttcaagcaagatgtcacaagcttgcaaccaaaaaaatgttcttgtcgatgtctatccaccaaagaagtgataaacaggaccggccagttctatattattgaaggccggggatccacaacacatgcattgatcagtgcttacacctagatagacgcatcacgaggtgacgagtgatgaaaagtgtcaccaccctattatctgccaactttattgggacaacaattgattaaatggtctacggcggaagagaaaatcttgatcaaacatatattgctcatttgcacttcaggttcagagattcctaagtctcaacatacatataaacccatatacgtgatacgaatactgaattgcttgctcttttcttttccattttttaatccaagaacaaataaatctatctgctctaaacaagccgaaaaaataaacattgaattcaagaaactgagatcacattcattactaggtgacatgcgtaataagaacaacagatgaatgaatcgatgccattcaaatcatataaattatacagaaaaatggttgaaaagagtcaactagtaactttttactggatttatacgcacaacatagcatcaatctctgtacgacccccaatcgcaggtctccctaaagaataaagtttttttaaaaaaaaaagaaaagaaagaaagagtcactgcaacacaagcacaaaccgccactcattctcctcgcgaatcatagatcgaacacccaacaggcaacaacagacgaccgcaagaagcacgaactcgcggccggggacgagaaaaaaaatcttggcgaaacgggacgagaaacccgcagatcaggtacagtaacacacaacccatcatccccgctcccaacaatcaaaaaggtaagtagcagtagactagtagactatagcagcaggcaccaagaaccaaaccggagatcacacacgcacacacgaagaaagaaaaaaaaagaaaaagaaaaagagagagagagagagagatcattaccccgacgtggagagagatcaatcagagcagcatatcccgcgtggcttgtggaatctggagagatggagaagaggaggaggaggaggaagaggagagatcgatttcgatccggggaggagcagcaggaggcaggcaggcaggcaggaatggaggctgggggctcacacgagcagaggcggagcagcagtggagcagaggaggagagagccagttacgaaaaaggagcagcacaaaaacccaaaacccatcaaagcgtcggtttcttctactgcctcgccctctaattttaaatatagctacgagattttacgtttaatgtttaatagtccatcttatttaaaaaaatttaaaaaaaactcatatttcttctgttctataaaaaatcaataaatctgaatatacctctgtctaaattattcattatagtaaaatatgtactccctccgtcccacagtataagggattttgagtttttgcttgtaacgtttgaccacttgttttattcaaattttttttgtaaatataaaaaataaaaagttgtgcttaaaatactgtggataataaagcaaatcacaaataaaataaataataatttcaaaaaaaatgaatgaaacgagtggtcgaacgttgcaagtaaaaactctaaatctcttatattatgggacgaagggagtaacatctaatactatattctctttttatataaaaaaatacataaagtactccctccgtttcaaaatgtttgacaccgttgactttttagcacatg

SEQ ID NO: 7442 - DNA, 14587 bp, Oryza sativa
tgccttacggtgatatagagtcgccaaccaccctgatatagccaaaggccaaatcaagatgggttttgtaggaagaaaagctaaaccggctagcggagccgatttagaggaggctgattttgatcgatatgaggataattacctgtcacgtgggcaaacggaaggtttacgggacgaacctacaaaggggtaatcgtactctcacagcgatggcagacgatttatggcgcaaatcaacaaagatggactaaaattagggtaaagtagaaaacatggctaaaaagtaatgaaaggtaaaagaacgattcgattaattgtatagattgtttgatattttacaattgagctggccttgtcccttaaatagggattggtcttgccctctacaggccctcctccacgttcaatttgggatagaaaccaaaaggaacccgaaacatagccccctgagtaaggaatcccgacacccgacgaaaacagagtcggcctcggactttgacggtcagaccggccacatgccgccggtcagatcggcccttctggaggaaatcggtagattaccaaatcttgcaattttccctatttcaaccccaagtgccaaatttgggtgtaaacaccaacaacaaaccataatgatagagagagaaacgtttgatcaacataatattttctgattttttaaggatactacttttattctacaacgtaatctacaaagaggaaccaacccatacgagctcagtttgattgttctaaagagataagtagatgaggacgggctcacgttgctcccagtgtcagggaaaccaggtgtccccaaacgcccggccaccaccgccccctcctcctccttccgccttgccaccgcccgagcggaccgctcgcaagctaattaattggggcacctaggcgcccatgatgaagacgggccagattagggccaccgcggttggattcgacgaggagaagttggggaggggggcttgggaggaggggggcggttgcgctagttgtggtgggaggccgcgaggcaacaggaggtgacgggtaagatggcgggcagcgaaggaaagaccgcggacgaccatggctatcgaggccggagccttccagatccgctcagcgggtaaccggcagtggcaaagacggtgtggtcgggcacctctgtgcctagacgatggcagggacaatgatagtggcagtggcagaggatgtggcggtgcagtgggtggatgtgaaggatctagaacgtacgtccggatctggtgttcccgtccagatcctaagtggtggtagggtggtcggcgtcggggcgatgcaatgagcggtgacagcgtgcaggcagggagtggcacggtggccgcctagacgtaatgtccccagagatgtggctcgtggcaacgataggcgacaacgattgtgggtgggatggggagtggctgcacgctgttcaggtgtggagacgaaggtggcagtcctcccccaaagcccccatccccttctcctttcatgccgacaggagtgttggcgacgggatgacagcgacggtggctatgtttgtggtctgtgcagaaggagggagaggccatggttcaccggatggcggcagctctcctccttcgtagcaacgagctacgatgtaggcgatggtgggagattgcgatgttggtgcagagtggtgttgtgcatggacttcggcttcttcctcgagaaggggcctcctgtatggtgtccgctggcgattggcacttgtgcggtagccatgcgttgaagggattttggatggtagcggctgttgggagtgatggagatgtggcatgggagggccaaaggttctttgggagaaagtccaggctgtttagggttggcagcggcagcgctttctggcgccgcaaccttcttggagacgttggtgtggagtcttcttccttcctaggggattattcgggtgaaaattgccctgctcctgggacaggcgatggcgacacccttggcgtcgtaacctcattggaggtgtcgtttgaaggccctttcccactaatctctaatctagatgatttgtcctcctatgccggcgcttttgggatggccatgttggcgggtctgcgcgggggagagtggatgcatccttctctctcgccttctccctctcctacctaaaagcatggatagatttgagtgtggtggagtcatagacgtgcggtgtggcgtgttgtgtttttttcctaaatatagcctttcagggctagtcttgaattttttttagagtaaatttcactttgcaccacctaaagtgaccaaagtgtcacattggactagaactaagcctataatttcactttgcaacacctatctttaccatccattgcaagttggactgggcttacagttttgagccatttggttggcttcagcttgatccacgcgaggagctgagcgtatgctcgtgaatcgtgatgggagcgataccaagcacgtaaagcgcatcagtggcggtgtgcgtcaacgcatgggaagcgtcgtctcagtgtcctataccagcaaagcccatgccatcaccaagtagctgcgcctccatgactctatccatgggcttgtgcttcaacaagaagaataagagaggaacaaatgttgcgctcgctgtgagttcaatggcggcaactgcacacagatgtgaagaagaagaagaagatggggagtttccttggcatcgggacatacaggacgagctgctcacgtcaatcgggccaaagccaaataggtgactcaaactataaacccagtccaacttgcaacgggtggtaaacataggtggtacaaagaagtaaaaatataggcttagccctagtccaatgtgctactttgatcactttaggtggaccaaagtaaaatttactctttttttatgctatatcagtatgagacattgcactgtcttacgtggttcgttggttaaaaaagatagaattttaatttaatagtaatatttgagaaaaaacaaataaattactacctttattttttaagtatgacgttcattgaccttttttatcaacatttgatcattcgtttattaaaattttttgtgtaaatataaaactatttaaatcgttctaaatgaatatttgataataaatcaagtcacaataaaataaataattattacatatttttttaataagatgaatgttcaaatgtatctcaaaaagttaacggtgtcctacattaaaaatggagggagtaattgttataaagctttgtttttcaaaaagcatgtaagtagtcctacaaacctttctagaaacttactatttaaaagtttaaaaaaacttactattttaaaagtttaaaaagcattcccgcaataatttatctataagagggaaaagcttgccagaaatctaaaaaccacaatgaatgagttttgggctgtgttcggcatggagagttgaaaactaaaccaccaccaccccccacccccccccccccccgccaacacacacaactaagctactcattagcacataattaattattaagcattagttaacaaaacataaaaattgattaatatgtttttttagacaactttcctataatcttttaaactgtttagcctcctttgattgaaaggaaatccataggaattttagaggatattattcctataacaatttgtttctatatagtcctttgaatcaaaggaataaatcatatgaaatcctatgatatacctaatgccatgcaaattttgaaggaattctataatgaggtagaacctcatggaaacattcctatgagtcattgtatgaaacatgctacgtttttcctatgaaacattcctatggaaatatgctacgtttttcctacgctccaatcaaacgattattattgtgtttatcatgtgctttgtaattctctgtttcagacttatattcataccaaaatcttgtgttttttctatttatatattttctcaatcttgtgttattcaaaatcttgtgttcttgggtgagggttcccaaccctcacctcaccttttgacacgaaaaacagagcaatggattaatgcgtgattaattaatattagttttcaaaaaacttcaacaatgaattaatatgatttttttaaagcaacttttctatagaaaaattttgtaaaacaagtactgtttagccgttcgaaaagtatacgcacaagagtgagattgggaacttggactaataacacatcctaacacagaaacgtagggcctatttggttctctaccctaccaattaattggtagtaccaaaatctaggcaaattttggcactaccaattttttggtagagcaaagttagctaatctatgtttggtttaataccaatataaagccaaaatttagtatgagagtgaagaagattctagaatgtagccaaattgagcgtgggcgctaccaattgtttggcttcaatccaaactagcatgtttactattaaagttaccaaaattttggtagggtcacattttggtttcaatccaaaacgacccgtaaagttgaagctaggagaagtgccgaacacactaggtgacacgtagataatccatgtcatcccatgtgcaccgtccaccccgatccacgcggccatccgtgcatgccacgtgttccgctggcgaatgcgacgacacgccacgtacgctagcaatttagcaacgggaataccgtatacgaatcgaaatatattaatataatactaacatgtacgccgttggccgtacatatcgaccacgaaacctccggacacttcccgcgaggcttgtttagattaaaaaaaatttaggcatcacgtcaaatatttcgatatatgtatgagatattaaatgtagaaaaaatcaattacacaatttgcaagtaaattgcgagacgaatcttttaagtctaattacgccataatttgataatgtgatgctacattaaacatttactaatgatgaattaattatgcttaataaattcgtctcgcaatttacagtcgaaatctgtaatttgttttattattagtctacatttaatacttcaaatatatgtccgcatacttcagaaactttacacccaaataactagacacacattaaatcgaaaaatatatatgtcgtcgcaacaagctagtttggcctcttgcctgcacgtacagtctgtttaattaagcatctgcttccacttcgtatactagttcgtaggagtatataactttcagcttgatttgttgttcaaaatatagtaatccattatacaagcgcgagatggccaacagtacagctagtttggctttggcatatcgattagccacagtctcaatttttaaattttaaaacttaattacagagctggtttaagattttgtttcttcattgtagtttgttttctgatatttacctttaaattaaactactaataatatattataaagtttcacggatcaaatatttttctgtaaattagatccacgataggtaggtgagatcaatcgtaaaaacgtgagaaatgagtatggcattgcaacaacttaacatataaatgcaatctattaaaacctaataagtgagtgcacaagtgcaataacttacatgatggatacgattttggtacatttagaagtgatgcgatacttaattatttagagcattttttctaagtatatacctgcgtcgatttatataggcatacttgatctttatcattccagtaattaagattcaattaaattttacactgttagaaaattttgtattttggttgagatttgagaaggtgaaggaaaaatatctaaacatgtggtgcagattggatgagcaacttaattcttatatattacatatccaaggttgtaaggtaatattggcaccactctttaaattgttgcacttgaaaattcaattctcaagtttttttttgtattacatcatacccatctactaagttgtgtgcaattactcttacttttggtaagctttattcatttttcagacacataggtactacttacatttcaaaatatagggcgcaactgtttttttcgatatttcataatacgatgcgcatatacatgcgtgcaattaactagatccttcctcctctctaaaatttgtttttttaaatcattcaaccttaagatctctaatctcgttaaaccgtctgtctttagtatcacttagatccatgatcttgtaaattcaacatctagatctatgatcctgtttaagtgaatcatcacatgtccaaagctcgtctgatccggttgacctttctacgtggcggtccagcatgaccgcaactttgcacttagcgccctccacacccggttgacccacttctcctccccccccccaaatatctcctctacccgcggccactctcactagaacccccatccctccaactcgcaccattgcaacgactccgagggtagcaattagggtggcgtcagcgatcatgggcggtccgtggtgaccagagacgcgttaagggcagcagcaagttcaccgaattagcaggtgatcaagctttttcctccgtgaacttgaagaatacgtgctgcttcgagtagctatggccttccctacaggcgcacttcagaaattaaatccccctagctgcctccctcgtcagcaccaccctaccgcctccctcgtcgtcgccgtcatagccacgtctccactaccacccctgtcactgtcaccacaaccctaaatcaaaacaatgaagatgagaagacatttgggagagaagtgggtcgaccgggcgtagaggggctaagtgcaaagttacggtcacgctggtcagacgggccttggacctacgataattcacttaaacaagatctaaacaagatcataaatctagatgtcgaatttacatcatagacttaagtgacaccacgccccaactttaagaaccgatggtgtactttactatatatttattagggtgatctaaattagaagataataataggtggttgcccctcatactttggaatggagggagtactacttctctctttcatgaaagttctgtttttcctaactattattttccgtgattgatccaaataaaatcacctaaatattttcacaatttaagaccattgtaaaatttgatttttcttgtttacaataagatatcttatttcaataaaaaatcataattatttgtaattatataaatggctaaaaaaactcttcccacaccttcgcatgtgtcacgcccagaaattcccgaatagaattccaagcagaatgtgcattaaaatccccgtccaggaccagccggcgtacacaaacgacaatgttgacattcagatccacgtcttacaaacatcataaaagtcttacaaaaatgcagcggaaaacaaaaggtaactggagctaagccttgactaaactgcagcgggaacaccactccacaggcatcctcgacagcacggacaaagcctactcctcggagaaaccttcatctgacccgaactcgaactctggggttgggaaaagtagagcaagactgagtactacccactgtactcagcaagtcataccggaataggggtatgatgcagggaattaacaaagaagagctagagtggttcatttgcataaaacgagcatttataaacagaaattgaatgcgaaaacagttgtaaattaattaatattaaacatccgctgtccaacgctagcccacgttgcgacaggcccaaccatccacctaaactatccaaattcaaaagattacactagggtgagactaatcacggtgaatctggttgaccgcccataaccgcgggcactgctattcgaatagttttactctgatcagaggtgtacaactgtacccacaagacacagccccacgacacgtttccgtgcgccgacatgccaccacgacatcccggaaagaggccgtgacaggaccattcgcataaccccctctaaccaagcacaccacacctcaggtttcacccccactcctcgcaaggcagcgggcagtcccctctcgtgcctaggtgaatccggaagccgcataggccgtcgcagggcccatccaaactccatcacgcccacccttgcctggatgcgtcggctagaggaaagctacactacaagcccagccgttgcccacgctggcttgtggtaagtacgataaattcttccagggcatcccgcgaaccggtccttaactgccatgggtgcgaccagcaaaaccatgcacccacagcccaccatgtgattcattttaattaaccaacaccaaagcggtgtcactaatccaacattatcataaaaacctatagtctaggttttaaatgagatctccccattgtgtgctagttgaactaagcatggctaagcaaaccctagtcctaactctaatcatgttataacccaagctaacaaaggagcatggtatcaaaatagcatggctgtaacaataggtaaccatcccatagtattattgcaaaacaaatgcggtatttgaaagaaaacattaggacatttgcaatataggatcaatatgatcaagtgacaagcatgacttgccttgctctgctgctggaggtacctcggcgactatctcaaagtacaccggagcgtcggaggaatcggaatctagcgacatacaaagcaaacattgcaaacaggctataagactactgaaacagggaacaaaaccatttttaatggattctacacatttttcttgatttactgagacttgaatgggattaaacggagctcggatgaattagatatgaattttagaagattctctgtgtttattactataacaaaaatccttaaataatttattgcgcaatattaaccagggctgacgtcagcacggggcgcggcgccgacatgcggggcccaccggtcagcgactcgggagagggaggaaggggcgccggcacgcgggcccactggtcagcggcgcgggagagaaagggcggcggcaccggctcggcttggctcacggccggccgaccgaccgcggcgacggcgacggcgcacgcgcgaacgggttgccggcgacggcaaccggcggcgaaggcgacggcgcaaaggcgatgcggaggcggctgcgctaacggcggctaggaaggggagggaacgggcggcgatagaggcggccgccggctcggctcggcatcaaaaccgaccggccggctaggtctagcggcgacggcacgcggccgacgacggcggcaaccggcggcacgggaggcggcggcggcagtcgaaggtgacggcgcgcgacactaagaggagaggaaggggaaaaagaagggaggggtgcctcaccgagggtggccggcgcggaggaagacgatggcgaacggcgacggcaagccacgggaggacgacgtcggcgagcggacgagcttcggggtgccctaaggaaggagaagagagggattagagagaggatgataaaccacggcgaccggaaaccatggccgaacgcggcggtggaggtgatgctcacccgtgcgcgagggggtgagggctccggcgacgaacctcgacggaggagaggtggacggggtggatctcggccacgcgaatccgacggcggcgacggcgcggcctggcggcgagcctagcggcggctagcggcggccggagcagcgaaaatggcggcggcaaagggttgcacggcgcgggagcgatgggaggctcgagagagtgcggcgaaatggggaaaaagcgagagggagcgacggcgatgcttaaatagggggagagggaaccggacgtggccgggagaggcgggaatcgccggccgacgtgagggagtggggaagagagagaggcgggattcgattttcgaatcccggccatctcgggcgcgggcgcgagcgggagagagaggggagtgggcgcgggagacgcggcgcacgcgcgggcgtggtcgacgtggcccgggggaggcggaggcgagggcgcggcggcggttgcggcgcggcggcgcgagcgagatcggcgggaggtgggagacgggcccgacaggtgggccccacctgtcggcgacccggagaggagggcggcgggcggcctggctgggcctcggcctgcggccggcccagtaagggggagggggaaggaaggagggaatgggccggcggcccattcggaaaaaggaggaaaaagggagggaaaagaaaaaagaaaaaaaggaaaaaggattttccctggaattaaaacattgcttgctcaattttaattggttaaaattatttctagagctctgaaaattccactaaaaatccctgttaatgagtttcgacatgtagaactcaagaaaaattccacatgtcaaatccgattattatttgcattactttcttagggttttctcctgatttcacctgcattttcttagggtcatttatcaaaattacaattttggcttgggaggaaaacttcggggtgtgacagcatgccactaataaaaaaaatattttcgcagacggtcaaaatggctctatatggaggcagccaaacacactgcctgcaactaaactttgcaaaatacaatattttttaagcggatatgctcgtacatttacgtgcttttaatcatttgttattcaatatccttgattcatagtttcatatatagtcacccaattataatataatccatatgagttgcaatgtaattacctcacaattacattataatctatctattatatactaaaagtccattaaatttcctataagcgctcctaagccaccacgtgtcctcctacaaacgctccaaagataccaagtggcattctaaaagtctaaccgttgattttcctttaaattggtgggtccaatattttcaaccattagatcaaataaaaaaataaaatcctcctctccacaccggtccccacctcctctacgttcccctcctcctcctcctccagttggtacgtaacgtacgtactccctctctccccacatatcctcttccctttcctaatcttcaatctatctattatctattatctatctattatctactaaaagtccattaaacttccaataaatgttcctaagccgccacatagcacctctaaaaacactcctaagttattatgtggcgctttaaaaaattttagaatgcagtggacctatatttataactattagatctattataaaaaatacaattaaatttacctcaaaaactcacattgtatgtgcacgtataggtataaaaaaacaagtacgtccatactttgatacgtacgtacaacgttgggcccacatcattctttttttttctttctcacttattagatggaaaaccaatccgcctatatttatcgtctcactttcccaaaaaaaaacttaattacatacgtcatatactatggacaaaacaataaatcacaaaaatatatcaatatattaatagtaaaatcagaaagaaatactaataagaaaaatcataaacgccagcacttattgttgtcaatagtctttaaactacgattttattaaaaataataccacacagaaataagtaggaggcaaaaattataattattttcatcacctcctcttttttccatccctgtccttcaatgcagggtgtagtgtttactatgccattgtaaatatcacaggcatatgcatatggttgagttaagatggtgtcagtaaaagaccaatgtagacaatgtatctaaagtgacattcttactaatgcaatcctttgtgggtgtgcctatagtgaactaagtgttaaaatggtgcgataggatggtctttaggtgcacttctacatcaatgtgggacccatgtttcagggcattacataagaaagcttttgtagttatcgacttcatccgttagagagacatttatgtctatttttaacggtgctatcgtattatccggtagaagtggtatgtttagactatttatacatagatgtggaaataagtcatgggcatcgagttaagcagtgttgatgattttttaataatatacaatgcagtttcatttattaaaaatgcacatagcttttaaaactataacaataggggagtttatatatgaccacgacaaaatgatttttatttaaatatgagagatattcttattcttatatttagtagtatattaaaatataccatctattttacagcaaatatatttcttttttattggaagataatttacattcccttacagtgtatataatgatatatgatttattttactattctttttctagaacaacaaataagtgtcagtgcatctatgcggcctttatttccagtttatattttaaaaatattttctaatttatatttcacccttatagtgtttgaaatacaacctacgatacatgtccgcgcgaatgcgcgggctaccttcctggttacatttagaagtgtttcacctaaaatacttgcaaagtttcttagatagtcccttttcttgtttgatcataaaagaagacaaaaagctgactaactgtttttttgaaaaaacaaaatcgtgttagttgtgctgcttgtgcaacgtatgtttagtcgaatgatgtattaaaacgagtcgaatctttaattggagaaaatgaaaccaaattcggctttatgcacagatgttccatcagcacgtgtatatgatgggttattatatattcataatatattttttcttgacagggatacattcgtatcattatctaaaaaaaaggatacattcgtatactcaatctcgattgtcagtcgccgtgtcattgatgttgccttttcccgtacacgtgttgttgataactaaattagctacggttacaggtacacttttaacatttatattaattaatttgccatttagaatgaaataagtttcatacatatatgtgagtaattcatttggacccagataaaaaaaaaacaagatcagaaaaattgtaccaccgtatctgacataaaacgataagttcatactcccttttctgttctaaaataaatttatttttcacatattccatacataccaacactaaaaagactagaatacctccattttattaaaatctcaatgcagatatttcccattttatctattttcaacgtacttattccctattttttacaaactccaataataattacttaaaaataaagttattttgggatgaacaaaaggcaccaaaaatcaacttattatgcgacatagggagtatcacacaaatactatccggcacattatccatctaagatatttatccgatatgcatattaattatccggactgtttggaaccacatctcctatttttgcacatgtatccagggtacaattccctgtatacatctagccagatacgtacggtgtcgaatcaattgaaaattacttttaacatttccaaccagtctatactgtctgaaaatgataaagacagatgaatcaactggggccagacacatacataggatcaataaacatatagtataatttagcttttctgcaagatatcacttaactggaaatgttatcccatataaagttgtcgcggttctttttcctgttttgacacatatctgccactttaatggagatatctgtcccgcactaactctctactggtctttgtaaaactccctaactgaatttgtttaatttcaaacattagaatcaattggtgattgtgtatcataaccgcattaaactaataggcatccttaatctttaggtaggtcatcctggtttccacctcggcaactaggttagtgccatgacagcttctagctagtagcacgtatgtgaaaaacattgcatgttttgcaatccaaatatgtaatataatattcatccgactcctatgcatgttcagggtttacacttttgttttccaacaaattttcggaaattcagtggctcctgaaattttgggaatttcggtgctttttcgcccgaaatttattggttatttgacaagttttgaatgatcaaattcacaaaaaaaaattaaaaaaaaggggcaatatatgtcatccctgtgcatgtctcgatgttggtagtctctcaccaccaggatcgaaatatcacccgtgttcatatgtaatctgactcaggaatgcaaggtcgatccttctataagacggccataccgttggacaatagaaagctagagagataaatatcaatcttattctaagcgatcagagttatctcactttcctcagcagcatgcttttgcatcaccttatcacataaatttcgagggaaagcaagcaggaacaatgtatttaaattgtaaaaaacaaaaagaaaatgtatttgatttgtatttggatcgggccctaaagttccacttcaacctgttgatcgaaggcaaggtgacatatgtataacaaaaggtaagaaaaagtaaaaaaaagaagaaataatatgagtgataataatttgctcgttgagttggataacacctcgatgggtgcatgcaccttgaacagccaacggttatgcaatatcagaatattgaaaaagaatgaatattgcaaaatcaggagtctatatacttcctccg

SEQ ID NO: 7443 - DNA, 20440 bp, Oryza sativa
  unsure (1)..(20440): unsure at all n locations
attaaaaggtttgcacacttgtctaatcaatttcttttttgaatactaattaattatatgtgttgctccttttataatctacagtactttaagcataccttttcgtttttaaattttgcgaaaaatttttaaataagacgagtggtcaaccgttgccagttaaaaactcaaaatcccttatactatggactgagggagtagtatagctaagagcaagtttaatagtaaagccaactaccagctccaattcatctatagccaatctaatagctcattcatacaatagttatatactactctattaatacctggtcccacctatcatactcacactgtgtcttggagtccgtgctacaactggctacaaatctgtagcccgctgctcttctctctccctgtttaacttcttaaaatatggttgcagccagcttatagcctgttattgtacatgctctaactactagcttgaatttatctatagccaatctaatagtttatccatacaatagttacatactacactattaatacctggtcccacctgtcatacacacactgcgtcttggagtctatgctacagctggctacaaatctgtacccactgcttttctctctccttatttatctcctcaaattatgtttgcagctggcttatagcctactattgtacctgctctactaactccaaatcatctatagccaatgtaataaccaatttatataatagttgcttgttatactattaatacctggtcccacctgtcatacacacattacgtcttgaagtctgtgttgcagctggctacagatatgtagcctgctgctcttctctctcttcatttatctctttaaaatatgtttatagctggcttatagcctgctattgtacctgctcttagaaaagcccttagatgcgtcagagtggaggtgtccggagatcgaggtggctgttggctctgaagtgcgtggggtcaccgactgtggtggtgtcggtgaagaactcgttgttgccgaagtcgtagctcgagagtgtgtcgctactggggtcggtggaggcttggggactggggtaggcaccctcgatgaagaggagctgcctactcccccagctccctcgaagtgcacgtactcgacagtgaagtcgtcgtacgtcgaatagctgtcgtccaccgccttgtctcatgcccaccctcacccttcgtcgaacactacgtcgcgcgccgtgcgcacatgctgtgtctctaggtcaagaatgcggtaggccttcgagccctccgcgtaaccgatgaacacccctagggtgttcctgtcattgagcttgccaatgtagccgagctccttggcgaacgcgaggcagtcgaagacccgtaggtgggggaccgccagcttgcgcccatgccaagcctcgtacgatgtcctaccgtcgagggccttggtaggcgagcggttgaggatgtagacagctgtcaccaccgcctccccccagaagatggccggcatccccctctgcttgaggagagcccgagccatccccacaaccgtctggttgcgctgctcgacgactccgttctgctgtatgctgtacggcgcacagtagtggcgctgaatgccctcatcagcgtagtatgacgagaattcagccgccgtgaatttaccgccgttgtcggtgcacagcacgcgcaatgtcacgcctagaaattcccgaatagaatttcaagcagaatgtgcattaaaacccctatccaggaccggccagggtacacaaacgacaaagttgacatatatatccacgtcttacaaacattaaaaaagtcttacataaatgcagcgaaaaataaaagataactggagctaagccttgacttggattgcggcaggaacaccactccacaggcatcctcgacggcacggacgaagcctattcggagaaaccaccatcggactgtaacgccccgattttcgttcgggaataaaaatcaattaataatacattttctagaaattaaataaaacttaaatcaatttaatcaagtaaaataatgggagaattaaaattttcccttaaaaatcattggccgggaatattttgtaatattctttgcgccctaatgtactctccggaattttccgtgaattttcggagctcgagaaatagtttcaataacacaaagatcattgcatcaattaaaataaaaagaaaacaaataaaatttcccccttcctctctttgggccattttcggcccaagtcttctttcctctcccgcgggccgcgcgccttctccctctctcgggccggctcccctctctcttggcccgctcgcaaaagtctgttttgcgtcccttcttctctcccttcgccgacaggtgggaccggcggtcccacccgtcagctccttcttctacctttcgccggccgaccccaaccgccatagccgtccacgtcgccgcaaaatccggcgccctcccgcacccgagctcgcatccaacgacgtgggcacgatcccctccacgtcctccaccatttcccccactctccccgcgaaaatcggcgccggttaacccctccaccaccccacgtcggcgccccacttcgccggccgattccgccacgtccggcctcgatcccgccttcccgagcccataaaaagcatccccgtgctcccctcgtccgtttccccatttttcccgagcccggcatactctccctcgctctccccacgccgcacccacgcgctgccacactccggcgagctccggtcgccgtttcctgccgccacagccgtcgccgcgccgagccaccgccaccgccagcttcgccaccgcaaggggaagtccggccgcctcttatttccccctctccacccctcgagcaccactcccaccgcacacccgaggccgccgcccctttcaccgcctccagccgcgtcgcgccgccgtttcggtcgacgtcgactagcgccgttgcctccctcagctccgcaaggacgaggaggacctcggccgccgcctctcttcgccggaaatccgccggagctcctccttcctcggtcgccggtgagctctacctcttgtcatcgccatcggtcttcgtttccagtcaccccgcatcggtcctcccctccctaactccctcttctccttctgaaggtcaagggcgaccccgtccgccctccgtcctcgcaagccgccattgggcaatcgtcgtcgccgtcctcttcctccgcgtcggccgccgcttccggtgaggatctctcctcccttccttttttcccgtcccctttcttgccgactgccgcctcttggggtgcgtcgccgtccccgtgcgcgccgctgtcctccggccacccgccgccgttccacgtcgccggctgctgcagccggttgccgcctcccccttgccgcctcccccttgccgccgccgcgccatgtctcggccgagccggcttcatgccgtgcccgtgccccagccgcgccgcctcgtggccgtccgatcggctttgggccgatccgggccgtcggatcccgtggaccggcggtggaccgcctcggtggtcccggtccacggtggaccggcgcctttgtgccgctgaccggtggggcccgcttgccggcgccgcccctcccctttgatgacgtcagcacagccttttcctttgagaaaataaataataattgcgcaataattcgtgaataattctagaaattcattaaaatggctcaaaaccttctaaaattcatatctaattcattcgaactccaaattgagccgttcaacttgcaaaattcatctaaaattgagctctacatgtttgtttactttttatgtactgtttccttggtttttattagagtttttcctcgttttgcgtgccagcgtgtagtttccgtcgtttcggaagtccgcggtcgtgaggaaaagagttcggaagattgttttgaagaagcaaggcaagtcacacattccccttgagcatgttgatcccaatttacaaatgttttactgtttgcaaacaaatatgcatgttttgctaattacatggggtcagggttttacctatctgctcgcttgtgccatgtttacttgatatatgttctttgtcaaccttgggtaatgaatcgactagctcatgttacttatgtgacctagctagaactatatgcttagccatgcttaattaccactagctcagttgatgggataattacaatattagacctttttagtatcagagtgagctgcgtgctcgagacatctggccatgcttcatggtcgtaattatccaactaaaatgcaactgaatggtgggctgtgggtgcatggttttgctagtcgcacccatggcaattaaggaccggttcgcgggatgccctggaagaacttatcgtacttaccacaagccagcgtgggcaacggctgggcttgtagtgtagcttttctctagccgacgtacccaggcgagggtgggcgtgatggagttgggtcggccggggtgtccggttgatcggcttccggattcaccgcggcacgaaaggggggctgcccgttgcctgctggggacgggggcgaaccctaaggtgtggtgcgatcggttagagggggttatgcgaagggtcctgtcacggcctctttccggtatgtcgtggcggcatgtcggcgcacggaaacgtgtcgtggggctgtgtcttgtgggtacagttgtacacctctggccagagtaaaactattcgaatagccgtgcccgcggttatgggcggtcgaccagattcaccgtgattagtctcacacttaataaatcgacccaatacactgtagtccaggtgggttggttgggcctgttcaacgtggtgtagcgttgatcagtggagattaatgttactctaattactcaacagttttattgttttggcaaataaaatgttttacaaccgcctttatgcaaatagccacaaaccgtccttgtgttccccttgcacgtccgcatcgttggtgtggcttgctgagtacggtggttgtactcagccttgctattatttcccccttttcagaagtgtagtgcttctgagctgaagacgaagttagaggaccaaggctcagaccccagttgagttttgcctgtggagtggagctgaagccccgctaggatcgcctttttccgctgctgctgttttcatttcggtgcgaggactaagtgcctcttttgtaagtattttacgctttatttacgtttggaactgtgtattacttgtcgttttgtgtaccctggctggtcctggacagggatttaatacacaaaatagtctggaaatttgggctaaatttctgggcgtgacaaagtggtatcagagccaactcgactgtaggttgagccaaacggtcaaaccctaaggacaagctttctgaaaaccctatttgaaaaatgtctcccctcgcccttcggcttttctttgcgaaacagtttttcaaaattctcctccctgtccctccaattcttatagttgttaaaccgtggagggtaaaccgtcagcttcgtgtctgttcggaagtcaagtcaagcatcaagcttcatgcagcaaagagcgggaaggtccgttcagagtcgtcgttccgcgaagatcaaggagagttttcccggagtttacctaaacccaatctttcctggaagaatagtttcgttagctgctaggtcgtgtgttgtttgcttgtgtgtaggggtatggtttgcatcattggtggggatgcgaccatactaggttgtttgcttaagcaacctgaacaataaaagtgtactcacaacagatcagtaggcaagtggtttaaggtcttatctttagcaacccctctcttccacctctcttccgccctggcagaagatggtcagtgttagagagaagagcaacaacggtgtatgaaagtcacagatcaatggatcagtcgaaagctacaaggtactcccgatgctagaagaatccctgctcgtgatcaacatttggtatccaggatcagaagatgggtgtattgatgcaggagatgcaaagctcgatgcaaggtcgaatgtagcggaagcaactctagcagtagtgtgttgcagtcaaagtcagtggatcagttcaagacaacaagctaccagctgagtcggagcaccacactctggtaagatcctggctagccaagatctaatgatggatgtgtcagatgttgataccgcaactgcagagtccaaagcagcaaatgcaacgacaatgtcttcaccaacaagtacaagctcagatgcaagccggaatcaggatcagagcgaaagtcagtttgttttccaagagcaagcacctgcaacctcagacagtacgccaccaagtcttcagcagactagcacagctaagtcaccaccaatcccagaggcaacaagtgctacctatagtggttatggtttacaaggtcagttcttgcaaggttgttcgtcggcaaggcgttagcgtcatcaagacaacagctctattcgcagcaccccagttcctcaagttgtgtcaattccaatgcgagtcggtcagtttagttttgagatatcaactacacaacccatttaggtggacgacaccgaagtcgggcctgaagcatgctagatatgccagcaatagaactgatggggaagtagtcaagagttagtaagatcacgagctaaatgagaatttctttatgtggaatttcctatcgacaaccaagggttaagttccaagtcttgtcctggatggaagtgcatcgtcattgctttattttgattgatcgttgaagttttctattttcaaagccagggccattcgtaaattcgagaagtgtcgatttttcttcaaggacaatggttcaattattcccggtcacgcgaaagtatgactactctctgtaagggggggtaggtcgcagagatgagttttggttcacctcgttgccgttttccttaaagattcaacccagtgcagcaagttggctagtacttgaaagagccagctgcaaggcgtcagcagagtaacactgatcccaagttgtctaattaaattcgaaggtacgccggtgaggccaggtcaaccgtttggcttaaagaagtagcatcaggaacagccgcaatccagacaaggacagaccaagccagtttcctgaaaatacttgtggtttgaatcaagagcaagtcgagcaaagtcattgtctgtgggttacggaagtcagtttcaaggtttcggaaaaactacaccgatccccggtcagcaaagtgaatcctcagtttatctaattgccagcattagcaattcaatcaaaaaaaaatagaagttctatgagcaccagcagttctggtcaaggtcagactaattagagtcggtccgtcagtttatgggaagcaacagaacagcaagcttatgcaggtttggttcatcgagcaatcggtcagatgaatcagaaagaggcagcatgtgtaagcagatcagtcagaccgcccgccagcaccagctttctttctagccatcccagaatctcgggacgagattcctgtaaggggggtagatttgtaacgccccgattttcgttcgggaataaaaatcaattaataatacattttctagaaattaaataaaacttaaatcaatttaatcaagtaaaataatgggagaattaaaattttcccttaaaaatcattggccgggaatattttgtaatattctttgcgccctaatgtactctccggaattttccgtgaattttcggagctcgagaaatagtttcaataacacaaagatcattgcatcaattaaaataaaaagaaaacaaataaaatttcccccttcctctctttgggccattttcggcccaagtcttctttcctctcccgcggcccgcgcgccttctccctctctcgggccggctcccctctttcttggcccgctcgcaaaagtctgttttgcgtcccttcttctctcccttcgccgacaggtgggaccggcggtcccacccgtaagctcctcttcctacctctcgccggcggaccccaaccgccatagccgtccacgtcgccgcaaaatccggcgccctcccgcacccgagctcgcatccaacgacgtgggcacgatcccctccacgtcctccaccatttcccccactctccccgcgaaaatcggcgccggttaacccctccaccaccccacgtcggcgccccacttcgccggccgattccgccacgtccggcctcgatcccgccttcccgagcccataaaaagcatccccgtgctcccctcgtccgtttccccatttttcccgagcccggcatactctccctcgctctccccacgccgcacccacgcgctgccacactccggcgagctccggtcgccgtttcccgccgccacagccgtcgccgcgccgagccaccgccaccgccagcttcgccaccgcaaggggaagtccggccgcctcttatttccccctctccacccctcgagcaccactcccaccgcacacccgaggccgccgcccctttcaccgcctccagccgcgtcgcgccgccgcttcggtcgacgtcgactcgcgccgttgcctccctcagctccgcaaggacgaggaggacctcggccgccgcctctcttcgccggaaatccgccggagctcctccttcctcggtcgccggtgagctctacctcttgtcatcgccatcggtcttcgtttccagtcaccccgcatcggtcctcccctccctaactccctcttctccttctgaaggtcaagggcgaccccgtccgccctccgtcctcgcaagccgccattgggcaatcgtcgtcgccgtcctcttcctccgcgtcggccgccgcttccggtgaggatctctcctcccttccttttttcccgtcccctttcttgccgactgccgcctcttggggtgcgtcgccgtccccgtgcgcgccgctgtcctccggccacccgccgccgttccacgtcgccggctgctgcagccggttgccgcctctgtaacgccccgattttcgttcgggattaaaaatcattaataatacattttctagaaattaaataaaagttaaatcaatttatccaagtgaaatgttgggagaattaaaattttcccttaaaaatcattggccgggaatattttgtaatattctttgtgccctaatgtactctccggaattttccgtgaattttcggagctcgataaatagttttaatagcacaaagatcattgcatcaattaaaataaaaagaaaaacaattaaaatcccctctttggcttttggctcgggccattctcccttcccttcccttcttccctcctttcttcgcgtgggccggcccatctcggctcccccttctccaagtcacataacccccatccttcttccttcttcccttgccgacaggtggacccgaagccccaccttgttattgtctccccccaaccgtttccgcctctctacttttccccgagccaccgacaggtgggccccacctgtcgggtccttcccccacctcccgccgatcccggtgcgccgccgcgccgaaaccgtcgccgcacccacttcctccgctttccccgcgcccacgccacgtcgccgcgcccacgccacgtcgccgccctctccccgcgtctcccggccgcgccagcgcacgagaggggcgggattcgattttgaatcttcccccccaccttctctctctcctcccccacgtcgccggcgaaatcggagcgccttccggacacgttcgcctccccctccgcctataaaatgctccccatgccctcctctctcgttttccgctctcaccgctccatcccgtgccccctaccgagctcgcaccgccgccacttacgccgccgcccgtcgccgcactccggccgtgtgccgccgtcgctagagccgccgccgcactaagccaccgccaccactagcttcgccgtcgcaagacccttcccggccgctgctctgcgtcgccggaataccaccgaaaccccatttccctcgcgtcgtcggtgagttctctctccccttcgactccggccggcgtggatggtcgccgtgggggttttcctccgacctaattcctctcctctctttccctaggtgtcgccgtcgctcgtccgcacctcggcatcgccggtcttcgccgcctccctcgtttttctccgccggccattgccgcccctccggtgaggtctccctccccttccttcccttctttttttttccccgtgcgccgccgccctcttcgcgcgctcgctggcgctttcgggcggcgccgatcgcgccggcgacccgccgtccgcgccgccgctcgccgtcgctggcggtcgcatgcccgcgccgccgccttgccatggccgcccggccggcttgatgccgggcctggccggtacatcggctcgtggagccggagccgtggggcccgcttgccagccgtgcccccccccttgagccgctgccgagtgggcccgtgtaccagcgccctccccctttgactcgctgacgtgtggggcccgcctgtcggcgccggccctttgctgacgtcagcggcagtccttttcctttgtaaaaataaataataattgcgcaataattcgtaaataattatagaaattcatttaaatggctcaaaacttctaaaattcatatctaattcattcgaactccgaattgagccattcaacttgcaaaattcatctaaaattgagctctacatgtttgtttagtttttatgtactgtttccttggtttttattagagtttttcctcgttttgcgtgccagcgtgtagtttccgtcgtttcggaagtccgcggtcgcgaggaaaagagttcggaagatcaaagtgaagaagcaaggcaagtcacacattccccttgagcatgttgatcccaatttataaatgttttaccgtttacaaataaatatgcatgttttgctaattacatgggatccgggtattacctatctgctcgcttgtgccatgtttacttgatatctattctttgtcaaccttgggtaatgaatcgactagcttgtgttacttatgtgacctagctagaactatatgcttagccatgcttaattaccactagctcagttgatgggataattacagttttagacctttctagtatcttgttgagccgcgtgctcgagacatctggccatgtttcatggtcgtaattatccaactaaaatgcgactgaatggtgggctgtgggtgcatggttttgcgagtcgcacccatggcaattaaggaccggttcacgggaaaccctggaagacttacagtgcttaccacaagcgggaatgggtaactgcttgatctgaagtatagctcgaccctttcctaggcaccggtggcgagggtgggcgtgatggagttgggtcggccggggtgtccggttgtccagctgccggattcaccgcggcgcaagaggggaccgcccactgccttttgaggggtgggggtgaaaccttagcgtggtgtggatggttagggaagggttatgcgaagggtctcgtcacaatcactcgacatggtgacgtgtgcatcatgggcacatgatgacgcggtgacatgtcggtgggttgtgtcttgtgggtacagttgtgcacctctggccagagtaaaactattcgaatagccgtgcccgcggttatgggcgatcgaccagattcaccgtgattagtcccaccttaataaatcgacccaatgcactgtagtacaggtgggttggttgggcctgttcaacgtggtgtagcgttgatcagtggagattcaatattactttaattactcaacagttttgctgttttgctcaataaaatgttttacaaccgcctttatgcaaatagccacaaaccgtccttgtatccccttgcacgtctgcatcgttggtgtggcttgctgagtacggtggttgtactcagccttgctatcattcccctttttcagaagtgtagtgcttctgagctgaagatggagttagaggaccaaggctcagaccccagttgagttttgcctgtggagtggagctgaagccccgctaggatcgcctttttccgctgctgctgcttttgtttcggtgtgaggactaagtgcctcttctgtaagtattttacgctttatttacgtttggaactgtatattacttgtcgttttgtgtaccctggctggtcctggacagggatttaatacacaaaatagtctggaaatttgggctaaatttctgggcgtgacagcctcccccttgccgcctcccccttgccgccgccgcgccatgtctcggccgagccggcttcatgccgtgcccgtgccccagccgcgccgcctcgtggccgtccgatcggctttgggccgatccgggccgtcggatcccgtggaccggcggtggaccgcctcggtggtcccggtccacggtggaccggcgcctttgtgccgctgaccggtggggcccgcttgccggcgccgcccctcccctttgatgacgtcagcacagccttttcctttgagaaaataaataataattgcgcaataattcgtgaataattctagaaattcattaaaatggctcaaaaccttctaaaattcatatctaattcattcgaactccaaattgagccgttcaacttgcaaaattcatctaaaattgagctctacatgtttgtttactttttatgtactgtttccttggtttttattagagtttttcctcgttttgcgtgccagcgtgtagtttccgtcgtttcggaagtccgcggtcgtgaggaaaagagttcggaagattgttttgaagaagcaaggcaagtcacacattccccttgagcatgttgatcccaatttacaaatgttttactgtttgcaaacaaatatgcatgttttgctaattacatggggtcagggttttacctatctgctcgcttgtgccatgtttacttgatatctgttctttgtcaaccttgggtaatgaatcgactagctcatgttacttatgtgacctagctagaactatatgcttagccatgcttaattaccactagctcagttgatgggataattacaatattagacctttttagtatcagagtgagctgcgtgctcgagacatctggccatgcttcatggtcgtaattacccaaactctgaggggagggagatagagtaagactgagtactacccactgtactcagcaagtcatgccggaacgaagggtatgatgcaggatataaccaaagaaggcgaaaggggttcatttgcataaagctagcatttataaacagtagttgaaagcagtaaaacagttgtaatagttaatcaacattaaaccaatcattgctcaacgcgacaccacgttgagacaggcccaaaccaccacatgcactaatcagttccgttagggtgagactaatcacggtgaatctggttgaccgcccataaccgcgggcacggctattcaaatagttttactctgatcagaggtgtataactgtacccacaagacacaaccccacgacacattcctgtgcgccggcatgccaccacgatataccggaaagaggtcgtgacagcacccttcgcataagcccctccaaccaaacacaccaaacctcaagtttcacccccactcctcgcaaggcagcgggcagtcccctctcgtgcttaggtgaatccggaagcgacaaaggccgttgtagggccaatcccgctccatcacgcccacccttgcatggatgcgtcagctagaggaaagttatactacaagcccagccgttgcccatgctggcttatggtaagtacgaggaattcttccagagtttcccgcgaaccggtccttaattgccatgggtgcgaccatcaaaaccatgcacccactacccaccatttaatatattttaattaactaacacaatagcggtggcactaatccaacatcaatactagagtctggaatctatgcattaatgtaattcccccattgtgtactagttgaactaagcatggctaagcaatccctaatccaacatctagtcatgttacaacccaagctagcaaagaaacaagatatccaataatatggctgagacagtaggtaatcatcccatagtaacattataaaacaatgcattatttaaaggaaaacaatagagcatttgcaatatgggatcaatatgttcaagtgacaaacatgacttgcattgctctgcggctggaggaatctcagcgactatctcaaagaacaccggagcgtcgggagagccggaatctatgcgatatacaaggcaaacaatgcaaacatgctataagactactaaaatagagaacaaaactatttttattggattcttagtatttttcttgatttactgagacttgaatgggcttaaacgaagcacggatgaattttctatgaattttagaagattcactgtatttttacagtaaaagaaaaatcctgaattgatttattgcgcaataattaaccctggcgacgtcagcacaagagggggtggcgccgacatgtaggccccacatgtcatcggctcagcgccgccggtccacggtggaccgagtccacgagaccggggatggggagcaccacgtgacgcacacgtggcgccgacgtggcggccacgtgggctgccatgcgggcggcaacggatggcccccgatcggacggcggagacggcgcgcggccgggcgcacgcacgggtgacttaagctggcccagcggccctggcgcgcggcgggcggcgtgaggcgacgagcggcggcgacgtggctaggcggcggcgctgggcagtgcggaagagagagggaaaaaaggggaaggggtctcaccgacgacgattgacgacggcgagcggctacaggcgaaggcgatggcgggacaaactccggggcaacctaatgaggcacaggagatggattagagaggtagagagggagcgaaacgggcgaaaatgccggccgaaggcggcggccatggaggggctcaccggcgcacgacggaggatggctcccggtggcggatttcgatggggaagggctggacggcgtggcccgtgggcttgcgaacccgacggcggcgacggtgaggctcggtggcggctctaacagcggcgagcggcggccggaatcttcctcaattacccaatccctcgattcggtaaatgcgacggtcatagctcccgtaaggactccacatccgggccaacgaaatcggcaaatccctgtcgattcgatctgtaactatctatccttgcaattttttttgtgcatttgatatctgtgaaaaagatatccccgttcttttttctctgtttctgaactcaagcatcttgaccagtgacaaacatggcgcaaaaaacacaaacacacaagctaatcatcagcactggcaagcatactaaattcaagacgcttcttctgtgggagatgttcgggaatggagcgagtgggttggcggtgctgctcatcgccaccgtgtccgtgcagatgggatgctcaacgggcaaactgttttaacagctctgattgacgttcacctatttattacatgtcatctaaataattattaaaaaattctatctatctatctattatatactaaaagtccatgagactttctacaaacgctctcaagccgccaagtgacgctctaataaaatagagaaaatcctagaaattctaagaaaaaagaaaaacaactaccctttaattttcacttaaattggtgagtccaatattatacaccgttagataaaatcgatcttaaaacaaactaaatatcatgggtcccacctatcttcctcctgcacgttggcaggtggcaggtggagtatatacgtacgtatacattatacgtacgcttccttccttttttttcttttttttctttttttcttttccatttatatatatatatatatatagtgcatatattttttaaataattataattttacaaaacaaagaatctaccatcatataacaaaaaatcttcctttcaaataatgcactattttaaaataaattttacacaattatattatgtacctattaaataaacaatatctatattaactaatttatacgtgcacttaaactgatggccccattatataaatcatcggatctattttttattacattggtatattattctcaagtaatgtactgtttcaaaataaggtctacaccattatattgtgtacccattaaattaacaatttaaaatatatattaactaatgtacacttacactagaactggtggacttattattataatcatcgtatctattgtttgctaataaataaagcgtccgaaattcttttttttgcccgctgcacaatgcacatttgcacctttgcctttcgcatgggtgacaaggtgtagtgtttgagacatataaggtgatcacaaccactgtagagctaccgctttgccatatatcaaatcatatatggagatgattaattttgttaataacatgaaaagaaaattaaaggtgtgatgcagcgagagaataattaagcaccatgggttatgtttttctcaacgctaattagctctgtttaagttgaaaccgaaagttgattatataataattataatgtatttgtgttatgtcgtatttggattttgtactatttgttcgtaaatgtgaaagggatcattatgttataaatgtgagcgtaatattgacgaatattaatagaactcttactatgataagggtgataaagggagtttaaggccctttatttttttcccgattccatattttggatttttgtttgcacactttccaagtttctaaatagtgtcttctttaaacaatattctaactttttagaagtcaattcatttgttatacccttaaatagctatcacataaattatataattcattaatttcagctatcctaaaccttaagtactacatattttttttcatgcaagtcatggtgataaatcattaaagtcgtaaaattaatatgtaagagttactctgaacaattgtaaataggtgtcaaaattaattgctattaattagacatctaatggcttgcaagccacaaaattaatttcactctacatgtatataaagatggacgaagttggaacaaatattaccatatgtcccatacatatatattgcgcagttaatattctaattacatgtgttaagtcatttaaaattcatgaaaatgctctcaagctgcgacgtggtgctctaataaattagggcaaatattagaaattctaaggaaaaaaaatcaaagtatatatttcttgattttcacttaaatcgttaggtctaatattataaaccattacattaaattgatcctagaacaaactaaatactacgaggtcccacctctcctcccgcggcatacgtacgcacctacttacatgggtacgtacgtttcccctcccttttttcattttttctccttcttttttttttaccatgcatatgcttccctccctttattcctatatcatacgccttcatgagacgatttaatcaaaagaattttgagtatcttgcactcgcatttttcatttgtagccatactacacggtatatatatagatggactacttcatatgataattaactagcaatacctttcaataatataagtgcccgtgcatacgcgcggaccaccttcctagttaaaaaaaatatgaacaagatagatcaatatgtaatatattgatccacaaacatacaagttaaaattcaacttctacaacttgtaacaaaaataacaaacaaaactcaaattactatatgtatatttacaattaaatttgttatttttgttacaatttgtagaagttaaatttgaacttgcatgtatgtggagtgatatactacaaattgatctatcttgtcaattttttttaaattttttcgtaattatttagttgacatgtaataaatgggtggacattcactcgagctattagaatccatgctcaacggtgctgactgggtgcactacagcagctatctgcttcctcgcatcaccaaatccaaatagcaagaaacaaggagatccagcggcaaagcagtcaaatctacaagcaagcaagctgccggtacacgagcaacagcaaagcagtcggatcgatccagtactccgtccgcacattggtcgccgcctgcgctcaccgccgagcagcctccatcgtcccctgtcgtagcccatcgtccgttgccacggctcgcaggggcggcgctagagccaaattgagaggggtgcccggcccctttataagcaatgttatactccctccatattaaaatatgtacgatgccgttgactttttgacaaacgtttgaccttttatcttattaaaaatatttatgtaattataatttattttattgtgtcttgatttatcatcaaatattctttaagtatgacataagtatttttatatttgcataaaaattttgaatcagacgagtggtcaaacgttggttataaagtcaacggcgtcataaattaaaatacggagggagtactaagtagtgatatttttggcaacttttatagttcatcacgagtaacggtgggagataaagcccaaaaggatatagaggttaccaaaataataaaagtcacagtgaactagtgaaggagaacttcataattaccaaggataacaagtattagcaaaatatataatctagggtttgcgtgcgtgcattcttaggagtgaattgtctgcattgtactgtgtaattttaaaaaaaaattgtccacatcaatttgcatgctctacaacaagaggggaataaaaaattttcattttcaactaaaaactaaacaaaaaacagaacaaaataaattcatcaatttcaagttctccaaaatcacaattcaatgtttaaaccctaacattgcgatcttaaagcaaatgccaattaagagcataatcacataatccataccatatctatcagactcgagggtttcttcttttgttaatcaacactagttagcagagaaaaatcataaagggaatgggggggggggggggggggagagtataagcccaaaccttgtggtgtccttggacactgaggtcatgagggacagcagtcgcctgaacaaattccggtgaagccaagctagccagcggcggcgagggcatctactctcgacggagggtgagccacggtccacggaggcaatgaacatgaaagcggacaggcgtcatgtcgcagcagtgattaaagcggtgtgcatcccaagtcccaatcctcgtatagtgtgcatcgtgcgcgcgtggccggcacgcccgtgggcatcacaggctcgcaaccacgattgggccgcacatctgtgagcttcttgggcttagcaagtttaccaacatgggctattttgatccgggttcctgggcaccccccccattgggctccgcccctaacggctcgtcatccaactccgtcaagctcctcgtcgcgctagcggagaaggccagcgccgctctcgtcaaggctgcggcggtggtaccctcccctgccggaggccgtcgccgacggggcgcggtggcgccgctcgtgttcccgctcctcgatgagggagagatggttgtggcagcggaggccgcgcccaagccagcggtggtgtggaagcggcaggtggcgtgccgaggcgggagggcgagcaagcggcctgctcggcgctcgcggaggaggcatgggctccccgacagacctcttttgtcagctctccctcgttttcgtcgtcttctttctccatcgctgccatctctctcttctctcgaatcctctcgctctctctcatgtcgttggatccaccaacctccactacccaagaaatcaccactgtcctccttctcgtcatcgccttgtactccgctgtgaacaccgcgtcggcgccggtcttgataccgtgggagcaaacgccgcaccggctttgcatccaagcagtgaggaagagaagacagagagagaagacatggagagctaacatgtaggtccaaggtatgacatttcaacaatttctctctcctctccaaccgaaaattattattttaatggatgcggtatccaatagtaaatatccaacttttgtgagtgtgttccctaaaattgacttcacgcagtgtcctatagctaaaatcacaaagtcgcgaagttctgtagcaaaatttttctatcaataagtgtatgcatgcatgtaatcaatgaatattaagatggcttctcgggttacaacgaaacatttaatttatctctccatttatgtcatgaattcacagagattataaatagaaacaacttactccctccgttttttaatagatgacgtcggggtacagagatcgaattcgccttataatgaggngttgatctactgtaccg

SEQ ID NO: 7444 - DNA, 49536 bp, Oryza sativa
cggcgtcaaatatttaagtaaggagggagtatattatttgccgtattgatttcaactttcaagtcgtgtacaacgaacgagttgtctagtgttttaccctgatcgtttgagacatggctgataagtcatggaaaaatgagcgaaagcaaccgaatataatttatggtgatgattttattttatatatgtgtgttgtttgtgttttagaaagcaatgctggaaaatagactataatggaataaaaactgaaatcaacgttttataatttagattttagctggtgcctgttttaacagtcataaccggaagtggttcttgccatccattcatgcatgaacgtgatttgctccttttgctacagtccaattctattccttttttttttgctaatcctctcttctctcttctatccaatggaaatgtgtgcggcgatattcgagtcataatcatattgaaattaccatcagtagcatcatcatgtgcatacattttcaatctataggacgagctagtctacaaacatactccatccgtcctaaaaaaaggcaaaccctaggtttgcgtgtccaactttgactgtccgtcttatatgaaatttttttataattattatttttattattgttagatgataaaacatgattaatactttgtgcgtgacttgtctttttaatttttttcataattttttcaaataagacgaacggtcaaacattgggcacggaaaccagggtttgtctttttttgggacggagggatgggacggagggagtactagtgttttgttgaaatttatatttttcaaatcaaatcaaaaaatagcttgcaatgctttgcctcggtaaactcttttgatccctcgagatgatgtctcttgtttgtcaaaaacccattcaaataattatgaaaaattcttttgacaacattcatacagcatatatacaacacttcacaaaatcaacttacaaactgagatataaaaaaagggtcaaatttaaatatcctcactcagaatctgttactccctccatttctaaatatttgacaccattgactttttagcatatgtttgaccgttcgtcttattcaaaaacttttatgaaatatgtaaaactatatgcatatatataactatatttaacaatgaatcaagtgataggaaaagaattaataattacttaatttttttaaataagataaactataaaacatatttaaaaaagtcaacggcgtcaaatatttagaaaactgtaggagtactgatgaagctgcatttgcatttgcgcgaatgtgacgcagctggtggaggggatcgaggacacggtgggcgtgggcaaggggacgagcaaggtgtacgccaccatcggcctcgacaaggcccgcgtcggccgcacccgcacgctcgccgacgacaccgccgcgccgcgctggtacgagtccttccacgtctactgcgcccacctcgccacccacgtcgccttcaccctcaaggccaagaaccccatcggcgcctccctcctcggcgtcggctacctccccgtccgggacgtcctcgccggcgacgaggtcgaccgctggctccccctctgcgacgacaccgacgcgcgcacccccatcggcgacggcggcggcaaggtccacgtcaagctccagtacttcgacatctccaaggatcggagctggggccgcggcgtccgcagcggcaagtaccccggcgtgccctacaccttcttctcgcagcggcaaggatgcaaggtgacgttgtaccaggacgcccatgtccccgacgggttcatcccccggatcccgctcgacggcggccggagctacgagccgcaccggtgctgggaggacatcttcgacgccatcaatggcgcgaggcattttatctatatcactggttggtcggtgtacacggagatcgcgctgatcagggacgccgaccggccgaagcccggcggcggcgtgacgctcggcgagctgctgaagaagaaggccggcgagggcgtgagggtgctgatgctggtgtgggacgaccggacgtcggtggggatgctcaagaaggacgggctcatggcgacgcacgacgaggagacgatgaactacttccagggcacggaggtgaactgcgtgctgtgcccgcgcaacccggacgactccggcagcatcgtgcaggacctgcagatctccaccatgttcacgcaccaccagaagatcgtcgtcgtcgaccacgacatgccgtcgtcgcgccacggcggcggcaatggcggcgggcggcggagggtggtgagcttcgtcggcgggctggacctctgcgacgggaggtacgacacgccgttccactcgctgttcggacgctggggacggcgcaccacgacgacttccaccagccgaacttcgcgacggcgacggtggccaagggcgggccgcgcgagccgtggcacgacatccactgccgcctcgagggccccgtggcgtgggacgtgctctacaacttcgagcagcggtggcgcaagcagggcggcaaggacctcctcgtccagctccgggacctcgccgagacggtcatcccgccgtcgccggcgatgttcccggaggacgccgagtcgtggaacgtgcagctgttccgctccatcgacggcggcgccgcgttcggcttcccggacacccccgaggacgccgcccgcgccggcctcgtcagcggcaaggaccagatcatcgaccggagcatccaggacgcctacatcgccgccattaggagggcgcggagcttcatctacatcgagaaccagtacttcctcgggagctcctactgctggaagcccaacgacggcgtcaagccggaagatgtcggcgcgctccacctcatccccaaggagctctccatgaaggtggtgagcaagatcgaggccggcgagcgcttcaccgtctacgtcgtcgtgccgatgtggccggagggcatcccggagagcggctccgtccaggccatccttgactggcagcgccgcactatggagatgatgtacaccgacatcgcccacgccatccaggccaagggcatcgacgccgaccccaaggactacctcaccttcttctgcctcggcaaccgcgaggccaagtccgccggcgagtacgagccaccggagcaggccgagcccgacaccggctacttccacgcgcagcagaatcgccgcttcatgatctacgtccacaccaagatgatgatcggttcgtatatatctcctgattgatcttaccacgattgtttttggatgcatttcttgatcgatttggttgtgtgttcatcagtggacgacgagtacatcatcgtcgggtcggcgaacatcaaccagaggtcgatggacggggcgagggactcggagatcgccatgggagcgtaccagccgcaccacctggcggcggcggggcggccggcgagggggcaggtgcacgggttcaggatggcgctgtggtacgagcacctcggtaccgtcgacgaggcgttccagcggccggagagcctcgactgcgtgcgcaaggtgaacgccatggcggacaggtgctgggacctctacgccggcgacgggccggagcgcgacctccccggccacctgctcacctaccccgtcggcgtcgccggcgacggcaccatcacgcagctccccggcgtggagttcttcccggacacccaggcgcggatccttggcgccaaatccgactacctcccgccaattttgaccacttaaagaagagctaaattaacctctctgtgcgctttatcgtcaatgagaagagatttattttggttttttttacttttgaataagaacaccacactagtttatggcttctgtatttattttggacaataacaactgcattaatgcagtgaaacatcatgatgagttgctatttgttatgacagatttgctagtttcacactatggatttgaactttgttgattttgttgcatttctgctatatactccatccgtccctaaatgtatgatgctgttgattttttttcataacatttgataattcctcttattccaaaatttagtataaacatgtaaaagtataagttaagattatagttttttttataaaacaagtcacaacaaaataaatgaaatttatatttttttaaaaaaaaattagacgaacgattagacatcacgtaaaaagttaacggcgttacatatttttgagactgtattgttgtctgtcatatcatcaattagactgcaaaaattcaatccaggaacagtttctacaccagatagtaatagtagcacccttgaaattgggattttattcactataacaataaacattttatttggtttcaaaaaagaaaagaaaataaaataaacatctagtggtgctaggttgaatagttggatagaccaatcattgaagcgccatccttctctcaacaagaagtaggacaaggacctcctcagcttctttgcttcatgttctcttttcaacattttcctttcaactttgatcttttttatggtgaatgtattcccaacttctcatccacaaaggagtcatcttctgttgactggctagtatggctgtcaattaccagctagagtatcaatccagtctggttcacccattaccaaggaaaaaaaacagagagagaaggttctacagtttcatggcctacaaaaaagaacaggcggaagatagaagcttctaaactttctttttgtgtgatgcaaactgtagtctgatctggtgagcattcagccaaattcaaaaggaatgaataaaaatccctactcacattttaagtgaaccagtaaaaaaggaggcaatattcttggacaggaatttcaaaagtatgtgccaaaattcatttctcttgagaaatcttctgacaatgttattttgttattttggtgccggtccatcactaccttcctgagaaaaatcttatacacaagcttctaagacccagacaagctggcaaaagacaaattggagagaagccaagtgattgcttggcggcccatttcacctcaagaagagataaacctgaatcttctagttaaattgcagctgtgtatgttgactcatgcagtcttagcctttggtttagcttttttgaacctagagtacaggaaaactccagctagagcaacgccagttcctgaatgcagaaaaaaggacaaaattcagtacgggtaaattgaaaagcgagctgttaggatcagttgaatttggttgtgaggttaccaagggcattaataggtgaaatcggagttctgaagaagagaacggatgagacgatgaccacaactcgtttgacacagttggcaacagaatgggtcacaggtgatactctagccaataaactataagaaacctgcctcagaaacaaaaataattttggttaaggtaattaaacaaaatccgaaagagattgaccatggtaattaaaaaaacttgcagatacactcatgtattactagccaccactagaaaatttggatccatgcagacaaaccataaaaattactacaaaattctaagaaccgttggacaaccataaaaactatttttatactggaatttagcccacctgttggtaaaaatgaaaacaagtgccagcaagagcagctttcatacatagttcctgtagattaactccctacatgcccaaaaagacagtgtttgaataaaacattggttagcaaagataatacagaacagcccaaacactcacgttgctctgcaggtacgatggggaaaacttgatgccttccacagacagcatcagtggggcagataataaaaatgacataacagtcattatcgagaagaggtttatatcatccaatgtttcctgcgatatgaacaaattgcgtaaaggtatacagtgcttcacggtatttaccatactgtaaatgtccgaatatacattttgtgctgaaaaatattcttgtaggaggaactacacaacttcatgggttgggaaaatcacctctttatcagccagaagtttcttgctgaaaacatttcgcgattgattggtaagattggaagccatggcactccaaaatcctatcctgttttatcaaaagttttgcacgatactacattacaacaaaatgcattgtattgcttaaacaaatacgaagacagaagtcaaagcatcaaggactcctcagttcttaggcattggaattaaagataatagataccactgaccagttgaaagaaacttcggtcatcgatgctagcacgacgccaccaacaattggcacgagggaacctaagaccaagaaagagggtgtctgccgaaacacacgatttgtttcaaagcataaaccgatcagtctctttggttatatgtctcctctttttaagacaaaatataaaaatcatgaacaaagcatgtacctccccaaggaacaacacggagagaaggacagagaagaagggctccatggccttgatggtgtgcgtgaaggaaacggcgaccttgcccaagctcatgttggtgaacacattgcccatcgtgtgcaccaatgccaatggcaggatctttgcatactgcactaacaacatttttttttaccacaattcattacatttctagaattgtattgtagtattccaatacacaaacttttgccacaatataagacatttctaataactaggaaggtggcccgcgcgtatgcacgggcacttatattattgaaaggtattgctagttaattatcatatagtccatctatatatataccgtgtagtatggccacaaatgaaaaatgcgagtgcaagatactcaaaattcttttgattaaatcgtctcatgaagacgtatgatataggaataaagggagggaagcatatgcatggtaaaaaaaaaagaaggagaaaaaatgaaaaaagggaggggaaacgtacgtacccatgtaagtaggtgcgtacgtatgccgcgggaggagaggtgggacctcgtagtatttagtttgttctaggatcaatttaatgtaatggtttataatattagacctaacgatttaagtgaaaatcaagaaatagatactttgatttttttttccttagaatttctaatatttgccctaatttattagagcaccacgtcgcagcttgagagcattttcatgaattttaaatgacttaacacatgtaattagaatattaactgtgcaatatatatgtatgggacatatggtaatatttgttccaacttcgtccatctttatatacatgtagagtgaaattaattttgtggcttgcaagccattagatgtctaattaatagcaattaattttgacacctatttacaattgttcagagtaactcttacatattaattttacgactttaatgatttatcaccatgactcgcatgaaaaaaaatatgtagtacttaaggttcaggatagctgaaattaatgaattatataatttatgtgatagctatttaagggtataacaaatgaattgacttctaaaaagttagaatattgtttaaagaagacactatttagaaacttggaaagtgtgcaaacaaaaatccaaaatatggaatcgggaaaaaaataaagggccttaaactccctttatcacccttatcatagtaagagttctattaatattcgtcaatattacgctcacatttataacataatgatccctttcacctttacgaacaaatagtacaaaatccaaatacgacataacacaaatacattataattattatataatcaactctcggtttcaacttaaacagagctaattagtgtggagaaaaacataacccatggtgcttaattattctctcgctgcatcacacctttaattttcttttcatgttattaacaaaattaatcatctccatatatgatttgatatatggcaaagcggtagctctacggtggttgtgatcaccttatatgtctcaaacactacaccttgtcacccatgcgaaaggcaaaggtgcaaatgtgcattgtgcagcgggcaaaaaaaaaagaatttcggacgctttatttattagcaaacaatagatacgatgattataataataagtccaccagttctagtgtaagtgtacattagttaatatatattttaaattgttaatttaatgggtacacaatataatggtgtagaccttattttgaaacagtgcattacttgagaataatataccaatgtaataaaaaatagatccgatgatttatataatggggccatcagtttaagtgcacgtataaattagttaatatagatattgtttatttaataggtacataatataattgtgtaaaatttattttaaaatagtgcattatttgaaaggaagattttttgttatatgatggtagattctttgttttgtaaaattatgattatttaaaaaatatatgcactatatatatatatatatatatatatatatatatatatatatatatatatatatatataaatggaaaagaaaaaaagaaaaaaaaaagaaaaaaaggagggaagcgtacgtataatgtatacgtacgtatatactccacctgccacctgccaacgtgcaggaggaagataggtgggacccatgatatttagtttgttttaagatcgattttatctaacggtgtataatattggactcaccaatttaagtgaaaatcaaagggtagttgtttttcttttttcttagaatttctaggattttctctattttattagagcgccacttggcggcttgagagcgtttgtagaaagtctcatggacttttagtatataatagaagattccattattccagttttttttgacaagaacagtgggttacctgtccaagggagagccttggcttggggtgaagattaagcaaccacatgagggtgatgaagaatgatccggacgcgaattggaaggtggtgatggtgtacgggaagggcaccgatttcagaacctgcaagccatggattccaacaagatccgccatgaacaaattagagacgaaaaagaacatgtcgagaaggagaaggaaattgacgaattgggggaaaaaaatatatgtgcagaccagcttgttgaagatgttgaagtagatgttgaggaggtaccagacgaggatcatggcgccgagctgcaccgtccgcgaaatgccgccggcgacggcgccgccgttcgccttcccgccgccttccgccggtggcgaggccgccgcggccgtcgccaccgccgccttcctcgccgcggcgccgctgttccacagaagtgggggcgcgagcagcatgcgccccccgcgaatgccgagcggcagcaccggcgcgcccgcgccggcgaccgggcatcgattgagagacgacgtagtcgtcgtcgccgtcgtcgtcggaggaggaggagaagaacacgaggcgacatgccgccgccgccgcggggaggccgcccaggctctagaggtcgccgccgccacggcctgcatctcgcctcgccacgccgcgttccacaaccacgcgtccacggtttcttggtcacaacaatggcgccgcctcaaatcaaatcaaatcgatcgaacgccgccctggagtcgcggaacgcgcgcgcggacacggacgcgagagcgcggtggaggagacgccatctgctacttatggaggaggagtggctgcggctgcggctgcggcgcgagtgggcggcgaggcgagggcgcgagtgagaggccactggaagccgcgggaggagagagggcgacggcgacctggccgtctcgctctccgcctctccggctccgcgcgcggggagcctctgagactcagagagagaggaaaaaaaacacttctttttttttttttgagactcagagagaggggaaaaaaacttctttttttcttctgagactaaagagagagggaaaaaaacttgttttatgaggggaaaaaggcttctttttttacagtgttttttttcaattcttttttcgtggtgggcactggcagagtggcagggaatgggcccggcggctatggcgttgtgggccccacatactgaatgcgacgtggcatttatgtatggagttgtacacctataccgggatctctgcaggagtactccattaagaaaaaaagggaaattacaaatattgaggaggaatccggataagtgctcatccaaattcattattaaaaattaatttttttctaaaatagatggcgtgttttggcattgcattaaaagaattctaaattctgagttgtacactttagaagagtacttattcaaattctgaaattcatcgaaggttttaactcagactaaacgcattaaggtaggagtaaatcatttttggttggcattgaaaaaatggatggggtgttaacagtgaaatttggtccttggacctgcactgaagctaagcaaatctcttagatcagtgtgtgtatttttttcatcaacatgaggccatcatcttgagccttttcaagcaagacaaaagagttgtctgttttgaaacaaaataatatgatggaacgttttatttttagtaaatttattttaggctacttattcttatagaatatttttattttagattagttaatttcataaaaggttcaatttcaatcataatattgatcccatcctgcttttctacggctcttctctgtgcttacattctttcctcttcatggaggaaaagatgccatcaggtgagtaataagtattaatgttctcagttctcactcctcatcggttgcctccccacgtatttatgatgtcgtaagttgagctatacacccaccaccaccacattttagcactgatagtggtaacatatttatgatgccttgagctatgcactaagagcaagttcaatagtatagccaactactagctccaattaatctatagctaatctaatagcttatttatacaatagttacatactatactattaatacctagtcccacctgtcatagacacactgcgtcttgaagtccgtgctacagctggttacaaatctgtagcccgctgctcttctctctcctgatttatctccttaaaatatatttgcagctggcttatagtctgttattgtacctgctctaataggcgttgctgacttgcttgagtaggagtatatctatgagtcaatcatatcactcaagttaggtcgcatgactaatatacttcttttattttactcccctccaaatctactcaaggttaagctcaggttaataaataaagattgtgcttgaggtcgaacatggtggcggggccaagggcagaacttgagtttggggctaattaacacatacgtgcctgagcttgagagtaggaaaggggcaaacctcaagttagaacttagaaggtgtcaacagctttcagatcaacaaagaagataagaacagtccaacgtaaaacatatgtacaattatctagttcaaagtctaaagatcgaatattcttgatctaatatacaatattggcaacaataagtagcccaatatgcaatatacctttcttttaacctaagtgtgtggttttaagaagtgatgatggataaactcattctatttcttaaaccaaatcttaaacccactgtaacaagtattcacttgatcatctaaatcatgagccaaccaaaacttaggctgtgtttagatctaaagtttagatccaaacttaagtccttttccatcacatcaacatgtcatacatacacaacttttcagtcacatcatcttcaatttcaaacaaaatctaaactttacggtaaactaaacacagccttagtggcattctagttcatggccatggtgagaactgagaagagaaccttctctatgatgcagacctccactttggttatttggtagtagtgtgtcatctggtctacaagcaggggcggatagttgtgaccttcatgagtccaatctattggacaattttattatcttttttttatcatggacattcacaaaaattgtgttacgcttaagggcaaatgtacttcctatattttactagtataatcatatatattttaaacttaaattagtttgactgcgtgcggggtaactagactgataaggttgagttaaccttgcctcctcacatggaaacacaaagtaaaagattggcgcaacattaattaagtattagtaaaaaaacttaaaaaatatattaatatgattttcaagcaactttcttatgtaattttttttaaaacacacatcgtttagcagttaaaaaacgtgaacgccgaaaacgagggatgttagttgagaaatgagtgggaagaacatgccggctgtgttcggtgctctaagttcccaacccctctccctcgttttccgcgcgcacgctttttaaaatattaaacggtgcgtttttttacaaaagaaatttctatatgaaagttgcttaaaaaatcatattgatatagctaatacttaattaatcatgcgctaacggactgcttcgtttttcgtgcggaggagatgggtttccaatcccaacttaccaacacaccctaaatctagccacataatcaaacacacaaaaagaagctaagagcaggtacaatagcaggctataagctagctataaacatactttaaagagataaagtaagagagagaagagcagcggactacagatctgtagctagctgcagtacggactccaagacgtaatgtgtgtatgacaggtggaaccagctattaataggatagtaagcaactattatatgaattgaccattacgttggctatagatgatttgatgccagtagtgggctatactattaaacctaacactaacagcatacaaaacatttcctgttgtttttctccgtcgatcgcaatcgcggagtcgtggctgcccctgtgcccacacccaaaatccgggatctttttcgtgcgattccaacatgtcgatcgttcttatctgatccaataatgacgcgccaatcgctaatccgcaccagttaagcccaaacatttcttttcttttcttttttttttctactcctctccctctcgtttcttggcggcgatggagatggagagagccacagaaatgggggccaagagcggcgcccatttttagtcagccacggcgagggaagaggagccaatcttggccaagccaccctctccaagaatcctcgctgatctctctgcgtgaggcgctcaattcgatttcttggggggtcgattcggatttcttgggatgcagtgggcggcgctgagctcgccgccggcaccggcggcgccggcggcggtgtggatggggcggagggcaagaaccgcgaggttgccgtcgccggggccgcgccgggtggtgctggccgccgcggcgtcgtcgtcgtcgccgtcgccggatgcgaactcgagctcgaactcgaactcgccggggagtggtggcggcggcgaggaggtggaggaggagagggaggacgcggcgcggatggagaaggcggcggccttcctgatgcggagccagaagtacgccatgctcaagcagcagctcgccgtggccgcccagttcgaggtaacgagacgagacgagctccattggattctttcaacaagcgaacttgcaatcgaatccatccgaattggggtttactgcgaattggaataatttggttgcaggattacaaggaggcggcgaggctgagggattcgctcaagtcattcgaggaggaggagccagttcttcgtctccgccgatcgctcaagaaggcggttgaggaggagaggttcgaggtattggacatccatagcaattgtttccttaccatatttgcttgtttcagttgatacatttccatacaagaatcttgtgaattgtagtctaaaaaaagaatcctgtaaattgtgatatccccattaggcattagcaaagttggattgtgagactgtcccaatccatccttgctaacgatgtttgtggattgacgattaatccaaagacgtgcagcctcagttagttgctgcaatgtctctgccgaaaatgccaaaagccgcttatagtgatgcctgatgtgtccttttgtcgactgcacatgcaacaattttgttgtatgcttgattcttttctctccgtgctgtatattgtatgataacatcggaaaatgagaggaaatctcaagtgtcaagaaatcatctcaatacacatgtttcacttacttccttcactgttgacttttctacttgtaatagttggagttgtgttttcatgaccagaactttgaattcatcattacatagtgctgaatttgggctccttacgctaatcatatgccaatagtgatttgtgtagatattttcataccccctggttgtcagtctagaaggcattctttcttcatcttttattcaccatgtttatgatttttctctgttttcatgctttccaggatgctgctaagtacagagatgaactgaagattttggctccacacgccctcctaaaatgttctagtgatgctactaccctggtatcttacaatccaatgatttagtgatgttatactacaactctggcatgtttctttcactcgataaagtatcatagttttgaatgaaatggtttggtcatttgaaaacttgaggctatgaaacattatcattgtctatggcagtatattagtgtttaaaacccccagctggtcacgcaatttcaccagggaacttgggtatcaagtagtgacctaaaaaaatagctaaggcaggatatggaaaataagagattaatacgtgaaggtcatcaagaatctatttgagttggttataactgtgtgcgttggcccttgggcaccacttcatttctttcatatgttcaggcgccccattctttttttccacgaaaatctcatgcactacagatgaaccacctccgttggtttcgtcacctgttctgtaataattctttagttaatgtagatcaaatattttctcagattcttcattgagcttaactagatttcctgatattttttaatgttgaatttaggggattagagttcaagtcaggagtgtttatattgaaagccggagccagcctttgaagggccagttcttctttgcctacagaatcagaatcacaaataattctcagcgccctgttcagcttctcagaagacattggattgtcactgatgcaaatggaaggacggagaacatttggtaagtctctattgtactctcaccttaccaaaagaaccgtatgttaaagctaataaagacttgctccattgccatgccaggggtgtaggtgttgtgggagagcaacctgtcatatttccaaggactggttttgagtactcatctgcatgcccattaaacacaccaaatgggagaatggtaacatctaaatcttccacaacctatgttgtcacacttgtaaataggttattgtaaagtaatttttagattctagctgtgcaagagattcgtatggttctaatatctcttgattgcatatagctggcatcaatttatgcccaataattaacatggtatctagatcaattgttttgattgaagctgaaagaagaaatagtaatgttcaattaagaaagactagttatatcctgcaatttatttattgtttaggttgtttgcgtgttgcatgtctgcaaagcaaacttacctgaattctcttttggatttaggaaggtgattttgagatgaagcacatcgacaaagctgggtcgtctacattcaatgtcgcaattgcaccattctctctgtcaatccttggagatgacaacgatgatgttctcctctaaatgtgattgggtatcagaatgagtttgaataagatgatgtcaccagcaaggaatttgcataatacacaaacacgagtagtgctgttagtgatgtggctagagttctctactggaaactcctgcgaatgcaaatttttgttaagctagctgtgaattgggaaggtaccaaagttcaagatcagagtatcagacaggcaaaacatggtttggtgaaatattagagttaatttagacacacacacaaaaaaaaactacactactgtaaattgaggtatatgatggacttgtgtgtcatctaacttttgaatgtacagcatagaactatatagagcttgttgagagtataagctgcatggaactcttgtattatctcgaaaaaatgattttgtaatgttatagtttcataaatatattgcactaggatttactggtcaaagcagtagcttggctctggcatttttgtcttcataaattcaaccaggttggccttaaatttgtctcaacagcatgattatgctcagggccagatatgaacaaagttcagagcaactgatcagtttatttttgttagccattgcctgttgcaaaatgacgaaatttgtgaaagttctcaaacggatcaattcaaatagtttaaaatagtgctttttatatctgtttattatcgaatttcaagttgttgtgtttagccttaagaatagctatgcttaccaactgaaccatttcaaatcatcattaaaccgtttgcacacatgtgtatacgtaaactttccttttgcatgtggttttgcttttcccaaaaaaagtgcaccttttttccccttcaataatcggtagattcattcaattgacccacagttgacactccgggtatcatcttagcataaaccacatgaaaaaaaataatccatacctagaaagtttcttacatgtattattaacctccatatccaataccatagcttgcgacaatttataacatcaaaactatgatgtcttggagcaaattttaccaaaaaaatacaataacctttttttaaagaaacaaccaaactataaccttgatgacttggtatagagaaaagatataaggttccttacaactcctctaaagacagacgtgtgttactgattttgtggggcccactttctatgggcccacatgcccctctgatgcctcatcactgtgctgtgtcttcactaagagacaattgagtaaaagatagagagatatgatattaaataacctactcactctattatcattttgtatatagcaaatttttaaaagtctcttgatgatagtatagacaacttaagtgaatacagtggactcaattggtgttgcatgagtgaaagattctaataattttttttactgtttaggcctacatgcatatgtggttttctgatcttccatgtttgacaaagaccacatttttatggttgtatgctcaggagatatctcaaaccggttttgttcaagaaaggaaaggaatttacaatcttgatgagacattaaattttacattagaaaagatataaggttccttataacatgtacaacaacaataaagacgtttcttagctataccatgcagttgttttgctaacatgatgatagaataagtgagaaaaatgagcgaaagcaactcctctaacaacggagaagtgttactgattatgtggggctcactttctatgggcccacatgtccctctaacatgcgttagacgagtctcatcgctgacctgtctcttcactaagtgacaattgtgtaaaagatatagagatatggtattaaataacctactcactcaattatttttaaaagtttgttgatgatagtatagacaacttaagtgaatacactggaactcaattggtgttgcatgattgaaaaattccaatagatttttttttactatttaggcctatatgtatatgtggttttctgatcttccatgtttcacaaagaccacatttttgtggttgtatgctaagacaaaaaaaaaatatgatcttgaggagacttttttaaactttacattagaaaatgcagcacatcctgatatctcttcatgactgtaaatctgtcggtaaagtaacatctgtacagttgcatcaaaaccagattgttgcaacatctgaatgttttgacatacctttccccaaaagtttcagttcagttcaccccacattttcatggctcatcacaacagttacaatttccctttaacaaaagacaagcaaacacacacaacatcatcaatcaccagcttgagcttataactgatgcagtgagttaatcacaagattacaccaacaacaaaaaaaatcacaatctgccagatttgctcctcttcatttttactgaagctccaaaagtcagaagagaagtccaaggctgcgcctacgtcacgcatgcgcgcatcgcccccggccatggcgtcatcgcagcagccacaggctatggcgccgctcacgcgcgcgcggcgcgccaccggtaaccgacgtcgctgggggggcggcgcgccatggcgcgcccgggcgggcgcgcgcggcgctagcggacaaggcgagcggcgcggccagagcgggggagcgcgccaagtggccagctagctagcgcgcgcgatggcatcaaccgcgtctctctctctctctctcgccatcgtcactgcggctgctgctgctctcgcttccgtttcatgtcgcgtccagtagcgggcgcgccgcgcgcggggccttggaagtgttcgatcgcgagcgtctcgtctcctccttcgcacgagcggttcgctttgggctatagcctatagcgcgctctggacgcgacgacaccgagtcaccgacgaacgagcgcgacgccgacgaacgagcgcgcgacgccatggacgagcggagagctgctgcttccttgctcgccgtgctggttctgagcctcgtggtgtccgcctcctccgccgccgccggcgtggcgcccgcggcgccgccggatgtctttcttccccagccgccgccgccggcgaaggtgaaggtgaaggtgctgaacacgcaaaaaaagaaaataaaataaaaaattctttgatcgcaagccttgtcttctcatcttagtttgatctttgattggtttcttagctcatgctattctttcttgcttgaatcatgatgataaaagttcttccaaatatatcaatcttttcttgatatatatatattgcgaatttgcaactgaaaaattttcagttcttgctgcactcactcacccggtttttcttgctgcattcgcgtgcgtcttgcagcggaggcgttgctggccgtcaaggcggcgctgcatgacacggccaacgtcctcgccgactggaacgccggctcaggcggcgtggtcgtcgccggcggcggcggcggcggcggcccgtgcaactggagcatggtgacctgctccaagaccggccatgtgtccgtgctgtatgtgctgactagctatctagttgtccattttcttctgtgcttgtgcttgtcgccgccggccatggcgggttcgccggagctcggactgatggatcgatctctctccgtttttttgttcggttttgcagcgatctggctcaccggaatctgtccggcacgctgtcgccggcgatcgggaaactcaggcggctgcgactcctgtacggattgattctctctaactgtttactcgatcggtgcccgttccgtttgagacctagaaatttcaagggaattttgggaaatttaattttgttctgattcatctggaattcgttcttcccaaccgaaagtttacagaattttcgccgtgtttagttccaaaatatttcttcaaacttctaacttttccattacgtcaaaactttcctacacacataaatttccaacttttccatcacatcgttccaatttcaaccaaacttccaattttaacgtaaactaaacacagcctggatctacagtggatccattcaggaagtggctcccaccagaaatataaaatttgttttgaactaagtgtgagtttcttcaaattcagcaaaaatatgtacatgtttcttttttttttcttggaaaattcgttagatcttctgaagttttggaatcctccagcacccccccccacccccatttttttcaaggccctctatttatttcttctttccaaaatgtgaaaccctaacctgtatatataatctttagattactagcctagagcccgtgccttgcaatggaaaacaaggctgagttcgctggttgtagttgggaactatttcctcgatcacgtaaaacggagcgactcattagcgtatgattaattaagtattagctatttttaaaaaagtagattaatatgatttttaaaacaacttttctataattttttttttgcaaaacacacactatttagtagtttgggaagcgtgcgtgtgaaaaacgggagagaggaggagttgggaacattaggaaacaaactcatcccaaattgaatttctagcttattaaatcatttaataagcactcatttagtctaagtaatactatgatttttttattgaacaagtaagtaattttgaaatttgggggagcctatagtgaaataggggaggacttattaaaatgtggtgtaatattatagattatggggctcagatgttactagtagggatggtgtgcaaatgaacaccaccaataccaatattttaagtagtataaattatcgatgcgattgttttacccctgtttggaacaagagaattttggacaaaatgtgaaacatcaattctcactgagcatgggtctcttttcgaatccagacattccaagacaaggcttttttcactgttatagacagataatctcaggaaatgaggaatttggtttgaattttgtgcaggtttttgcaacacaatgcaatttctggccctattcctgacaccataggcaggctgaaggtgctacaaacgctggacctggcatataatcacttcacaggcactattccaagcatactgggacattccaagggcatcttcctcatgtaagattagcatttatgattagactacttttatagtggtgtctgctggaagtataatcaatctagacattccatgttttttttttcatccaatggactatatctgtttctactatcacctgatctactggttgtagaataaaggtagaaattgtagaataattatttctaccggtagtagaacgtataaatcaacggctcggattgcttgtactagagatgatactggtagtagaatactattggtagagaatacggtaaaagtactcttatgactattgatttgaaggcattgttattttgttgcataatggctctgattgtttgtactagtgataataccggtggtagtacaatactaagaatgcctcaaaatactcttatgttttttgatttgaaggcattgttattttgttgttgcataacagatatgaacatgaattggaccacctgatttttttttctgcttgcctcattcctccaggagattgagccacaacaatttatctggatctatacctgattcactagccactgctcccagcattgtcctcctgtataattctccttgccaacttctacttattgcttcattgtttttgtaaactttttttgttgtgatattgagcttgagctgaactatttcagggatctatcctttaacaacctgagtggtccagcaccagtttttagcgcgaatagtgtattgtaagtgatttagaatgagtttttctttcttggtctaactaaatagtgcaacctgtctcaacattatctctcaggggttaccactaatttgccttctcttttctctgtttttctcacttgtcatacttgataagccttcgtggaaatcctttgatacaaaacttcagttgtgaaggaacctgtacttctgtgatagaagagacgattgctgtcccttctgcagcagaagaaccagttgctgtcagcatagaagaaccaatcagtaatacaaattgttcaccacccaaattctgggacatttaactgcatatgaaccattatttaaacaaatttgtgtgaagcaagcaagtttgggcattcatgccctcctgcatgttctaattagagtcattttctcttcccagttcacaggaaaggcttggcaggaactgctcggcgtgtttcattctacatagcagctgttcttctaatagttttcttgattgctggatttgtcgcgtctatttcgcagtggcgtaggcgacaccagatctttgctgatttcgatggtaatgacatctcaagtagtactgcatatatgtgcaagatttgttatgatatctacctgcaagggggcagtataggtcaaaatatcaataggttaactttggagtcaccctgattgttttttttcttttgggagtgcttgccatttttggcacttatatacaacataataatgttttatgttttaatgttgttggtggagggtttgcactgtgatattagaggaaagtttgcattaagtccaataaagtggagagttctcttgaggttctacatgttagctaattttgttacaggtttagcgcattaacttctgtacaaaaagtaatcttgcgagggtctgaaacatttgtatcaagatactcaggccacatatttccataccaaagtgagtaggagcacataataacatgttcctatgaacgcgatactaagttagaaggaaaacaataatgatttatgattggaactctgatcgcatacataaaacaccaaggtagctagaatgaaaaaccttctcacaaccagccttcatgagatcacaacaagcactaggctcgcctacaatgctgccttagcatcttcttcttcttttttgccaatgcatcaaaagttacatgccaatatatccaattttctttaaacactaaaacaaatcatggagttggacaataccatcatacgtgctattgacatatggatctagtgccacgtgtcattctcgcacacaatggtattttgcaattcacatatttttatgatggtccatgatgatatctttcattatttcattctcttattgttatataattataacattttatttaccaaaccttacttggggtagaattaaggaaaatagagtacatgtctttgaaatgacggtacgacattgtcgtggttaacggttattcatgattcaatcgggctaaagagatcaagccacgaacattgtcatggattgacatgcatagcagaggtaggcttacttagagttgtttgccaatgcttcctacactatatataaagataagactgaccgaaatagagttgtatattcttttgtgtcatagtacaggttctagggtgttttggttagtggttacccaactttggatccttagggtaagtagcatggggtgcagcaatatgtgacgtcggtgcttgtgacaagtggggatgttgactgtgcttgagttcaccaatgatggttcaaagtgttgagttattattaagtgccgtagagcgtgtgatatgaaagatggtgatggttgaggtcatgttcatctgaagtggcaaaaggggaatgacaaaacaatacggaagggtatagagcatgagagttgtatgtgcgaaaccaagacttaggctatctggactacagtacaagttggaccatgatcaaatgggcaaacactagcttggcccatggctggttcagcccttatgacagagcagatggcatgtcacaatatagtcttgatttgccaacgagcacccccccgcccccttctcgacctcgcgtttctagctaacaaaacccatggatgcacctttcgcctgtgtgaggcgacagcgcaccatatgctcatgggtcgtgggcctggttcaatataggtattatatatgatactagtttgtgggccatgggtggtaggtcagagcaataagtaccaaatcctagcgccgccatatatagtcgagaccgagcaggggagattggaggtgcttgtggcggctaggtgcggcggagccaaggagtggccggcggcacgtggcacagctgcataaggtgttcgccgttgagcgcccggtggtgcatgctagggcacgtggcacaaccacacggggtgtttgccgttaagcatcattgtggcaatgttgtgtcagccatcatgccttttttcagtttatcctccgccactgccctaggatgggtggcctggtcacgaggagctaattatggtgttgaagatgagataggtaggtgggggaattgacaggtggtgccgattgtgtccgaagagaggcatgagtgggatatgggtggccatggcatttttttatgtgctgaaaagtataggtgagggagagatccagagcttgttaatcttgatctgcagtaggacatttagatattagactttctagaaaaatatattataatctttctgcacctttttttaaagatattctatcatgtgcactgactcgaaaagtttgatattcatatttttgtgtggatctctttccctttgaccattgatttagctttgctaccatttggtacatggttaacaactggatataatatatgagaaccaattcaatgctgataagaaaatcctaatagtgcagaggggtcgaactgcattaacatttcacataactaatcatatttttgtgttgatactagtcatgcccatgcatggttgcttttcatatatgcttatgtatagttttcccatttttgtctttttagattaaaaacaccaacaatttctaagtatgatacaacatttgggctctagccaaataccgtgttttcctcagtttaggcattttaactatttcttcaatagcatgactatagagttatgttaattttactgtgcagtactctgattcctgaatgtgatcatatttatccaggaccagaaatatacctaggccatctgaagcagttcatgatcaaggagatcaaagaagctaccaataacttcgaccgaagaaacattttggggcagggaggatttggaatagtatacaagggtcgcttgcgcgatggcacaattgttgctgttaaaaggatgaaagattgtttttctgtttgtggggatgatcagttccacacagaagttgaagtaataagcttgattgttcatcgcaatctccttcgtcttactgggttctgtattacagacactgaaaggctccttgtataccctttcatgccaaatggaactgtttcttctaaattacaaggttagtcccatgcttcagtatattcttttgtcatttatgcatgatgtacactgacacacatggggcatgccaaagtcctatttttctcaaagtcctatattttctaatggatgtaaagtatagatgttaattatacaaggcagtaatatatttctcaaaaatatgtactacatgttagtttttttcattaaaaaactatagtgcactttctgaatatatcaaagttaaagttggtgtgtacttgagatttgccttgatttttcaaaatgaaaagaaaatattgatagcctaccaatcaaagatggaacactataataacataatataccttagctaaccatatgtaaggtgattatacatgttgtccttgccttatttgcaaatgtttatgtaaggtggtctatattttaccatcacatttgttttcttggtctatgcatattatactgttaatggtacaagtgctaaaaactatgtgcatcttgtgtactgtcattattgtctccctccaaaggatgtataacaaaaggtatctattagttgatacatgatgtttctaaacaatcagatgttttttttttaagtgtccttgggatttaccctttctctgacagactgacattcatgtttattttcagtatttttagaccgaatataaatacattgacccggcatttgggagaaagccaaaagatatatagtacagagttctttattttcagttgttctgttctttctttagattagagtcatcatgtttgtttttgtttgttcctatagacttcattacatatatttgtgttagtatgaaactgagtcaatagggcattgactggtgaaaagaattatatgaaaatgatgtataagttcttcattcattgccacacacaaacaatgttttctgaactaagtattttcattttctatgagcaaattgaactaactgtttttcctcactttgtcagaatatgtgggtggtaaacctactctagactggacaaggagaaggaagatagcgctaggcgcggcacgcgggttggtctatttgcatgagcaatgtgatccgaaaattatccaccgcgacataaaggcctccaatgttctccttgatgagtattttgaagcagttgtggcagattttggacttgtaaaacttttggatcatggtgagtctcatgctgtcacagcagtgagggggacaatgggacgcattcctccagagtatttgatgactggccaaacatcagagaagaccgatgtttacggcttcggattcttgttgatcgagttaatcaccggtcggaaaacgatggagcttcatgaggatgagtatcaggagggaggaattcttgattgggtaaattactagctactccctgttttttttccctctacaagttcagcttattctgttccataattaaaaaagtgtgatgttttgatttagttcatttccacaagttccatagctttaactcctaatattgtacatacttggttgtgttcatgccaatagaatacaatccaatggtacaaaatagtatatcagcaaactgaaatatgacaaaaaaacacatttatgaaaatattatcttggttgagagaaaaaatatcaatggagaaaaaaattgaagattaacatttgttaacacatataccagtgtgaaactttggccaaatatggaaataagtaactccactgtacaagatcttatttatgcacatgcacttcaataattctcaaaaacaatgtttcttagtttatttcaattgccatgaactgctattaatcacacacaatcgtgcatacctattgcaggcaaaggagcttcttgaaggaaataagctaaggtcatttgtggacagtagactgagagacaactatgtcattgctgagttggaggaaatggttaagatagctttgctctgcacaatgtacaaccctgaccaacgaccaagtatggctgagattgctggaatgctgcaagagagtgatggttcagttgtggagaaatgggagactctgaaagatgccgagagatcgaaaccgagcacgccggagttcatgctgtcatcccctgtaaattttgcttcagatgagtgcaattcaattcagttggaagctgttgagctctcagggccaaggtgatgaaatggcctgtttgttatgctcacatacaataattttcagaactccaaaatagggagatgaggatgaactgaggaagaaacggatgtttcagacattaactcagcttttttaactagagtattattttagttatattagttgatgacaaaataagttactctttgtgtgccctaccgaaatctctgggtgactctgatgattaaaaataaggaggatacattgctacaatctgggttgtactttgcatctgtgacttctctatcccctccttttttatcttttggtaagatatagtctgttgtgtcagagagtttttcttttctccagagtttttggtagatatgtttggtttgcttctgtcagaagtcaaatctggcttggtaagtttaatgtgtaggttagtttggagtaagtaacatgtttggttctggaagttttgtcaagtttataaaatgtatccaagaaagatgctaacacaatagcatgctacaaaaatataatgcaaaatttaaaccttaactttttactgctaaactggctcatctgtaatcagaggacctagagtcttagatgaatcttttgctagagacaataactaacaattaaacatcatgacaagaacccaatgcgtgaatctccatgcacagagccacaaacttgttaagacttcagactcttaactttgtctctgcctactatcctgcaagaacacaatcctgaattcctgatgcagcacaagcagcagagccatgaaccatgttcccctccttaccaccgaaggcaagctacagccctacacacacgatgtctgaacatgatgcatcagaaaaattcagagctagcaatgggacaaggaggatgcatttcggctagctaagctcaaaaaccaaaatgcgatgcatgtgttcaagctgcaggcttgcagtgcacacagtgatggtgctgtacatgcagactttgtaataaccggaatttctgcgattttaatggccgtcagtagctagcctccgatttccagttctgggacagcaagcaagcagccaagcatatgcatgcagccatgagtcagctccatggactgcagctgaccagtgagactgaagctgcaaatgcatatgagaaaagtttggcagatgctgctgctgatggatggaacgcttcatggttgcattgcagctagctagctctgctgctgttgcaaaatgtgagctatctagggagagctctggatttggccggcacacactctcatgcagcaatgcattggtcacttgctaagttgtagtactcctcagtacaatgtagttctcactttgtgcagagattatgtagatcctcgcatcagcttcgctgttcatatacactgttgtagctcaaggggctctcttctaagcacactttgttactttggcccttagatcccaccccaaaattttacaccatgttatatcgaacgtttaaacacctgtataaagtattaaatataagctaaaaaataactaattgcacaaattgcgactaatttgcgagacgaatcttttaagcctaattgctccatgatttgacaatgtggtgctacagtaaacatttgctaatgatgaattaattaggcttaataaattcgtcttgtggtttactgatggattatgtaattagtttttttattagtgcccgaacattccatgtgacaccctatataatatccgatgtgacacgtcaaaactttacaccactcgatctaaacacccactttcttaaggtttcaaccaaaggagatgattataataatctactactataagacaagtcgacgcatgaccgggtcttcttaatcagacactgctggtatcgtgatgaagttgtcgtgatggagttgtgggtgcatgatatcctatccgtcaaagttgaaataacgagactcttaaatgagtgtgttgttagattgtgttgaatatgtgtacaaagtcgattacagtgtaaaacttgaagttataataggtattaggatagcaatagagttgtactctaccctaggctctctcttaaatagggaggtacatcagttgtaaccgcatggtgacttagcataggtgagagggaattaatggctaacaccggccaaggatcggggaaaagctcatgtaattaatgtcctagggatgaatgtttctgctgaacctcattaataaatatggtgcctctatatcatcatcagtttggatcttctatggtgttcttccacgttcggcacaccagttgtaaccacatggcgacttaaggtcataggttctctcttaaataaagggacataccggttgaaaccgcatagtgacttagcataagtaagaggaaatggctacggacaacatccgctagaggatcattgtaattctgatacgctataattatattggatcggagagaactcagagaggcataagcaattagtgcctccagggatataggttttagttaaaccttgttaacaaatattgttactcgatgtcgtcatcagtttgaatcttctatggtgtacttccacgttcggtttccgatgtactccctccatccacaaaagttagacatatttcacatttgagtttttctaaataagtagttttttttagtctttatgcattcaagacttaaaagaagagataaattaaatgtttaattagaatccaaggagtcatctaaatactcattggttgcatgcttgcattcactccttgattttgtaatatccaagatgatttaatttctcctttgtcttggtgacaaaaagtaatagatgtaacttttgtggatggagtatatatatgggccatgttaaatacatgtgtgtccataatgacattttgaattcttgatgattcagagatgccccaagcgtgtaagcatggtatttgtcctttgagtgcaaaaggcaatctgcggtgtactgttggagctaatgatcttgagagtttgtgggtcgggacagcttaggcccctattcctattcctagtgtcctttgatctttttttcttgattaagtggcgcgtctattttaacttgtcaacgtgggttgtaatgtattattggttttttatttactaaaatgacacgcagctctctgcttgtttaaggaaaaaaaaaagagaattcttgatacatacataagctttcttgacatacagcgagctggagcatatatccgttggatcactttgccgcgaacatccgttggatagaggggtagttggcattatcggctcaggctgtgtttagtcctttggccaatttttttaagaatgtgatatacatttaaagtattaaacgtagtctaataacaaaacaaattacaaattccgcctgtaaactgcgagacgaatgtattaaacctaattaatctgtcattagtaaatttctactgtagcatcacattattaaatcatggcgtaattaggcttaaaagattcatctctcaatttatataaactgtgcaattgattttttttcgtccatatttaatgctctatgcatgagcctacatattcgatgtgacgtttttggtaaagaaaaaaagaaaatgaatctaaacacggcctcagtcaattggttccggtaaaaatttcaaggaagggacggatcgaccattcatgagtcatcacacgtccaatcgatcagagctgttgcaccggcattacatgcattcattcaggaatgaggaggcctttttgtcagcagcaactagctatctagctgccttctttgttcgtttggcccaaccacacaacaaaacggcttaactctcacagccacattctctctccctctctcccctatttgagggctaaagatttcatgtttagttcccacgtaaaaacttttcaccctgtcacatgaaatgtttgaacacatgtataaagtattaaatatagacaaaaaaataattacacgaattgcgtgtgaattgccagatgaatcttttaaacctaattactccatgatttgacaatgtggtaaacatttactgatgacggattaattaggcttaataaattcgtctcgcagtttacaggcagaatttgtaatttgttttattattagtctacgtttaatacttcaaatgtgtatccgtatattcgatgtgatacgtcaaaacttttcacctctgatctaaacacagcctaagtagttggttagtagtgggtgagaaaagaaactgagttgctcagcttttggttactactagtttatagtgatattatgatagtttgtactgatagtattcaattgtgtaagtatgttatcagtcgaactgattttaaccgttaattttatacattctactatcaatagttcagactataatataaataaattactaataaaaagatgagccgactaaatttatttctactaccggtaaagatctttgtaaaatatcttagtaatggtctcgaaatttggacgtgagcatgatctaggccgagtttagttccaattttttttaaaaaaaaacttctaatttttccatcacattaaaactttgtatacacacaagttttcaacttttccgtcgcatcgttctgatttcaaccaaacttctaattttgccgtgaactaaacacacccctatttatgtagttggagattttacgagtagttacagaagctgccaacacaaagaaggcctatgtaagactgtatccatcattgccgagtatttcatggccacaacgacgaagtagctagcacataatttgctatagctccatttctatctcttctcgagagtgtacgtgtgtgagagagagagagaggctaataattaagtaagagagagtgccatgaactgcatcaagattgccatggtggtgacactgatcatcgtccctctcgcgctgaggggagcctcgcttctcggcaatgccgtcgccgccgccgtcgtcccgtcgtcgtcgccggagcagcagcagcagcagcagcggcggccgcggccgcctcccggttccaagaacggcgcctcgccgtcgtcgtcggctcatgggcagcactggaaggatcagagccgccacgccgccttcacccgacggcggttcggcaccggcaccggcggcggcggcgacgatggcttcttcagcgacgacaagaggttctcgccgactggatcaaatccgctgcacaacttgtgagcgttaatttgagtacttaatttctctctcttttgctgtacatatatttgtgttgtttaattactaattggcaataatcatgagctgagcttaattatataattattccgcgtgtacataataaggttggtgatcgaaattgctaatagttgtttcatttggtgaacttgaaagaagggtaaattttcgtctggctgctcatttatttgtttgtttgtttaatttgtcttccttttgtgttcaggagcagtttgtggttgttgggttatgtattagtcgcttccgatgctacttaattagtgaatctttattggttccagtaataatcttttgttacagatccaaattttaattttttaataatggattaaaatctcgcctctacttcctgaatggatgtacacgggcaaagttacagctccaaattagaagatgcttctgagtttcaagtttcaactaattctctgaatccaaatccaaaatgagttggtgcttttgaaaccactacgatgccaaattaattcttaatttatggttattaaattggttcgtaaggttgtgaaaaaaagttattcctttcaattaataatactcgtcattcattttggataagaatgatgtcaactttcaaatcttttagctatgaataatttgtaaaatatttatcctagaaatatgagaagcatatgtatagatgatggcatgcatgtcggtccaaaatggacacttcggtaaattaatattggtatggtattttctaaattccttgatacgtactatatgaccgtacaaatatgtatgtgtgccttaatttgacaatcgcttaaaccagtattttcagtttcttatgcaaatagtacagaattatatatgtaagcactgggaatttttatactgaatgaaagcacgaaaatactggaattttataaacaataaatgagtatcactgggaatttttattattaaaagaaaaaaattacaataaacatacacagctcctgaatgaaatttccaggactccacatattacactaattttataaattcacccacatcaaggaattaacttgagaaattcaccaactttttgggcctgatttacatgtactgattttatacacaggaggtgacgacaaggaacagcaagtgaacaaaacagttccatatattggaatccaaagtacacaagaccccatttaattggctgaatgcatatccaggtgacaaaatgcaaatgacagccagaaaaggctggtctgcatactctgcaggtaagtaagcaggagaaaagattggcctccaaagctacatcaaaatgcagccatggatgaaatttctggtcaaaagaacagagaggaagcatgcaacaatctgatgggtatagcatgcaatgcaaactcatgtacttctgctgaaaatgctgttctgcctatgccatgtgaaaatgtatggatctctgtcaggtactgcttttgagttttgagcagtcacgttatactgacacgcagatggtagtagagcaaaagacaaagttcttggtgtttttttttttttaatctctgatcatgttgatattgttggctagctaggggaacttttttgtgttatcctctgaattcttgtggggaattcagttattgtgcttgaaattatctttcatttcaaatgagtgggactagcgtagatgtaatatggtgtccaatgtaatctaaactcggcgtgcttgatttaatttgtaggtaaataatgaagttgacctacattgttatatcaattaagctcttctcatatagaggcttcatcgggtctttcaagttctctggcatttttttttatcatattgatttacatgccccaatcagttcactttaaaagttgaaaatgataagaaaagatgaaagattcacttatattctaccacataccgttagtaaatttaagaaaaaaaaaatccatggtaccaacttgatcttatgggctactgaagctaggttcgattcgagctcgacttagagcttggaatgatgctattattttccgttacccctccccttttgttaatatgatgaatatacattactttactctttatattccgctaactaagtatcctgatgaagataaaaattaagttaacacatgtaaaatgagaaagccattagcgtatgattaattaagttttaattattttgccttgataaattgatttatttcacatttttaactaactttgatatagaaaattttcgcatgaaccactctgtttagtagttaacagagtttgaaaagtatgttaacggaaactaagagaaaatataacagatcaagtactacacacaattaagatttggcaaaatttgctacaggacactcaaaaaacgtgtaattagccgcgagacaccgcaaaaacataaattggctgtaggacatcgcaaaagagtggtaattagctactggacactagagacattattttattattttcggtagaaacggagagagaaagagcgttaaaagtactgaaatgtccccggccgcaagcactccctctccagcctcctcgccgccctccccgccggtgctgcgcacgccggccgcctcagcctcacccggcagtagcacgtcgcacgctaccatcgtcccgttcactcccacttgcgatgttctcggcggcgacggcgacagcgacgcacccgccgcgagtagagcgcactccaccggggcagcatcgcagccacggcgggagcatgcaacctccggctccgccccggcggcccgcgtcgaccgttgcaggaagcgaggacggcagggaggagaggcggggacagggtgaggtgagctggcgctgtacgcgacataccaggtgttggcgtgggtgcgcgtcggcgggcaggtggccggcaagccgcagaacacatcaacgtcgccatcgccgtcgacagccagtggctcaacggcgggcaggtcctggcgctggacgagatcggcaggtcgttccgcgtcgagtccaagccggcttcgcgtgtgatgctgtacgtctagggccccgaccccggcgtcgacctcatggttgctgtgggatatttctcccaaacggatacggccaaaccaaaacaccttggacgtatctcagaattaaaagggggattagaaggtaaaacacaaacaaatctaacaccactggatccgtcatccaagcccacctcccaacgctgcatcgcggagggggacaccgtcgtggtgtacgagcgccacgacgccatgcgcgctgtgggcatgcatgctccagaaccgcttcggcgtcttccgccatgatgactggatcggccgccccttcggctgcaaggtccacagcgccgccaccgccggaggcaaggggaagggcgggttcatccacctccttgcgcccacctctgagctgtggacgctcatgctcagccaccggacgcagatcctctacctcgccgacatcagcctcgtcgtctcctacctcgagctcgtccccgggtgccacgtgctcgagtccggctccgggtgcggctccctcaccatgtcgctctttgaccaagaaaatagaggagaggctgacatccgtggcccacatagggtaatctggtcttttttgattgtttctctctccgttttcaccggaaataataaaataatgtatccggtgtccagtagctaattaccactcttttacgatgtcctatagccaattcatgtttttacggtgtctcacggctaattacacgttttttgagtgtcctgtagcaaattttgcattttggaatccttaatcacacaccttgtacatgcgactgttcatccctgcaagtaggcatttttataagaaaaggtattactattacttcacctgagaattgagacggatagatcgatcgattcgatcctgaaaccctggcgaatatgattgtgtcgtcgaaattacgcggtgaatccactcgatgcgttcactgaaaactaacgaccttctgccggggccgggaataaaagaactcatcattggaaagcgacgacagcaacactagcttaggtcgatcgctagctatagctacagctgctgcggcgaccggtgacgaagacgacgacgtacggacgtactccggtcgtacggttgagcgcatttgcgatttgtaatgaatgatgaatcaatcaaccagcaagctagagtactggtagattttatgagtagtagtacatgtatgcatgttcgcagtgagatttgccaactagtgtccgcagtgatctctcttagtgttcaacatgtattgataactgataagtaaattaaatgcaccgacagaaaaacatttcaacacgatagttggccataaggcccgaggccggatggtccggcctaaggcacgggattttagcctggctcaggcacgccacggcctgatcgctgtcgggcccgtgccggtacggcccgatcgctgtcaggcatgtgctagcacggccctgctgttgggccgtgcctgggcctatgcctcagcacggtgggccggcctggcacggcacgaacttcagggaggtgaaatagacttatttcaaccatatgtaagacaggacacaaagaatagggaggacaaatagacgtattatatggaacggcccaaggagtagagatgtaaaatagacttattttaactatatatatgtcacaacccaaagagtagggaggggaaatagacttatttcaaagaaaccacgatgggctacccgtgccttcgggtcagcccggcatggcccgacccttattgggtcatgcctaggccgcaggtggagcacgtgggccggcacagcatggcacggtccggcatgtaggtcgggctgtgtcggcctgacaaatcttggcccgagcacaaccgggcctgagctgtgccgggcggcccatatggccaactataaacacgccccgcctgtgtcgtctcattggtgacccgaacggactcccgggacaacgcaaccgcctccctccttcccctctcccctcgccgtcgttgaagaagcctgctggtaagctgagcaactgcaagaatagttttggcagggctcttttctccttggaggcgctatatatgtcaatggaggcgactagggagacaatggttctactttggatccaccccttccatagatctaacatgttatggccagcagctagtgggaggagggacaatagagcgcagcggggtagagagtgtggtagcaacgacgaggactatcggatccaggtctagtgtgtcatgtggttgcggccgtggacgcgatgggtaactatcgcggggggattgcggagcggccagtggcgacagggagtgatgcttactaaagaagatggtcggcacgccgtcctaaggcaacgattatgtggcgacctgcgtagacggatctggcaacgatagtcatggtggtggaggtagtggttgaccgtggcagcgacggatcgatctggcgcctctaagagcaaatctaccgtaccgtgggtgacatctacgttggaagcacatggtggtggcgaaggagatggctcgagcttgtgctggggcggctcggtggtggccaaaggcacggcatgctgccagcagagatgatcgtgagtagctagtcaggctgacaccttttgcatgagggcgtgtcgacagcggtaggcatgcagctgtgacgtgaggctgtgggtggccgtgagggagccaactggtggtggtgatggccgcgtggtatatcaatggttagttagaggtggttgaggatggtggggttgtggcaagaaggggaaggtaggttccacacgaaagtctagaccgacgttaagcctgggcaggcaacagtgtagagatcgggcgccatggccccctttgggagcattgtcgaggcatcttccacctccctgatggaactttccaggtgaaaatcatgtccatgaataggcgacagcatcacgacctttttaaggacgtcatctcttgaaagtcatgtggctacctatgctatctttagacaatttggactgcgatgacgcttaggatgttattatggcggtggccggtgggtctatacaaggcacgagtggatctttcttctctgttgccctctccctctacaacccttcactgtggtgttatccgggcgtgcattgtgatcagttatttggaagtgttggcgataggtggtgtgttcgtggctctattgtaaacctggcggcaacatccagtcacacatagccgcatccgacatagtgttaagtttcttcctcagcggggtgtgtgcacaagtgttgttggcacgtagtgtgttgttgttttttttttccttttttttctgattgtagtattttaggttgtagtttttttttcaaatgtatattaatagtaatgatgtgtcacctagtgttattcgtcaaagaaaatacaccgacgttaccatgtgacatgtatttaataacattcatactcttaaaacaagataaatgatttgttggtgcaaattttaaatatgtcagactaaattatatctgcttcttaataagttgtgatattgtcggtgcatttcaatgaccgagtgttgaaggtcgcacactgggatgttctctcgtacactttttaaaattaaatttaatgtaaatggttgtgaaaattttaaaataaaatgagtatattgatattcatcactctaccaaaaattaagtttaaacttatttgagaagggaaaaagatagtgaatagcactcgcgttgtttatacgttgtattttttttatttcttgatatgtgagttaagtttatatttaagattttatagagggatatgtatttgctatatgaatgtcgttgaattcttttcagaaatttttgtagctatttgaatatttaaatatttttaacccgaattgaaagagttccccgcttacagggtgttaataagttaattgataagggtgctgatggcaaattacgtacacacaccgtaaaaggaaaaagaaaaagaaaatccaatcctaacttacgtatctaaacaaatacatgtataaattaataattagtattgaatgttttttttattttacggatggagtatactccccccgtctcataatataagggattttgagtttttgcttgcaacgtttgaccactcgtcttattcaaaaaaatttgaaattattatttattttatttgtgacttactttattatctacagcactttaagcacaacttttcgttttttatatttgcaaaaaaaaaatttgaataagataagtggtcaaacgttgcaaacaaacaaaattcaaaatcccttatattatgagacggagagagtaacccacgtgaaccaactcgccgtcatatgaagacgatcaatggagagatcgagcgtatatatacaggagtagtagtgcacatcgcagcatctgcatgtcagcatgagtagtggccgatgtgatgacctggcattctggcggcggcagcatctggtcggggacggatttcaggtggacgaggcggcagcagcatgcaccggccacgatcgatggcaaccaagacttgcatcgcagctgctgccctggccctccctgccatttggattttggagatgaattctgatatggattgatggacctgcgtgtaaatgtaggattacgcattacatggttgtaagaaaggtactcccatataataaatggcctcatcttttcgtttatatttatacttatcagccaaaatttgaattttcaattttgaatttagagttgattttgagtttttttttatcgtggtttatttttccacctttgtttttagatcattaagaacacatgtataaaagttttaattcacaaattattttttatttgtaaatataccgtttcgcttatgcttataattagtgaaccgatgggaccaaaaatatcaataaaaaagtaaatcatgcatgatactattgtagaaatgtctataacaaacgtgcggggcatctctaacaggtcaacatgtgatccatttaagacaacctcatctacgagagggattgagaactagtggcaacatatcatacgtacataagctctcgcgtgtacacacgtgcacaccaactaaaaaatatcaccaaaaaatatagaaaaaatcatacacgtactttcaatagtattacacctagggttaaaatcttaacttcaaattcattacattttagccgtaaaaaaaaaacaaaaaatctgacagttttaaggttgcaattttgtcagaattttatcttttttgttattctctatgtagaatgaatttgaagatgcgactttgcacgtagatgtaatactattgaaagtgcatgtatgatttttttagattttttttttgataatttttagttagtgtcactgtctgtacacgtaagagcctgtcaccccacgaaggagaaaaaaaaggcagtgcaagcccgaccatctaatggtgagaagacagtagcaatgacagtaatagaggatagatctggtcgcctcaatcttgggagcaatggataaggtgactcctctttgggctccatctaatgtctccccttgctctccgaattagcatcaccgccatctcctcctcttctctagcaccacagcctcgcccctgccccccgttagatccggtctccacacatctttagagtcaggctagcgagtgtggactggaaaatcttcaagactaggactgaacttgcttatacaaattgtatctcgaaattttcaaaaaaatttaatagtatctaaataatgtgaatcctatatacttatatagttcatccccaccaagtgtagttaatgatatctctctcttctctcattaagccacatcaccccaattatttctagcctttggatgaaagatctatggtctaaattgtgtcttctttcttctctcataaaacataccatctcaattatttttaggttcaaaattgtatcatattgttttagtttcgataatcaaattacattttatttgtacatattatgcaatttaatttttcgcagcaacacagcggggtattcatctagttaagaagacaaacctagttctcaagccctagatgcactatgtatgtcttcgccccttggatcgaagtatcatgcatatacctgaaaaggttgatattgtgagttttatcggctggatttgtatttagaagtgttaattaacaaataaatcaattatcaaagtttgatattttatattttaaactggaaaaaaaaatacttctcttacactaagtcttgtgagttaatttgtacctctcattgtctcatcataattggtctatacccaattcaatgtttagtgaataatatttttaataagtggctctatcttcttttatcgcaaagagccaatgtaatttccgttatgtaaaaaaaaagagttaatttgtgcattttggaagatttgtttactgggccgaccctaaggcgaacacgttgggctgctaaacttagacccaaaataccaatgggccatcatcatggatcgtcatggaacagagcaaaccaaaccatcagacaaaaccaaagctgttcttcccggctaattttgcttcgctgatcaacaacacatgacaataacaaaggcaaggtaaagaaacaacaattaacaggaagaagatgagcttgaggcgatccatggtgggtcgtcgtcgtgttcagcacttgctcgccggcttcaccgcgccggcgccgccaccggccgcctccgccggcttcccgtgcagcacgctggtcgtctccgacgacgccgagctgtacttctcttcggcggcggacgacgccaccgacaccgacccgaccttccagtacttgccgtcgccggcgcaccacttgccgtgcgccgccgccaccgaggacgccgtctcctcgccgtcggagctcgacacggaggcgacggccctccagttgctccacatcctgagcattatgtacagcagcgcgacgcacaccgcggccgacacgacggcgatggccgccacgatggccgacacctccgcccccggcagccgccgcggcgccccgcacgacggcagcggcgcgccgcagagctcgccgttgcccgcgaaggacgcggccgggaacgcggagagcgcgcccgggatgccgccggagaggaggttgtcggacaggttgagaaggtggaggctcgtgagctgcagcagcgagggaggtatctggccatggagctggttggaggagaggttgagcctctccagcttgacgaggtctccgagcgacgccgggatctcgccggagagcttgttccggctcaggtccagtatcacctgcagctccggcagctgcccgagctccgccgggatcggcccctccagcgagttctccgacagccgcagctcgtacagcttgttgcatcgccggagctccggcggaatgacgccggtgaagccgttcttctgcaggttcagaacgttgagtgatgtcagcttcccgatctccggcggaatgctcccggagagacggttgccgctcagggacagcttgagcaggccggagcagccgccgagctccaccggaatgccgccggtgagcgcgttcgacgagaggtccagctcgccgagcgaccggaggcctccgagccatggcggtacggcgccggtgaggctgttcccgtcaaggttcagatgggtgagccgcgagcagttggagagctccggcgggatgtcgccggagaagttgttgttcgagaggtcaagtatcttgagctcggtcaggtcacccagctcggccgggatcgcgccggcgaggcggttgccggcgagctgtagccggaccatgcccgtcgaccgcgcgaccgccgccgggatgacgccggagaagctgttgttggtgagggccagcacggtgagggagctggagccgaggagcggcacgacggcgccggtgaaccggttgtgggagaagttgatgaccgtcaggttcttgagctcgaacatcgactccggcaaggcgccctccagcgagttgttgtacagggtgacgacgctgagctcggcgaggcggccgaacgactccggcagctcgccggagagccggttgtccgccagcgccagcgcctgcagactcctgcattcgccgaggctcgccggaatcgggccagtcagatcattctgccggagctggagcacggcgaggttcttgaggttgccgatgctcgccgggatcgggccatggaagtggttgccgaagaagtcgacctcctccaagctcgagcagttggtcatctcatccgggatggctccggtcatctcgttctcgtagaggaacagcagcttcagcctctgcagccggccgatctccggcgggatgccgccggtgaggccattgtggtacagagacagcacctccaggttactcaagttcccaatctgcggcggcaggacgccggcaaagctgttgttgtgcagcgcaaggttgacgaggcccggcagccggtcgatcgccggcggtatctcgccggtgaggctgttgttcgacacgtcgatggacttcagcgaggtgcagctcagcagggcatcaatgctgcctccgaggtcgttgccggcgaggaacaggttctccaagctcgagttgccattgccattgccatcgccattgcagaggccttcagggatggttccctccaggagattttcagacagcacaaggtacttcagattcttcagctgtgatgcagagatggcactgatctctccggacagattgttcttggacaaatccacaacctgcagctggctcagccggttcagttcttccgggatgccgccggtgaggcggttgccgagtaagttcaggtatgtcaagccggagaggttaccgatctccggcggaatcacgccggagaactggttgtttgcaaggttcagagactggagagagctcaggccgccaatggaggaaggtatgacgccatccagcttgttgtcagccaccgagaggacacgcaggtttgcacagccggcgagctgctccgggaggccgccggtgagggtgttgttgtccagggccagctgctgaagctgcttcaggttgccaatctggtgggggatggcgccgatcagctggcagtaggccatgccgatcgtctccagctccgagcagtcgccgagctccggtggtatctcgccgcgcagcgggttgttgccgatcctcagtaacttcaggttcttgaggccgccgagctccggtgggatggcgccggtgaggaggttggagtgaagcagcagcgtcttcaggctcttcatcgtcccgagctccggcgggattgcgccggtgagggaatttgacgacagatcaatggactcgacggatacaaggccggctatcgccggcgatatcgtgccggacaggccgtaccccgacaggttgaggccggtgacaatgccctcccctgtcaggcacgtcacgccgtgccatgagcacacgtcggcctccggcgaccagccggagaggacgccattagggtcagtgaaacctgacttcacttgcaggagagtggcagatgttgtgtctactgtggctgcttcacatgatggtgcaagcaggatgccacagaacagaggtagaagagcaagaacaatggaggagctgatcagcttgccagccattgctaagaccaatgataccatcaactgagcaactgaagcagtgttctaagatgcatatgaattggaacttacaggatgctggaactctggagatgacaaggtgagcatgaaactatgaactccatagctgaggtttggaggctcatcatgtgcacaaagtaggagcctaagctgcaaaaagcagaaacaaagttgtcaaacactacctgctctgtgcatatcactcagggtaatgtgatggattcttggtactgaaaatgcaacacaaagccaaaggagaaggtatagcactgtacactatctcttgcagacatggagtttacaataatcagcctagacttgtataatgcagggctaagtatgaggtattttaaaggctaatcttgttgctttgacttgttagctcagcttcttctgcatggcaactggtgacaaggatgaaaaaagggcaccgggaatcagtaagatacactgccactttacagagtgtacgtgcgtaaacagttcaaccactccccatgatttggtggcatgaggacaatagcatgacgcttccatccttattccttggcttaatagttttctaactcaggtttagtgacagaaaactaataagattcgtgcttaccctgttcatcgattccgaagtcgatatttttgctgaccctgcaaacaagtacacggcatgaaattttctccttgtcagcctaatttggcaccgatccaccatgggaagtactggcagtggcagacagtctcactacaagaaaattcagaaaattgaatgtgcaatcaaccaagagagcatacagtaatacgattatgatcacataacagaaggtaaattcgtatatagatatatggtatttgtatctgaatagaccacattagcagaactacagaaaaggactaactaatcaccaagccagcgagacacacatagtggcattgttttcaattatcaggtagagggaaagtgacttttgcaggggagtgacaatgacaggaacagaattgcatcaataaaccacacgaaacaaaggcgaagggggcggagaaaaaaaaaagaacagaactcacagtaactaccacgatagttgcatatccaggcccccatcacaggcagaactgcagcagcagcatgcatgggacgcaccagctcgcacttttctttgtttccttcagttgaactgcacatagcagagattcccacgtttaggaaacatccaaccagatagagacatcaatatggctatccggttatctactattgcctactggcttctaaatcctcatgatgcacaacgacacactactttctggttcagattttcagagttcagaccacattgtggtacccagaatttgtaactaaagaactccttttccaactagattatctactcatttagctgtaaaaccacactagttagcaacgcatgattgaaatttgagtaaatattagtcgaaaggccagcagatgattggttgtgactcaaagcctacacaactacccgtcgtttcggtaacatgaggacagtgatgtgctgttggtgcaatggttgcatcattggtctacgattgactttctttgacattcaaacaattttagtactgggtcctgattgatctgggtttgacttaagcctgcctaatactgtgctacttgcttgtacgcttctaacctgcctaaccacaggatttgagatccggatgggacatgagtcaaaggacaaatgtgggtgtagaataaagcgcccctttccttcttgctcatctcaaatgaactggttaatttatttagtattagaaagagtatcacttcaatataagatgttgaaaaacgagatggtatatttaagcgaaaatcacggacgccaggacaaacattcttggacaaatggacatgtccatcatgctaatacatcactgactacttggacgtgcatgaaccttaccctcgtaaactcagctaaagaaatactaatatgactacattcactagagtgtggacatgcgtagcattgttagtatatttggatcatgagaaagaaaaggttagtgttcatgatctttatcaagatgtaaactgatgttcctatgttcctttttacttgttgtttcggatattgatacgttctccaatacgcatactccgtatttgattattacttttttattatatgttcatacttcataataactatcagaaacataatggtgtgtgtttttcatattggaactacatgttattttcatctgacaaatccaaaaactatttgcatacatttgcatctaaactatttaagggttgactatacgcattttaaactggcacctattaagaacaggagtataaccgattttaattaatagaaacaaggcagggagtttggagacttaagagactatctttttaattaaaaaaagcaatctaaaaggcacgataaaataagacacttaaaattatgaaacccccagaagcacgacattcctctgaatcttgctctaatttctccaattattcgactttcagtcattaaattaaacttcgccggggttcttccggacagctagctaggccccagcataaccattttgtcttccctttatttattcataactttgttttcaatatggaatgattaataatttgagtaaagatcggctaacctctgcaatggcgagcagggatgcagtgcagtagggtagtttgcacgacaaatccgtggacgctaaccttaaccatgtgcataggatatagctcatcagtctcactttttcccatgcaaccaatcagatgcgtgtggacaccctttcctgtaaaaagtccgtctcctttcaggaatctgccggtaaagctatgcttcccgggatgccgatgattaaccaattgacttgagaacattcatagcagaagatgaggcaggctcctgcatgacgatcaatcgcttgcaatgcaatgcatggagagttgacagtgtgcagtgcaggaagggaaaaaaatgaaaagctcaagcatttaccaacctgtggtgcgtgcctgctcctatgacggctcaatcagcggcatgtaaggagacaatcgagttcggcagagctgcgtaggcatctgacatttcgtcgaaaaccatgttgagtttcacacagaggcagctcccatccatcagcccggtttcattgtgaattccgcaaccctcatcatgcttgcgtggccaaatgccatctgaacatgcgccaatcttcatctcactcactcactcactgcctagcaagcagtgtggaatagcagcagatcagttgcctaatctgtggaacactggaactcgctgtgaacccatggccaaaagtgagcttgaggttgagcttggggtcaatggattggcgagttgtcaagtgacagacttattccggttgcacttaaattggtgaattggtgcttggtctctgcagtgagcactcagctgccaaaaaaaaaaactccgacatgcatccccggccatgagctgaaggattccatcgacggacaacggcacagacgccacgctcgagcagcgcgaccacccccacgggaggagaaagggaagtgctttcgcggtgctcgaagcctccgccacacacgccggcgcctccaagttctggacgctagttggatgggcgcgcgcccgcttcgcttcggcgccataaggtcgaacacctggcaggcgtcaggggcaggaggcttcgggtagtccaccagtggaagaagaagaagaagagccccctctcctcagacaacaccggctcaaaacaagcggaacccgtcgcgagacgacctccgtgctgccgccgccggacgccgagctgaagccgggaaccatctgccgtcgccgccgccgcggcgccgcgtcgagcagaagaacggggaggagacgacgccgcggttacaggcttgcagtgttgggccgggccgagacatggtgtacctggtcattagattacggaataagttcatctgtggtccctaacatgtcaactaatccgattttcatccttcaaccgaaaaatcaggtacaacgggtctctcaactgtcaaaacaagtgcaaaataagttccaaggtggtttggacagtggtttaagctgatgtggtgcctgcatcgctaatttgactcggactttatctgacgtggcattgacgtggcgcttacgtgacaatttgatttgaaaactttaaaaaaatgtgtccctacatgtcacttacaccaaaaatttaattaaaaatggtgtggcccacatcggccccacatgtcactcacatccctcctattcttcctcatctctccgcatctcccctctcttcttctctctccctgtccacgattcatagactacccagatccatcgtcgccatcaccatcggcgttgaaccta

SEQ ID NO: 7445 - DNA, 68547 bp, Oryza sativa
cccccgcggcaaccgtgagaaggttggtgcttcggtgggcgctggcgcggcgggaggagttggagatgagcggggagtagggggcgaagccgaaggagggcggccgcccacacccactagtcgtcgcacacccggtgatgcggcgcgcacggagcgaacccccgccgcacgccctgtcccccattgcctcgccgtccccgtcgccgcaccgtccttgtcgtcgcgcctctcccctcccctatttcctgccgactgcctcccctttacctcctcctgtcacggtgctcgaggcgacgccgcattccggccgccattcctccatccatagctctgcccgccaccggcctccctcactgaagaagagaagagagaagagagaaaagagaagagaagagaaggagaagaaaaaaaaagtgcagctgatatatgggccctatgtactttttttaattttttctgactaggatgccacgtcagcgaaaccaccaatatatactgccatagaactttgagtgcacggtttatgtgagtttaggggtatacagaaatttctagttttatggttaagggatcttaaaacaatatcgctgttctgaggttgaagtagaagagaggatagagttgcaggaactgctacaggaaattcaattgaaggaggggagagataaactgagatggatcatctgttttttaagtgcgcttcggctagatttctttggtgctgcttgagagacatttttgggatggagcaatgttcccaggacaagagctgagatgattgagaaattgaaagaccctggcacaaagaacaatttgccttacatttgttttttttctgctgtttgctgggccatctggcttggaatgatttcgtctttaatgataaatgtctttcgggcattactatgattgctcataaggtggtgatgttattgtaacagtggagtcctttggtggcgcagaagtctactggagaggtggagcacttcaaggacttgctgcgtgccagaatcaaggagttggacgagaaaggaacaagctgatgctcgggacctgttcaaggaagaagatgcattaggagtacagagtagacagcagtttcgtttggatccaggcgatgcgttgttgttttctaaagtttctttttcctggaaggtgttagggtgatcttttgtcagttatatgttgatctcatcttcagttggaaaccccaactctactacctcccctttttcttttgagatcttttaaggtgcttgggaggtactcagcgtacctttcaaactattgaatatcaaccgttgattgctaaagatgaatttagaaatagaaaaaacacgacgatgggtaatttagtaattgtttccagttctaacaacttctaacttcttcctgattgtttgccgctagcccctactctattaactgttgctcttgtattactttcgctcactaattctcatctctcgctgttgttgcttacattattacttttttttcagggacattataatagttacttattaggagataggaatattacataaatctatggtcattcacagtatcacatctgctagtcttttgaaggcatttttcttctctatcttttagataacctgagcatgccggtgtcgaccacgtcttaattaatccatgaatgagctaccaaaacttcaaataatatgacattccccgttctgtgtagatcaattttcataacaaaataaatccgtaattgttcacaatttcatgtaatccatattaaaaacttcgtaacgaaacaaattcgagaagaatcgaagaacttatatatgttacggtcatttccttttcatatctgatagattgatataataccaggggacaaaattacctatataccctcccacttaatctctatttttatacctgcccacctttttttaagtaactttctatgggtaccttgtatcgtaaaccattggattgtacctaatcaatggttaacgtgattttcaagtaccggagaaagtctcttttcttttttctttttcggttccagtctgtaatgaactctgttatgctttgttagtaaagctgggcggaaaccctttgatctaaaaaaaatatcgctgttaaattgaggaacctccggtgaacttattccttttcacgtgaatggaccgggtttcgtgggctttcaaatcgaggcctagacgtgaagagagtgtgggcctaattgagtaaatatcgtattgggccagtgggagaaatgggctggtcaagttaggtcaattggagacgggcgctttgggagtcgggacatgtgtgtgctagaatagtcggtgcaaatcatggaaacttcacgtgccactgtcagctcacaacgtggtcaccctccccggcctcttgctccctgctcatcttggatctttgattttaaccttggtttatcgaatggtttgttaatcacttttgctaaatcgtgtggtattattttacatcatcgtattaatctatttttcaacttttttatgttgatatttagggcatgtttgattggtaactaaatttatcacataaaatcttaggtaagtcataattttaggaaatgtttgtttttttcctgccacaactcgatccacatgttatagagtggactatatttttatctaactttatataagtttagtttgttactccctccgtttcaaaatgattaacaccgttgacttttttaaacatgtttaaccgttcatcttattaaaaaaattaagtaattattaattcttttcctatcatttgattcattgttaaatatatttttatgtaggtatataattttacatatttcacaaaagtttttgaataagacgaacgatcaaacatgtgctaaaaagtcaacggtgtcaaacatttcaaaacggagggagtattttgtttatcgtaaaagtacagtaagactaaggttgaatatgtgttaaattaattacgcggtaaagggaagttattgaaacgatttgatgaaaaagttggaagtttgtgtgtgtagaaaagaccatgtttagattttaacttttttttcttcaaactttcaacttttccgttacattgtttcaatctcttcaaacttacaattttaacgtgaaactaaacacatctaaagtttgatgtgacagaaaagttaaaagtttaaagaaaaaaagttggaatctagacaggctaaagagtcggttctgttttccctgtcccagctttgaagctcctcgccgaagtggccaaccttctcgcacggtacaccgtacacatcgccaccgtccatcttccgatccgacggcccagacaccacctgtgatctcccccgaccccgagccgttgccgcgcggcggatgcggcggctgcgtcgcccctcccgtgccggtagctggcgcgtccacacttcagacactccaagtccaacaacttaactttcacttcacttgccttgcctctgccgcgcttgctcggcacggcaacccacgcgaaatcggagattccttcgattcacgagatcaccacgagtccaccaccctcctcctctcgctggattcgatgggcgctcggtgagatccgaatcccccacggtggtcgccggagatgaagccgccgcggaggtggatgtacgggcggggcggcgggaaggggaagccggcggggctgctgctgctgggggtgttcctctgcttgtcggtggtgctgctgctgctgctgcacggctcgtccccgtcgctggagggcgaggggaggaagcctgaggcggtggaggcggcggggggagggggagaggaggaggaggtggcggtggcgcgggcggaggtggaggaggcgccgctgccgccggggaacgcgcggctcgccttcctcttcatcgcccgcaaccgcctcccgctcgacctcgtctgggacgccttcttccgcgtaagcgcgcgcctcgcccggatctcccccttcctctcgctcttgctcggatggctcccaatttcagcgaatgctggtttaatttgaatcctgattgcattgcgttttttgggggtgagtagggtgacaaggaagggagattctccatcttcgtgcactcgcggccggggttcgtgctcacccgcgccaccacccgatccggcttcttctacaatcggcaggtcaacaacagcgtccaggttcgcgacctcgtccccacttccgttggcaatgtgatgtgatccgtcggtagcagcatccgttgcagtccacactgggttcctgatgagttgggcatgtgtgatttgtccttcaggtggattggggggaggcgagcatgatcgaggctgagcgtgttctactcgcccacgcgctcaaggaccccttaaacgagcgcttcgtgttcgtctccgacaggtatggattatggaattatgatgtgtgctagtgtgtatgcttggataaagtattactgactttagatactaagttgattggcacaaaattttggcaatgcccaaaaaatttagtcatgtgttctgtttatagccaaaaattaagcactactaaattatttgtcttggttgaatagcaaatgcaagtttagtagaagcaaatgaatgcctagccagtttttgccagaaaatttggcaatggccagttcttgccattgccaaaaaaattggtaaggctatgaaccaaaacaagccctaactgcaatctgtgttggcttaatctcttgttcagcacaatgtgttgtttctaggttctgatcataatgaattaagggaatgttcctgaacataatgatatgtccttacatttttataaatgtggactgttatctagtaaagattgtttgttttttttaatcatcgtttggctaactaatttttttttccaatatgcaatgctcagatgataagtagtttctgtccgcgattttaagctcatgctaaaaatgtggtgcgatagcagtcctcaatcttaaattccatggaaatgaatcttgtgttatactgttagtctgtttctattaagtttaacgggactccacatgaagctgtactgaatttaccagatgccttggtgcaattttaggtatcgtttacacggttgtttttctgacagctccaaatttgaacttagtactacacatctttttttataatcttacaaagctcgttgttgcaccattttggatcttaattggattcatgcttactaggatcttctctctctgccagctgtgtgccattgtacaacttcaactacacttacgactacataatgtcttcgtcaaccagttttgttgacaggtataggcatcacaatttcgtgttgtgtttcctgatgatggttaagacttaagaatgaattctgagttcatgacaagtatcagctagtaactatgaatgttaaagaaaagaaagaaaaaaaatcatgttagcctttctcattttccattatctaagtatttccatgtaccttgagcttcaaaatggttcctgtagcaaactgcagatttgcagcttaaagcacctttcatttagcttgtataatatcctgggtattaacagcatccaattgcatatgctggggacagttttgctgatacaaaagcgggtcggtataatcccagaatggacccaattatcccagtggaaaattggagaaaaggctcgcaggtacctttctgtttctattgatgaaagataggagaattttgcttgaactgtgtaacagttagttttgataccttatcaccattcatttgtgccatacagtgggctgtgttaacaagaaaacatgctgaagttgtggttgaagatgaagaggttttgccagaattccagaagcattgcagggtatgtgactcaatatttatgcactctatgcagataaatttcagtattgtataacatagtttactcatgatcataactgaccagtgaactttttcaccttgtacctttcatcaaattaaaatcaggataacagaagttgaaaatttgaatattatcaatatttacttttttatgacagttttttgcattcgcaagtgaatgtgctctcaagataatcaacataggacacaaagaaacttgtagatttatgtaaactgccacgtatggtactgacattctgacaatgtttacgacaatgcatgatatcagtgatttattttattttattttttaaacctttttaatttttatttttaaaaataaatcattcgaaaacttatttccaagatctaaaccttttggccgtagttggttggcaaaacaacattgccacaccggtctggctggcatggcagcgttgtcttgccacaccaccgtggctggcaggacaaaactgtcacgcccgttgcgggtgacgtgtcagtgttgttttgtcacaccaggcaggctagcttggctaaaaggttcagattttggaaatattgtaaaattgtcatgcccattgcgggtgacgtgtcagtgttgttttgtcacgccaggtgggctagcttggccaaaaggttcagattttaaaattaaaaaggttaaaaaaataaaataattcgatactagtacctttgccaaatgaatagaagatccaccggatttttctatatcatcaacccaagttacttaactcatgtctctttcctatcaattagcttagagttgtctattcttgttcctattaaatgtacctttttatttattgcagagaaggcccttaccagagttctggcgggactgggatcgtcctattgtaagtgaaagtctccaataaaatactgaactgtcacttagcttgttgaacttgcttttatgtgtttatttttgaactgcagctggcacattgagtataataatcacaactcttgtgctatttcttgtactccataaaaagcttaattaacagaattattatctatggcttcaaaatttaccactgaactctatatctctatctaattgctctactgttccagaacaaagtttaattagtaattctgtgagactaaatgctgctcattttatccagcctgcggaggcatggaaggcacataactgcataccagatgagcactatgttcaaacattgcttgcagtaagtcaacaatcatttacagtatcccttgcagctgttcctcctcacaaagacatctgaccgttcaattatttttatcgaatgcagcaacatggtcttgaagaagagcttacacggaggtcagttacacacagtgcgtgggatctatcatcttctaaagatcgtgaaaggcgtggatggcatcctgtaacatacaaaatctcagatgctactcctgcacttgtaaaatccataaaggtatatgtttctttgcaatggcacattttttgttacctgaaagtggtgattatatagtatgtacatttaaaaaggaaattaagagaggctttacttttttttcttttatttgaaaattctgtcattattaaaatatttaagtacaaagcaacaaccaaggtgaatgttggaacctctgttgggtaatggcagacgctatcaattcatctgtttcaaagctttaacaaatgtcagtttggaaatgtgttgcgtctgataaggaatgtcagcttttgtttgtcatgtatacagttctgccaaaacaagctgcccgtacgaaatgcacatgacattttctaactattcactgagtacctatttgttgaatttttaggatattgataatatatattatgagactgaaaatagaaaggagtggtgtacaagtaatggaaaaccagcaccttgcttcctttttgcaaggaagtttacacgagcagctggtctgaagcttcttgatttagtaagttcaggacctttagcttttcatttcatatcgtgatgcaaacacaggcattcctaaacctaatgtattgtctaacgaaatcacattgtgatttgcttatagtttttgctctctccaaatttcccttttgcagtctttgatagcagcaaatggcgcatctaccatgtaaagtttctccgtcaaaagcagaatactgccagcttgcacatacgtaaaggaaagtggtggaggggacagaagataacagcgaattttttttgggcatcttcattacaatttgttgcactctgaaaagggacataggtgttctaaagcaataaagtttgtttcttttagcacctaggttagtacatatgttaacccactacttagcattataactgtaactgtaagcaaccacctgcagttggattggcaagaatcacctcagttcttttcacgacaaattcctttttcaaatttatagagaattggcatgtcttatacttgcatgcatactgtagtcattccatcgaaggcaatgcgtgatctggttacccaaacattaatcaagcatgttgaactcaggaactgcgtatttcacatggatttatactctcatagcagatctgccgatcaacatgcatgtttggcattctgttccatcagaaacatgggaccctagtgccgtggcaatggttatcccctacccttaggacctttggacttttgatggcctcaatttaaaactgtgctggctggagatgcagcgatggtgtagccaattcaatgattctcatcattgttgttcctccaattgatgtgttacttcttgtactcacaagctctggggcaattgtgactgtactggtatagacttaaaacagtattcagatactgtactctctactgcatactggcagtatcaatgtggggccatccatgcagtgcaacgtcatcaggagggttgctggcatggcacctgaggtggtctcatctgcacacaaacactgctatgaactctagattcaactctagattcatcagactactagctttggatccaaagagactatcaaatccttccatgtccagtcacatttgtccgtgcacttctgcatgcatcagttccatctgcttggtgttttgcttctcatgtcagattcccccaagtcgcacattatatcatgaagcattttattttttttcagctctcccttttctgcatagatctagtgcaatgtatagtatttatgttataatgttgtggtgccaaatgacaagaaaaggaggagaaaaaggtagaatgcgagcatatgcatgttagttgcttgagggtaagcctggtgtccctttcaggcattgcattgtcactgtcaatgtgctgcattgtccatgctgtctgcaagtgcagttctattgcaaagatgtaggagtactcgcattgtgttcacaggatttttgaggaataatgtgcatagaaattcttttttcctatcattcggattatggaaactggtcgtaggaaatccaaagaaaagtttcctttgatgctgattttacaggaaagtacaggaaaagtccatccaccttagaggtgtccaaacgggcggcacggcccggcccggcacgggcacgggtccggcacggcccggcacgggcacgggtccggcacggcccgtttcggcacggcccgttaggcacggctgatgaaacgggccgtgccgtgccggcccaagcacggcccgtggatggccgggccgtgcccgtgccggcacggcacgcccgcggcccacgggccgttcggggcacggcggcccgtgaaggcaggccgccagcccgccagcctgcagtgcacagtgttttttttaaaaaaaaaaagcaaaggaaatgtataaggaaaaaaaattaaaaatggaaataaaatgtttaaaaaaaagtaatgatttactaatgttaaaaaatgaaaaaaatggtatttaaaaaatggaaataaaagttttttaaaaaagtaatgatttgctaatgttaaaaaaaagaaaaaatggtatttttttgttgtgttgaaaaatttaaaaatatagattgtgattcattattttgaaataatttaaagataaatccacacttgcgaaaatattgcaaaagaatttgttaaaaatagtaatgacctttattgatgtttatatcattacaggatataatgatacatgctgcctcgttaaaaactttgtcatgtaaaaactcataggggaaaatgagaaaaccatgacaaagaaaagagtacagctcaaaggtcagaactacttctaacaaaattctactggggttggtctggatccaggtagagttgctcgaactgggcggccaattcttggttgtccgcagtgtattgggcatgttgtcgagcaagctcccagtctttaacgcttagtagcatttcgacgtggtcgctgcgcagagtcgtcctccggtcttcgatgattcggccgcatagactgaaggccgattcggaggacaccgtcgacacgggcaccgtcaacacatcccgtgctagttttgaaagcacaggatatgttatcttgtggtcattccaccacccgaggacgttgaaatcttgtgcttcgtggtggatggcgtcgctgtccaaataaccggacaactcttcggccacaacatgcgaagaggcgtctccacttgtagccgacgaactgccaccaccttggattgaacttgaagacgatccaccccaaatcctaccccactgtatcttcttcttacctgtagtggggataggagggggtctctgctggcgaacttcctgaaactttacttcatatcttccaaaaacctcatataatttacgtctaacctcagtataaaaagaactataatctacacctatagtatctccaacaagtgataaaatagcagacaatccccttaatttacacctaggatctaaaacaaaagcaagagcatacaacataggtatatttttccaatatttcaaatatttttgtttcatgtgaaagacaggttcagttagaacgtcatcattttcgtattctttaaataaagtagcaatttcaagaaggttgtgcaaaattatattagcagttggataataaacttgtgacaaagttagagtacaatcataaaaagtttctagaaattggtaaaatttttggacaattgcccaaacatgctcgttcagtactgaagacccgtcactgtttcttgggccaccacgtgactgaacaaaatcagaaagtaaactactataaggtaaaacaacttttaacattaaatacgttgcattccaccgatgctctgcatcggtggcaaacttacgagctttcacaccggccgcattgcaaaacctcttccatgtagcaatccgcgggttagaagcagttaaccacgcgattgcttgacgaacagcatcgatgtggtcacctaccctcttcatgccagtcttaacaatcaaattaattatatgacatgcacaacgctgatggagtagaaaagattgagcatacacacaaaataaatgttgcaatatttcaatagccctagaattagcagatgcattatctagggtgacagcaaatattttatcagcaagattaaattcattaattacttccctaattctttcagctatgttttctcctgtatgtgagacatctattaacctaagccctaaaactctcttttgtaattgccaatcatcatcaacaaaatgaacaactacgctaagataatcctctctagctctactactccatatatctgaagtaacactaacagagaaagtacatgtactaaacagttccttaagtgcagttgcttccttgtgataaacattctctaaatctctagttgatgtttgcctactcacagctttaaacctagggttatgagattgctgaatgtaatgttcaaaagcaggggactccccaaagttcaggggtaaatcttgcctggcgattaaccggacaagagattcccgagcaaccatgggatcgtactcccaactgcgtaccgtaccgtctgggtttaccataagttgctgctgccggagttgtattccttgcttcttggcacacgactccgcatggcgcttgaggtgacctgtaccaccagaagaacgagcagataaaatttgcctacatattctacaacgggctttcgatacctcccttccgtcggggcatgtttcctttatctcgtcgaagctttgccacacaccggaggttctcgatctcttcgagccggtgtgtgtcgaaacacttccgctcgcggttccggaaaatccttccgaagctgtctccgcctgaaccggtacctcctcaacgacagccgtatgaaccggtacctcctccacagatggtggagttggagccgatccggaggtaccgtcaaaccccgacatgtagttggggtcgaaatcacccaaggtgaacgacggcgactggtatggaaagttcggatccattctgaaaatttaaaccgacataaacaaattttcgaatatttattgaattcacaaacacaatacaaatttgaatattacttacatctttccaaccgcgagctcttcaaacctctgcgatcaaactgttgaactacgaaactaattttgatttttgacaaaatttgagcaaattttgtcaaaataaaaaaaaatgcacacttaagaacaaatagagcacttaaaacacttgagagcacaagatgaggagtgtgggatgaggagaaatggctggggttcatgccctatttatagggcgaaatttgagattttttggaattttttcgaaatttttatgaattttttagcctcccaacggttattttcaaatttgaacggtcaaatagccgttaatgccacgtggcgccttcccattcgaccgccgccagccctgtccgcgcctgacgggccgccggcgtgccgtgccgtgccggcccgctacagtagccgtgccgtgccgtgccggcccgcgggctcggccagcggcccaagcacggcacggctactcgtgccgtgccggcacggcccgttactgtagcaggccgtgccgggccgtgcctgctacaggttcggccgtgccccgggccgcccgtttggcccggcccatttggccacctctaatccacctcaagctctttctttgcttcctgcgtgcaaatcctaggcaattgacttcctatgatccgaatgctctcaacttttgtattcctttgtttttcatttcattcctctttttcacgctttgattcttttcctattcctatacttttcctatcctatattttctttccctatcctatgatccgaacgagcccttaggcgttaaaggaggaaagggtttaacatttgagagtaacaagggatggcgtgagtgtggtttcatggtttgtggctgcccatgttcttttgttctgaactttggaagcaggtttcagaattagtctgatgatgagattttaaccagcacttattgcagtgcctcttttttctggggatggcacaaaaaagggagtagagcctcttttttttcttcgtctttttaccggtagtatttttctgacagaagtgaaataacctggagtttctgccccagttttttacagcaagaatacaggcatcaactcaagttttattgtctccaagtcttcaacatctgtgctaggtaagtgacagcgaagtttatgcagtaccttgacacctgagaagttgatagcaccattggttttacctggacttttgctcattacagttaattaaaaaaaccattgggttttgcaagtttatatggacaggataacgcaaaaaccagaaaaggaataaaccttgaatcaactgaaatacatctaagatggaactgaacttcagtttcattagttacaagaattagtttgcatatttgaccttccaatagtaccttcactgcaccagagaccagactccagagtgatcccctagtttgcagaatttccttttgcatactccaacaattttacacagctctgcaccgacataacaccagagacccagagtgacagcctgacactcatggacttaggagactaaacccaagcaactaagctagtgttccatttttttattaagaacaagaagaatattaagttaagctagtacttctactggttttcaaatgtatatgctgttagggataaggtacagcatgccatgaagttaacaccagacagccgttttagccatgaaaagaagttaagaagcatacaaccattttcaagacaaaaaaaaaaaaggagggatgaaatggtccgatggatataagtatgcatagcgaacatcactgcattctaaatccattcttttgatctgtacagaatcttgttggtagaaatagaatggagtactgctactaatcttgcaccccccacattggcatcaacaattggtatcaactgaaatacatctaagatggaactgaacttcagtttcattagtacaagaattagtttgcatatttgaccttccaatagtaccttcactgcaccagagaccagactccagagtgatcccctagtttgcagaatttccttttgcatactccaacaattttacacagctctgcaccgacataacaccagagacccagagtggcagcctgacactcatggacttaggagacttaacccaagcaactaagctagtgttccattttttattaagaacaagaagaacattaagctaagctagtacttctagttttcaaatgtatatagtccacctataaactgctagggacaaggtataacgtgccatgaagttaacaccagacagccgttttagccatgaaaagaagcatcgagccattttccagagataaaaaatggagggatgaaatggatgtgttatgcatagcaaacatcaatgcattctaaatccattcttttgatcttgtacagaatcttgttggtagaaatagaatggagtactgctactaaacttgcatcccccacattgacatcaacaattgctcccactgataagtgagatagtatcataatatttcctccacaccagtctgtccaaaaggcagcacagcactgcatctgcatgtgcagtttctgtatgcctacatgcattgcctctagccatgggccatgggcctctccctccactaaggctccgtttagctccccaaaaacttttctcaaaaacatcacatcgaatatttggatacatatatgaagcattaaatatagataagaagaaaaactaattgcacagtttgcatgtaaatcgcgagacgaatattttgagtctaattaggccatgattagccataagtgctacagtaattcacatgtgtcaatgacggattaattaggctcaaaagattcgtctcgcggtttccaggtgagttatgaaattagttttttcatttgtgtccgaaaacccctcccgacatccgttcaaacgtccgatgtgacacctaaaaattttcgtttcaccaactaaacatgccctaatagtgtgtgtcagagtgtgtgtaggcaggttagcaggtaggtgtaggagagcagccaaaagagcaagatgaactgtagcaaaatgagcaatagcaagatcaagtggtgcatcagactgatgataatggagtgcaggaatggtcctacctcagttacctgtcttttcctttgaagttgaaccatggtcaatttcatggatgatgaaaatgtgtgttgttagtagtagtagcaacagtagtagtactcagctatgatcaaggttactaatgattgctgttgttacaacagtgttgtagatactactcctaattaggagtactagagggtttttcattgagtcaactagcaacagagattttgtgaaatttctttttcctggttggcaggttcttagctaatgaaagtcttacttctgatgaagagaaggtagtaaaagggagaaatcatataaggcatatatggccagcatgtccagattggattctatttgtgcctattgtttctggagtgatagtaccggtcaatttttccaactaaccttcttttctgtcggaagataaatgattcaacattcttttcgattgtaggtgttaaaatatgctcgatcttctgggactttttttacccactttgaatggcggttactattaggcttcatgtttaatgtgtttttcacctagtgcatcatgcttcatatgttcctacgcagggcatgttttgcttatttcataccataaggattcttgtctcttattgagctttgcttatttcatctcataggggtttttgtctcttattgaggctttctttaacaataattatgcctatgttcatcctagatatagaggcctaggatgtaatcatcttccttatctaaaaagttgttaaactaagcagtcaagcctgttggaatacaagaattccaccacatgctctgtagatgaacccattttatttaatatactgtaattttccaacgaggtaagttttgccaatggcctttttttaagagaaattttacgattcttaagaattaacaataagcagagcttgctcctgttatatcaatttcagttttttcttaggacagaagtaacattgtactattctgactaactaattttccatgcattgtcacagtaaaaagaaaaaggcatactacattaatatcagaatctcatgacaatccactgacgttataaattgttgcagggaatgatcatatgcatccatatgatccacaaagcatagctgaacagttatcacatttactcctactccaataatcagagggggcaaaacctaccatcctcatcatgaactacagctttattacatagtaaccgtaaaattcagatcaattacacatttgtaccatcatgtatagctgccatgccgtaccacttacctgaagtcagtaaaagatttcagtaacttagtaaaaaaaaaggagtcactgttcactgttggctagcaaagcaacaaacatggccacagatgaatgcagctgcactcatcagtgaccagtgacctcactatctagtcacatacaccaacccccaccatgactgactctaaactttcacaaggaaaaagcaatgagcatcatgaagactgaagaacccagcaaacctggaaatgcaactgttgcatatcaatcatcaagaatctcttcagaaagaggagatgatacttcagagttcgaagactactcctttaagataactgaagctttttatcccactcagtcaatttcatcaagatgatacaatttaccttaattacactcccgacctctgcataactaggatgaacgcatggagaaaattatactgaagcttcaagtgctgaacatttggtccaaaatttaggaatgccttgcaccttggccacatggagagcacacttggaaagcttcactttagcatcttacgctggacagcatccaccaacatctctctctctttctctctagaaagttactgggtgacaccacacagaaccccactgagagaggccagccaaaggtcaccaatggattctggagagagagaaggagagagaggggacatgaaaaacatatggctagtaaaatgatgtaagcatggagatgtggggtgctcattttgagacaattatgctggtccttgaaacctaaaagctgtgctggttggtgaagatcactgcaattcgcagccatttcccattgctaattgctaccactccaacatcacaacaactttgcattgttagttgttaacttcacctcctactctcctagtttatttttagcctcattttcacctgatacatggactatctttctactactatgtggtaacaatatccatgtatttatagggaggagaagaagaagacaagagcaccaatgtgtggcagatacagacagttttcaggagagagcacaagaagaggcagcagcagaagttgcagcagctagcttgtcattgatcggaaatcggatcccactacaaaattcaggcggctccaaaaacccagatcgatgagctccactctgatggcttcttgctgcttcatcatctcttacaagaggcctcgcccaatcattgccacctttgtccccttcctcctcctcctcttcttcttcgccgtcgtcgtcgccgcctcgtcgtccagcaatggcacggcggcggcgctccaccccggcgaggagctgctccggcttgagagagtcagggcacagctcgccagggtcaggagagcttccgtcaagacgatccaggcatgagcatgattactcaatcttgattagctaatcttgtttgatgttcttggagttcttggttgatcggcatatttgcggatgattgtgcagagtcccgacggcgacgtgatcgactgcgtgccgtctcacctgcagccggcgttcgagcacccgaggctgagaggccaaaagccagaggtgagcagcggcggcggcggcggccatggctgccgctgcagaagcagtggagcagtgacctgacctgacctgaccattgcgtcgctgtactcaacgtacggtggcgcgtgtgctgtcgcgtcgagctgatcaatgattgattggtgtacggctctgcgctgcaggagccgccctcggcgaggccgacggagacgacgaggaggaggaggaggaggaggaggagtcacgcccacggcggcggcggcggcgagcaccgggaggaggaggacgacggcgagcacgggttgcggcaggcgtggtgggccgccggcgaggcgtgcccggaggggacgataccggtgaggcggacgacggaggccgacctgctgcgagccagctccgccgccgccgccggcggccggttcgggatgaagcctcgcggcgtcggcgtcgtcggcggcgcggcgcggcgcgactccaccagcagcggccacgaggtgagtgccacgtcacctcagcttcagcttccgctgccgacggattcagacaagccgtactgccgtgctggagtgcaccggcgctatagatggccatgtgggccgcccggcacggcacggcccaggcccggccgtgcctgggccgaggcttgtcgggccggcacggcccgaccgacgcaccgggccgtgccgtgccagcccacgtgccgcactcacagcccaggcacggcccaacacgcctcgggccgtgccgggacggcccgaaggcacgatgggccatcgtgcttttcctcagaataagtctaaattttctccctcctattgggctgtgacattgtatagctaaaaaaaagtctattttacctccctcttctttgtggtgtggtatataaatagctaaaataagtctatttaaggtccctattctttagacattgacatttatatgtctatttttagtccctatactttgtgtaccgggtctggcctgccagcccatcgtgccgggccggcccgaccgtgccgggctagcccagcgtgctggtggggaggcccaggcacggcccgacggtcgggccgggccggcacgggcccgacccaagtcgggcagtgccgtgcttgggccgggccaaaaaggcgtgccgtgggccgggccttcgggcctcgggccttatggccaactataaccggcgcggcaggtggacacgtcagcgtgccacgtgggccccaccacagctgacaagccctgtgcatgctcaaaagtttatctatctttttcaacaaccagggttaaaattctcttttgtgaatcatttgaaaaaactggattctgaaacaaatgagtttcttttactgtcaaagggaaactacaatgatttaaaatcgagaaagtttttttaattcggataataaattaatttctttctttatctatcataggtcatgtcaaatgctactatctccggtaataaatatttaacgtttaagataatggtttggttaaactttaacatcaattttgtgttagaatattttttttagaaaaatgataaatttatgataatatcataatactttttaagaaaaacatatgcatgcaattttttattttttaagactaagtatttaataaattatcgatagtataactataaattttaaaagtttgattgaatcttatcttaagcgtcatactaaactttgagaaacttcaaataaaatagacaaatttgattttctttttctcggacattgttttattattacgtcctttccgagataattttttttattttttatttcattccaaaactctaaatcatatgagaaggaaaaatctaaataaataatacttcagtagtaagaagtctaaagaagtacttttgtcggtaagaaaatgttactgagtacaactttactgaattgagctaaaataacccccatatatacttgtatatggtagtgatgcgaagtttgttaactcgtgtgtactacctccgtgccaactcccaaaataagtttattttaatatattaatttagacataacttatatcaagattaatgtccaaaacaaaactgaacttgatttgagatggagggagtgcttacttgttactaccgtcattgtttggatgttgtcttctcaggcacagtcaaaatttgaattataatatttaattttaaagttaatcttaaggtttttccttcattgtttatttatcagtattagcttttaaatcgctaagaatacaaatataattgtttttacctgtattttttttcctgtaataaccaacaaggttttgtttgccaaataaactggcgtgtgtcggtcagatgccgatggttaatttacacgcacacacgccttacggcctcattgtttcacttatttgtggaataagccaataggtatatttgcaaacgaaaaataatttacatataaaacttttatataaatgttagtgatctaaaagtaaatgctgaaaaataaacttcgacaataaaaccctaaaatcagctctaaatttaaggttgaaattcaaattttggttgataagcatagggataagcgaaaagatgagggctttaatttggttgcgttgatactgacattggtgagcaaaacaaatttatgcatatgcagcatgcggtggggtacatgagcggggggcaattctacggggcgaaggcgagcctgaacgtgtggccggcgaaggtggcgtcgccggcggagttcagcctctcccagatctggctcatctccggctccttcggcaatgacctcaacaccatcgaggccggatggcaggtgctacattttcttttctttctctcctccttttctgaaacttgttcagtcaatcaggcctagctagctagtagccagtttcagagattacattttactctcagctctgcatactgatcattcggattttatcggtttatcgacggattccgtggataccgctcgtgagcggattttgatccggtatcgggatcgttaaccctgaaaccaacgctacattttcttaaacttattcaggcgtagccaatttcagagattgccattgctctcaactctcaactctgaatactgatcgtatctagctacctgtatctttctgatgaattttcaggtgagccctcagctgtacggtgacaacaacccaaggttcttcacgtattggacagtaagttctttgctagtaaagtagtaatctgttcctagtgtttcagtattagaagagagatagatcagtcagttcaaagaacaagttactgaagaatgatgcattgtgcagaatgatgcgtaccaggagacgggttgctacaacctgcactgctcagggttcgtccagaccaacagccggatcgccatgggcgccgccatctcccccatctcctccttcgccggccgccagttcgacatcaccctcctcatttggaaggtatgttgtgcgcacttttctgtgaatttcgaatgaaatttgacgaatttcaaacaaagcttgaaagccaagatttgaatataaactctcccgatgatttgcgatcttgaacgaaattcgaatatattgactggaaactgagattgtaaacatataggtgtataagaagttagttctctcaaataggctcaataggccaaaagtgatgggcttatatagtccatgaagtcttttcctttctaaaaggcaaaattttcatagatggagatctcaaactacatataataagttaaacttttttttttgaaaatttactatactacttagtactacaaatgccatggtatttataggaatttaattcaattcttattttctattcaaatttgaattttcatgaaaccattctattcccatcttgagctgtctcgaaacaccaaactttgcggaattcactcgatcgatttttattgggaatgtgaacttagctttgtcagcatatactctaacaacattatcttttcgcttatacttatacttatcagctaaaatttaaattttcaatcttaaatttagatttaattttagggtttatttatcgtagtgtatttttcaccctttgcttgtagatcgttaaaaacacgtatataaacgttttattcacaaattatttttcacctgtaaatatgccgttttgttttttcctccaaacaaccaaacaatggggttgtaagaatctccaccttctcaaagcagttcgaatccttcctccgaattcaaactatgaaaatacatatagaatctaagaatgaacaggtagccaaaagttgccaccgtagcttttccatattctcaccagctagttacatatcaattgttttcttcaaacagagcctcagtttaagcactgcgagatttgaacagtttttttttgtgtgtgtgcttaattctctcacaatctgaacatatttgaacagctaaactccaagatgatatttgaaactgcacgaaacgcaccgtttagtagcttgaaaccgagataaaaagtctgaataagcgcacgaatctcaacgcaggacccgaagcagggtcactggtggctgcagctggggtcgggtgcgctggtgggctactggccgtcgttcctcttcagccacctgggcgcgcgcgccgacatggcgcagttcggcggcgaggtggtgaacacgcggccgtcggggtcgcacacgccgacgcagatgggcagcggccgcttccccggcgaagggtacggccgcgccgcctacttccgcaacgtccaggtcgtcgactgggacaacaacctcatccccgccgccgccctccgcctcctcgccgaccaccccgcctgctacgacatcgccggcggccagggcgccgcctggggcaggtacttctactacggcggccctggccggaacgcccgctgcccatgagatgatgatgctagctaattcaaggaaaatatacgatagagtaaatcttctctttgttttttttgctttttctttccctctcaatcttcttcaggttcttgtgtgactgagcatatgttcatcgagttttagcttagtttgattatttatgtatatttttgcattcaaatttacagtcttacatcttctctttgttgcatgtgtaatgcattcgtcttgagattgcatggattaatcggagagaagaattgcaaattttgggggaaaaagtacgccggaggtccctcaacttgtcatcgagttacaaaatcatcccccaatcgtaaaaccggatacaacgcatccttcaactaacaaaaccagtataaactaggttcctcagcagtttgaccctgattttatccgacgtgatggctaaatcaacgtaggacccgtgttggccccatatgtcaggtgccacgtcaacagggtctctcttccccccctcctctcccttcctcctcctctctctcactttcttctctccgggcaggccggccggcggtgggaaggaggtcgccgcgccgtcgcgggaggaacctggcatctgatgaggcgcgctgccgtagtaggagccgggaagcggtggcggcgtgcggcgtcggagccgcggcggggcgtcggggaggcggctcggcgtcgtcgtcggacgggaaacagatgtatgtatgagcaagtaaatcggcaatggtgattagtgatgcaatgtcacatcgagctttcacgccatagccgccagaatctttggaacgatatataagagcagagcaagtcaagcagtcaaatcaatagctcaagcaaacaagcttgctcggttcagttccgacacaatgcttgccttgagctgccagccattatggccgccggattcgtggacgacgaggggcggcgccgggagggtcatggcgttcgtggcactgtcctgcgccacggtggtgatgggcggcgccatctacggctacgacatcagcaccgcgggcggcgtgtcgtccatggagtcgttcctaagggacttattaccggaagtgctccggcggatggcgggcgccggcgctggcgcgcgccgcgtcagcaactactgcaagttcgacagctagctgctgacgctcttcacctcgtcgctctacatctccggcctgctcacctccgcgctcctccgtcgtgggtcacggctagccgcggccgccgcgcgtccatgatcctcggcggcttcgcctacatcgccggcgtggcggccagcggcaccgctgtcaacgtgtccattgccatccttggtagggctttcctcggcgttggcctcggcttcaccaccgaggtcacaacactgaaaaaatcaaattattctcaaattcttgatgtgccatttggacaaatcttctgcaaagttttttgaattttgcaagttcttgaaacattttgctgtctatgccactctgcatggctgaaatggcaccggcgcgatactggggagcattcagcaacggcatccagttcagcctttgtttcggagctctcgccgccacgaccgtgaactttgccgtggagaagattaggggaggttggggatggagggctctcgctggcgctggccggcgtccccgtcgacgacgagctggacgagatcatcgccgcgaacgccaccgcggcgcagggagagaacgccctgtggctgttctatcgacgaggagccatggcggcgggatctggcgcccgcgccgccggcgacagtggcggcggcggcgttgggaggccctcctgctcccacgtcgtcgcctcgttgccgccgccgcctcgccgccggactcccgcctccccactggcctcctcctcaccggccgccggctacgctgctagtgagagaatagaaagaggaggaagagatgtggagagggtaggggaagaagaggttgacacgtgggacccacatgggtctcacgctgagtcagctgccacgtcggaaaaaaccggagttaaaaccgctgagggagctaaaaccgctgagggagctagtttgtactgtttttgtaaattgaaggatacgttgtatccggttttacagttcgaggacgattttgtaactcgatgacaagttgagggaccttcggtgtactttttccaattttgggatatggtgatgtgggctgaaatttgattttgattttagagaggtaaatgggccttgggaagttgggatgtgcacactctagcccaagcccaaatttgaaacgatatgaagcccacaatgtcttctttcctgagatgaggcccattggcctttttagcctttgcacaaaacaaacttgttcttttttttttcttcggggacacgcaacacaaaacaaacttgttgcactgaaaaagaagaaaaaaaataacttggtcaaatttagaaatgctagggagctagtttgtgaccaaatgcatagtggtgtgcttgtgtgtgtgtgtatctactctacactctcttatcttaattctgatgatagtgccccttttctaggagacttttatgccaacatttttcaaggatgtgtgaatgtatggttttgagtgtgtcaagtggaacattgcgtccaaaaattgataacgataatactcatacagaaaaaaaaaaggggggaaagaaacactaggcaaacatgatccatgcatgactagggtttaatgtttcggtttgctgatttctattgggggtggccgaaattctgaaatttcggtccgaaaatttatgaattcttgaataaaatttgatcaaatttgaacaaaatattaccaaattcatgaaaaaaatgaaaaaaaatttaaaaattttgatcgtattgggggggggggtctccgatagaaccgaaatttcgatccgaaattttgaaccctgtgcctgactgctggagcaattttagtattgtcgccagtagtttctaacaggcccccttttagaattttttttttgtatataatatcactgaagtttgggacatgcaagtcctaagtgaatgcaatggcatattggcatcggaaaataggactattgttgatgagttggctgtcatcgtccttattaaatgatttaatcattggtggcacgcttccattaattctgattaatgacccatgttgctctacaaagggccctaaactattagctggttcaaaaatgtagaccccatgtacagactaatccacatctaaaagagcatcttgctagcttacatatgcagttgatagcacaaatcaagattggaccactcaagaaagaaacaaaagaaatgggacaatatgaacaacaagaggaacatgtgctctctttgacaaacatcttcacccataatatggctagcaattattactttagtgggataatttacactaataatccattgggcgcattatgccccaatttatggtacaaaagattattgaccgtcatatctcctatgatcactaaataataaaaccctaagcacaaagataacatattcccaatctgtacccacaagggtgcacctagcaaaacgacacaccccctacagtctatggcaagctgggcccaccagcaaacagtaaaccatccttttcttacaggtccccgtgagtgcctacacccatggttgcatggtcaacatcaacaatcatcaccctcacatcacactgctagtgggcccccttcagtttgaactatctatattactgtattactcactcctgatcgttgagcaggcccaaggaaccggaattagcacgggcttggagttgggcttgggcctgggccggtctagcaagggccatgagtttggtcggtgaaatgggctgtctcgggtcagcccgcttccttgtctctgcatcagtaccaactccattgccggcttttcttgcctcgacgccatcatcgtgtcgaatgccacgtagcaacgccgccacatccttcatggtcggtcgatcctcaggtcgtgggcttgcgcatagcaatgccatgccgagagcttgcagcatctcttggacctgggtatcgggccggccctgcaacctcacatcgatgatctccgccgggtctcgcttccggcaaaggtggtcgcgcacccattgcaccacgctttgtccctccccgaatgccgggtccagtgggcggcgcccggtgatcatctcgagtagcaccacaccgaagctgtacacgtcactcttggttgtgatcttggtcatgcatccatactctgcgttgatcaagatcaaatatcagccattgattaatcttgtgcttttctttttaaaacaaattcaattaaactgctgaaattttgtttgaactggtgaatgtgtgtgagtgtgagaaaaggctcttaccgggagcgatgtagccgtaggatccggcgaacggcggaggcgatgagctggcaccgtcgtcggcgacacgggcgaggccgaagtcggcgaggcacgcctcgtagcggtcggcgaggaggatgttgtcggccttgacgtcgcggtggatgatccctggaacgcagtcatggtggaggtaggtgaggccctcggccacgccgacggcgatggcgaggcgaacctcccactccaccacggcggcggtggtggtggcgccgccgcccatcgcgccgccgtggagcaggccgccgagggtgccgttcgggaggtagtcgtagaagaggaggcgcgtccggcggttcgccgcccagcccagcagccggacgatgttgcggtggcggacgcgcgggagcacgctgacctcgccggcgaacgcctcgatggacgcctcgtcgcacgacctgaacttcttgacggcgatggtgacgcccgacgacggcatgctcgcgcggtacacctcgccggaccacccgtggccgatcacgttcgccggcgtgaggctgcgtgccacgtcggacacgccgatctccagcttctggtacagcgtcacgtcccacggcggcgacatctcgccgtccttgtcctcgccgccgcgggcgccgccgccgcggcggtgccacccgaagaggacgagcgccgcggccgcgaggaggacgacgagggccgagagcagcaccgccatcgcgacgcgggcggcgcggcgcgcctccacctcgcgctcgctggcgtcgccggagcaccgcgagaggcacagcgccgggttgccctcgacgtcgctcgtcggcagtctcgcgaagaacgccgtctccggcagccggccggtgaagccgttgaacgagacgttgagcgccacgaggttctggagcgcggacagcggctggaggtcgccggatagctggttccgcgacacgtcgagcaccccgagcctcacgagcccggcgaactccgccggaatcgcgccggagaagccgttgcagctgaggttaagcgcaatctccagccccggaatcttgccgatgctccccggcacatggccggagagcgagttgccgccgacgtcgaggagctggaggcgcgtgcacgagccaatctccggcggcatcggcccggacagccggttgccgccgagaaccagcttagtcagagacgtcagcatgccaatctccggcgggattccgccggcgatgacgttgtcggagaggtcgaggtactggagcgagagccagtcccggaacagcctcggcggcagctcgccggagatggcgttgtcgtggaggtcgacgaacgtgaggttccggcaccccgacatctccggcgggagcgcgccggcgagccggtttgacgcgaggtcaaggaagctgaggttcccgagcatgccgatctccggcggtatcgcgccggcgatgtggttgccgctcgcccggaaccttacgagcgccgcgcagctgccgatctccggcgggagctcgccggagaggttgttgttgatgagcagcagcttggacagccgcggcagccggaagagggagcgcgggatggcgccggtgagcgcgttgctggagaggtcgagcgcctcgaggctcccgcaccggccgagctccggtgggatgctgccggtgagctggttggcccagaggtagagcatgcgcagcgccgggaggcggccgagctccgccgggatgccgccggtgagctggttgttgtcgagctcgaggtcggtgaggttgctgcaccgggcgagctccggcgggacggcgccggagagcttgttgacgctgagctggagctcctgcagcgacgagaggttgccgaacgacggcgggatgtggccggtgaggccgttgagcgacaggtcgacgacggcgagcgcggcgcacgagccgagctccggcgggatgacgccgaccagctggttctgccatagcagcaggttcctgagcttcccgagcccgccgagctgcgccgggatggagccggacagcgcgttctcgtagaggtagatgttctcgaggcacccgcaccggccgagctccggcgggatcgggccggagaggagcgccgtgtagatggccagcgtggtgaggttcttgagccggccgaggctcgccgggagcgggccggtgatgctggtctcggcgaggccgatcatggtgaggctggagcaatcgccgatctccgccgggagcgcgccttggaggttcttgttgccgccgccgcggagcacctcgaggctggacatcttgccgatggacgccgggatcttgccggcgagctggttgtcgtagacgatgagctcccggagcgaggtgaggttgccgatggtgtcagggatggcgccctcgaggcggttggagttgaggtagagggtctccagcttgctccccggccggcagagcgccgccggtatcgtccccgtgagggcattgttgctgaggtcgaggtgcgccagcgccggcagctcgccgagctccggcgggatcgggcccgtcaggttcgcgccggtgagcaccagccgtgtcagcgtgcgccccacggcggcggcgaggttgcccggcacgccgccgaacaggtcgacgaactccaggctcagctccgtcacgccgccgtcggcattgcacgtcacgccggtccaccggcacggcgacgcgtccccggccttccagtccgccagcgcgccgccgtcgccgcgcagcgtcgccttccacgcgagcagcgcggcgccctgctcgtccacggcgagcacgcagctcacgcgcagcaccacgaccacacacgccatgaccatcgccgccgccgccgccgccggcgacctcgacgccattggcgccgccctccatctgcttctgctactcatcacgcatatacactaataaccacactctttgtacctctacttgtatgcaagtatatccaagaacacacactactatgcaaagtgtagtagctaatcctatagggattctagtgtacttgtgttaattgctcccaaatcttggtcttgcttatgtcgcaagactagtactaagtactactaacctctaactaatcaatgaagtcctaataaagttttagtatgaaggagagagagagagagagagagagagagagagagagaagagagaccatctcaaatggtacagtttttatatgcttgtagggaagaggtgagatcaagaaacaagaatgaggtgtctaaataggtaggagaggttgaagagtttttgagtctgatgagatcatgaaggtgaatgaagcaatggagacttgtccctgtccctgcagaatctctggatccaaggccacagagcacagtactaacactgcactctgtcccttctatgactactttagtagcaatctcttatggcctctagtagcaatgcacataatcaccatggttaatgctgctgttaggattggtgattgggtgtataaatttttgacagccatcaccaacgactaattgctttgcaatgcagtgcaatgccccaattggagcttaaagaggggagtgagagaggatgcagaaattttttaactgaagcaacagctttgctggcttgagagtaaaagatggtgcccccagagacatggcaatggcatcaggttaagcaacttcatggaaaggctgtgtgtgtcaagggggatatgattaaataagatgcagttagagcaacagctttaacagactgtgggtaaggacttggctgtagattttcacatctcagggtggtaattgaacttactagtatgaattaagaacatcaagagttgacaacttggaaatgggaattagtaaattcttacttgagaaaaatgggtcatcggtacttcagaaatgcagaaaaaaactctgaatatatgggcagcaaagtctcaagtcagtaactcaaaaacatagatgttagaaagaatagagtcatgttgattggaatataagacaacaattaactgacctttttgccttgtttgattacatattaacagccatttctgaatgtgatcgtgtaagtagacagtaaagccctgcactgtaattatgatcattgcagggtgagaattgaactaactgcgctggtaagaatctccagagttgaaagttgaaaaataagaataaaaagggacatcacagctgggtgcttagtggtaacacatgacacacagagagaagaacacagttcattccatgcagtaacaattatataaaccgcatggcagaggctgtttcttgtcaggataaacagaaaggattggatcttaaaaaccccagcagaggctgtcacatgcccctggttagatctaatctcacctttccactgtcaagttcatagttaattactactgcctcttgtactttgtgttaatggtgaggaagccgccatctagctagcagctggattatactagtaaaagtacaggaaattttgcaggctcgcagatctagatctaccttcttctccaaattcccatcggtaaatgggcagttcggattgaccaatgctgaactactaatcccgtagaagataatggaaacttgcagagtatttacattggggttagaacttccatttgcagtgttggtcgttttacccgaaaagatagggtacatgcttctgcctttgcagtaaaaagatatgtttatgatgtgtatttaactagcatgtagaagtagaatgcttacatgagtgaacattctagcatgttcaaatacagtgattgacaagtgtacatgaacaaaatgaggagtaaagtctaatgataatttggttaccggttattaccaccagtaaaaattcacggatgattcttgttcataccttacagttctcatgaatcatcctgagattagtgttcattaacttgtaacaattcatcagcagcgaagctgcataactgcaaaagctaaccaagttatacatgaatggaagggaatggagggagagagagtcgtacttgcttaattactgataaaacaacaagtaaacaaataccaaagagtacaatcatttgtagggtgcacagtttccaaggttttcaccacatcatcacctagatctaccagcctaaacatgtttacccaattcatttattgtgtccttagcatatggcactgtcagtcttgttgacaaattcctgatcagttcatctattctcgtgatgcttgtgcatgcaattcatgacagtattttaaccagcgtttagttgaaaggcatctcaaagagccagcagtacatatcatttttttgacactagcagtatatatctttgatttcactaagcaaaagtgattaacctgtcacgtgaggcagtggactcttgagatacttgccgcgtgactgtatccaaccatcaataatattccaattcgtctgtagctcctcctagacatggtgtgctattgctactcatgtggctcatcttttgttagtgtggtgcaattacatgtaaataattcaaactgaaatgaaagggaagttttaagaacaaaagcaaagatcacacttataacagaaaggggggaaagaaaaggaagaaaggcaatcaaaatcagaaatattttaaagctaaactgcaacttgctagtaacaataataggcacaaagattgcattgtttaaaagaactgaaatggtgttagtgaggggaattgaggaggagggaatctaggcatgagatgtggggaggtggtagggcacatgcaggagtagaagacatgaagaatacaatagcacagggcctgcctaggataggcatcatgtgagaaggagatggtggaacaagtatacatagatgacagatatcatggggggaggtggccatctgtttaactccagtgctccaggaaactaagggcatgaatcatgatagacaagtttttttttttggatgaaaaatgatttttctttttgttgaaaacgcaggaggaccacacttcatttcattaagaagaagaaaaaacacacttacacaggagagaccaatttgatgaaaaatgataaggaagctattagcaataaacaagtggaattagtgccttaagtggtgcttcgtactctcgtgatgagcaatgcacaaaaaagaacagccatggaggtacagggtggggcggctaacaatatgcaatttcttgtctttacaaaaaagaaatgtgtttttttgtcgcttggtgaggcaaagacttaagcagacaaacagactcacctagtccattgtacaactccacattccaaagaggatatgaagataagaacagagaaaacacaattggttgctatgtgtgattgtgtgatgatctggatttttcatagaagtgttgaagtgcagttttgctacataggttaattttcacttcatctccaaatggttacctgatgaaatatttctcaacacaaatgcatctgccactggaagctaaaatcgtaaacctctcccaagaatatggtttcctactgaaatcatgaatgactcaatgaacgaaacagtttacctgccaacagagaaacttagaaggtttagtattagtttaaacatatactccctccattctcttttctttattttataaattttctaagtcctgtcatgtttgaggataatgccattaccagttaaatcgaagttgcagaaatgaaagaaccttcaggtatgaagcagagatttttcttttggatatctcattaacaaatgcgtgatacaaattttgtttatgtgtaccaaaatttcacataaatacatagcatgtgcttcatcaagactattacatatgaaacttggtcaacactaacatcatgaggtaggtattttttaaatcacagtttcatgtattagcatcacagtgtttccatcaacaagttggcaaataaggagctttactacttttgcagttatcaattactccaataaaactttcaattagtaacatggtgaatcaatcaatacaaagctctcagggggtggacttgtagaccacacaaaaatcaatcagttctttagtgcatactgtgaaatgattagattcaaatatagaactggtagggggtcaattaacacacccaaactataatctttagctattatttaattgacaaagataatatagttctttagagaaccatcttgggggcagtgcccgggttttgagggtagtggaattaagtcctttgatctctttcggctctaagcagcaattaaaccaaaagtactcatataagcacaccatagctgttaccatctacctctactttctgacctcatcaccttttatcatgtgcacctaattatacagtatattcgtttcttgttcatcatcagcttaaaccttctcctgaaattttcaaattattaatggttcccaagaaagattagctttgcttttcactgcactcctgttccattgtaaagaggttacttgtggaatttgctaactacatatgaagttaaatgttcctgaatgatcatatgaatttatatcgaaactgtgtggtgacaaaagtcttttgcactcaaccagtgtcaaataaaacgcatcacacttttctttgatatactactttcattaaatcctaagtttgtacttactacattcatttccaatatcaccttatgttactttcaggagtgaggttccatggtcaaatcaaatgacatcaagacatagaacaatgaagcaaaaatccaaggtgcaatgcttccaaaacagatgctatagcatctttgcattgaaattacaaattgaaagggaatgcaactacagtaaaattgacctaagaactcatgatcaagaaccaataggtaggagagaatccacgtgcattacaggaacacataaatacaaataagtggattcccatttttccatcgcttgaattggatagataaatcacccaggacaactaatcaaataccgcaccagctaatccaaaatagaaaattgaaataattcagtttacgggaagcattacaatcaccaaatgtgacttcttattattatacaaattgtaaaactgtgtgggaaggattgcatcatctcatagtgatcccttcctcaatttaagggaactgctacattgcattaattgtatagcaacaaaaaagaagcaaaaaaggctcaaaagctcaagggcacttacatttggacggtgtaaaaagacagagaactatggcagtaagctatgatccaaaaatacagacaaaaatgaagtcaagttagctttttgcaagtccaaggaaaaactgtgtagtatgtcatggcacaaaaagacataccaaaatgatgtcaccattttgtttctctaaacactaattcataaggaagttgttttctgtagctcaatgtatggacctttttacacggatagttcaccaactttatgccatgaatcttagccaagattatttcaacaaaagtagagtctggtgagaatacagtataccacagtccacatataaaattagttttggtaaaaactattgttctcttcagcacggccactaattgcacagcaattgcagagcaacaaggaccagaaactttcacatcgatcttccatcagtttgtttcacaggcataactcttcagcacttatattatgtgatgtcaccatcattctcatatttatagggaaaacgttcagcaaaggtaaatttccaaatacttaagtgctaagacaaaagaatggtctcactgcaaaaagaagaaaagacaaaagcatggtttcaaacggtacattctaatttatttccggaaggaggccccgaatgttaaaaccaaaaaattgtacatttggcactaaatggtgagcccattaacaacggaacaagggccactttcatcttctcacatgggcaaacagcacattgactgaaagtgatagcacgaagtagaactataattgaggaacttactgatacagaaggaattgaggcaaatttcataacaatttgtagaaacaaaaacttcttgaaaaaaatgaagggatcttcatgattctcaaatagatatactgcgattaccattttccctatcaaatcaaatacttttacattattacaataaacacttcaactaagaataaccaaaatcttcttcattagaaaaaggagaacatcaccacacgtaccatttcataacaaaataccacttacaacaatagaagaagatttcagaatggtataacaaataacatgttatggccatataaattttgttcctgttttatatagaaataattgtgccaaaatcaaaccacctagaaaacttctttacttaggtttaagcacatagctgaatagttttgcttttaatgtccgaatcataaatattttggggtttcaaaaaaaaaaagaatcataaacatttcatgaagatttccttttttcctgaacacatttttctccaacatggttttcaatcaaattggattcatcacgaaatttcctcttccttcatgctgcactcttgaaaaatgcacagcaagtagcagtttcaaaaatagcatcagcgtgatacaatatccagaagaaacacaaaggccatcacagggaataagaaagcgagtgcattgcatatgcttcctgctttatccatataataggaactccttttttcagcagcctattagacaatgtttttgcctatcatacggatacaaaacaaaagatatgaaataaagttgaatggaacaggatgtgcagaggatacaacacaaaagacatgaaacaaagttgaataaacaggatgtgcagcaaagcggagatgcacaacaagtgaatcagacagaaaatgcagatgcacaagtgtatcagacagaaaatacagatgcatacatgctaaccaaaaccaaattgagaactaagatgaacatttttggctaatgctgtattttgccaattacagtacaagttcataacccctgagaccattcaggcaagacagaatggaaaagacgacacatcacctcttttgcaggaacagtgttcatgatgaaaaattgaaaaccactagttaattagactaagctactacctgtgatctgtgtaatggaacagcaagcaagcaagcacctccagttcatcagaactccaattcccaggcagctctctatatatatatcactatatcagaatctggtgaagcctctgaatcatgctgtaattgcacagtcaaaaagatcatacaagctatgatgatcgaagaattgactgaacgaatgatggtaccttaatcttaaagcacactccaaatgacacacaactaatgaacaaaaccagcgtgaaaaaaaaaataatcagaaaccccttctcgttttctctgcataaccagtagcgggaggacgagatcccgcgctcgcgctcgcgcgatgaaccattcccctttcgctaactcatgcagtgctacgactacgagtgatttcccccatcccgcgacgcgcaaagcggagtgatggtcggagtcggagaagacgagcacaaagagagggaggagcgtgttgggatccgaacctcgcggcgacgacgacggagcggcgatcggcggcgctcccgccggcgtcgaaccggcggcggcccgcgccacccaccctacccgcggtcgccgccgccgcgccggcgagcctcgcctccctgctgggccggatcgggccgatgctatgctggtctactcataatgggccgaaacaggtgggacccactcttaaatgggccgaatcttctccggcccaacgaactcccaagcggaggactagtcgtgtactccaagtcgtaagtcgtctcctccagtgaagaaaaataaaattaaataaaattaaaaaatattttattttattttatttttaatttgaagcccaactttaatttccttcctaaccaagcagtcaagcacttcattcaccttgctcccctccgcaagccgccgccgcagcaactccggcgaaatccccggccgccgccgccgccgcccgccgccgcgatgaacgcgtcgcagttcatggacaaacagatcctcggcctcgcggcctcgggcgccggtgcggccgccgccgccgccgccgcgtcgtcgtcccctcccgcggcgggaggaggtgggggcggcgggctgttcgatctgatgagccccgacccgcaggaggacggcggcggccacgcgcgccgcgggcagcagcaacacggcggcgccgacgaggtggtgcccagctacgacttccagcccatccgcgccgctcccgccgccgcggcgccggcctccgcggcgagcccttgggggtcgctcgactccaaggcggcgtcctccaacctcaaggtatcatctcccagccgagggcgcctccgatagatctgctcagctcgcctcgcctcgcctgcttcacacacgaattgaacaagcgaaatttccaaacattcgtaagcttgtgtgcttttcttagccataggaatgtccagttctaggtgattggtaatactttgtgactctgcgctgtagtgatgtcgaattgattgtgtgaagttgtgattgctcgtttgctattacatgattcagatatagaaaggaaagtgacattttagtattcgatgttggtgaagattgatgccttatctgctcataaaggggagaccacagtgctagttaggatactactagttagcttgatttctacatttagcagttcaatgctatttctgtggaaataaccctgagcccctgactgtaatcaccactgtattacgatactgagcagttcaatcagtttgttttcctaaaaccatttgaggatattttcagatgctactctgttatgggtaaatcatgctcttatcccaagaggcaaagacccgaatatgtcaagtgttcactttgctaggcttatacccttgtcagggaacgatggatatttgccagcattgttttaattttgtgattctaatactttatcaatggccctgatttgttttgattcctttatttagttggttctgattgttcaagcctttaaggtctaggttagatagtttggcactttgcccaaataagaaaaaagaactatcgtgaaaaatatgtaggttttatatgatattttttatttggcaattttgtgaatttctgatttaggtaatatagcaatacaatttgttgccaactcatcaatcattaacatggacaataattacatgtatcttttcatcccaagtccagcaaattacctaattttttgatactttgattcatggtcatttatcaattcatacaagtgatctgcctctcttcccttgtgatatattgcttaacatgtttatcctctctcattgtgcaaagagtgctggcatgttggagtctcatgtgctcaagaaggtcagtcacgaagaagaaaggggcaacttcagtgcagtctccatagcagatattgatcgcacaatgaagaaatatgctgataacctgctacatgcactggaaagtgtaagctcaaggctatcacagctagagggcagaacacaccatcttgagaactctgttggtgagttgaagctaataattggtaactacaatggcagcactgatggaaaactgagacaatttgagaacacactgcgtgaggtaagcttccctctcttttactgttagacaatatgctgtaatatctgaattggtaaccaatttatggatttgattatcaagaggtaaagtaagtaaccaatttatggatttgattatcaagaggtaaagtaatttagttttctattgagtaacagtagtcttttctttaccttcccatgtgaaatgctgctatttttatttttatccttttgagagaaaaaagctgaagccagtattctaagtttttgtcttcttttttgtgtatttatatgaatagtaaaatgtacagcttctactttaccctgtcttggcttatttgattattaatggtccatagcttcacatgccctagctgggttgcgacattggttatagttactatttgtgatttaaaggacaataacatgagcagggagctaatatgtaccttaactgagtttattctttaactataagtatatgcagtttgcctggtgttgtagtctttaagttgtgatataattgtcttgaacattactaaaaactgcttatttggttctaatttgtattaatttgttttataccattgtgagggcatcccgtatcttactatggcatgtgctacgtgtaggttcaagctggtgtgcagattttgcgtgacaagcaagaaattgttgagacacaggtccaactttcaaagctccaattgtcaaaagcagaggatgctcaatcagaaaaggctggtgttggtcaggcagattcaaggcagcagccaactctaccccaacctcagcatcaagcccctccgccttcccatccaccggcattgcctgcccttcctgctccaaatgcaccacctccacctgcaccccaaagccaacctccatcacaattcccaggccatttaccacattcccaggtgcaatcagtcccacctgctccaccgactccattagcaccaaccataccacaggagtcctactatcccccgtcagcagtacagccaactgacaccacacaccagcagtatcaagctccacccgccccacagtcgcaggcacctccagcaccaccacagcattatcaaacaccacctcagtatgctcagtattctcagcctcctcctgcaagtgctaacccctcaactgcagtcccaccgtcagtgcatcagcagcctgaagaagtagcagcgccgtatggccctcctcctcagagctatcccccaaatgtgcgcctgccatctccttatgtgccaccacctagcgggcctgcacctcctttctatggtccaaaccctggcatgtatgagcctccagcagtccggccaaactccgggccacctccatcctacaatactggatacaaaccacagggtggaggcggtttccccgagccatatggttacagtggatctccatctcaccgtggcaatgctggaatgaagtcgccctcgccgtttcatccaacaggctctgcgggaagcggcaactacagcaggctccctacagctcaaatgctgccccaagccgcgtcagcgagctccaccccaagcgcctcctcgggcaacagggtgccgattgatgacgtggtagacaaggttgccacgatggggttctcgagggagcaggtgagagcggccgttcgccagctgaccgagagcggtcagaacgtcgacctgaacatggtgcttgataaggtgatgaacggcgccgacgcccagccccagagaggctggcacgggcgttaaaagctcagctgctatccagggccatgaagcgctctcccatcaacctgtgcatatcactgaacatccaatccacggagtcattttgtgcattcgcgtgaacgtcagattcggaattcatattgtcgatttggtggggaacagaccaggtctgctcgatttgctgttggtgatcttacagcaagtgttctttatctctttgattcgcctggtgttggttggtactagcagtagtactaaaacttggtatctgatctccaaaaacgagtttttctagagatggtgttatggttgttatccactgatgatatgttaatgattcacgggctgcactgttctgtttaactagtcacgctgctaagctgccttccagtttccagaaacacattctgccggactgatgattgattacccgatattgtgttgtgatagcgtacgttgtgatgagtcgctgggagagctgtttgttgtctgcccaagacggacagctcgggacgaaatacactgaagcagaagggaaatttcgataatcgaaatcgtctcgaaactttggaacgacatttcgagaacacaacagaaatttaagaaaatttggctagcatatgcagcatgcttgatgcggatgcatctgatctccatccaagctgtcttccccggccggatcgatctctcaccacgaccttggcttcgaggtggtaaggttgtttcccaccgaaaaatttcggatatttcggaaaccctctcgaattatatcaagacaatcgaaatttcggaaatatagttcccaccgaaatatcggatatttcggaaaccctctcgaaatacaatcgaaatttcggaaatttagcgcctacggtttcccaccgaaaatttcggatatttcggaaaccctctcggaaatatacaaccgaaatttcggaaatttagtgcctagggttgcgttgatccctcactttgccgccccaacctcgccatctatctataagcagcctggccgccgacggcggtggtcgacggcgacgccgtcaccaagcacaagcgctccaacgccggcgccggaccgggcgacgaggatccatggcgccgccgccgccgccagcgaagaggagggatatatatacgttcgtgaatctttgacgaagaggctggaccggcccgatcatcgccgaggtcttggggaaagatccacactcgcccattgcttgacggccagcctattcccaacgaaaggctggaatctctctcgaatgcgacgcttggaatctttggatagataaattatggacttggatatgcgttcttcgacttcgtcgaccagcaccgcgccaatgggatcgacgacgagggggttagcggctcgatcgccgccggcgacgacgaagacgacggcgaagagaggaaaggactatgtgggccggccggtgtggcggtgccagcagtaactgacatcaagcgcgtgtgtagatgaatggagacaaagttatacgcgtattactcaaacaaatccacgagagaaattttgggaattttcgaacaggatttatattcaagcaaattctatataatcaaacatgaaatttagtgcagtgttttcgattcaggcaaagcaaattttgcttgcttgcttgcttttgttctagtacactacaccactctgcaatgcatatatcatgcacgcacggagattttaattaagcttctctaaatttctgagcccaccgaaatttcgggaatttcaagatcctctcggaaatttcgaaagatatttgtcatactttcggaaatttcgggaatatcgcaatcctcgcgaacgaaatatccaacagaaatcgaaatttcagaaattccgcgccgaagaactagcttgcgcgcgcgagtgattctgccgccggccgccgcagacggaactcctcgatgctgctctcgtgtttccaccggcgggccggccggctcggacgccggcggcggcggcggcgagcatcagaacctcaccgtcactataccacgaaacagcccgatgtaccacgaacttgatccacgagcactagcagaatctcaccgtcactataacaagggtgggttctttccctagttttctcggcttctactctctcgtttttcacatgcaatgcttcctaaagtgctaaatgatgtgttttttaaaaaaaattcaatatgaaagttactttataaaattatattaatccagtaattttaagctactacttactacatccgttctaaaatgtgatttgtaccaaaatgaagctattttttcacctgccctcttatctcaaccaatcgcaaccattctcttctccaccaatcataacccttctttaattatctatacctactttcttaatatctgtgcctacctaaaaaatgtttatattatgggatggaggaagtatttgggtgtagctcaattctattttttttttttgagaaaattgtaatccttaatttgtataggcaaattagctcaaaggatacactcactaattactatgaaaaatttaattacaagcttgttacaagcccaaggcgcgaacacagggcgtctctatcctttccattaaattaagtttagaatttaagtgtgtgcttcatatgtatccaaacttatatgaacgttagtgaaactagataatgaatggagataccaaaacgtcttataatatagaacaaaagaataataatatttataaaatatctactattatcgatacctatatgcatgttaaaaaaaatgcttaggataagattttatttaacttttaaaactctaacaaataatgacttctcaaatacttagttttcaaaatataaacaaaaggtatgttcgtggaatagtcttgaaaagtacgataataacagcgtaactttggaatgtttcataaatttctatattctaacataaaaatcgatggtcaaattaaagttttaaaatttcggccagccttatcctaaaggttatttaggagagtggatatacagtgtaagcgccagtattaggtgacatcgaccactttcgataaaatttatggttaaactacttatcaacatattataacattatggtttaagtataattagtacactatgacactgataggcacgttatgacatcaagaatattttttttggcccgccactatatatttatgaaaaaaaaagagtactagtttcctttcctggtttttccaaagagcggtcaggcgcataaaaggaagttctcgtttctcaagagtaggaaaaaagaaaggaggattttgaaactctatggacacatggaaaggctaatgggcgggtgatcgctcccctacccgcccaccctctcccccgtactactagatgtactcctctctcttctcccccttcctcctctccttctcctctttctactgcagtagaccacataaaaatttttgaaaaacaaaagttagaaaaatttatgtataaaaatattatatataaaaatttgaattcaaatttaaatttgaatcgggtatgtaaacttgcgacttataaactttgggtctataaactttaggtgtataaactttagatgtatagaaatactatatatagaaaatatttgaattcaaattcaaatttgaatcagatataattcaaattcaattttgaatcgggtatataaactttaggtctataaactttaggtgtataaactttagatgtatagaaatactatatatgaaaaatatttgaattcaaattcaaatttgaatcagatatttgaattcaaattcaaatttgaaacgggtatataaacttttaacttataaactttaggtctataaactttagatgtacagaaatactatatataaaaaaatatttgaattcaaatttaaatttgaatcggatatataaacttttaacttataaacttttggtctctaaactttagatgtgtaaactttaggtgtataaactttaggtgtataaatttactaaaataggaaagtaatgcggtgccaaaaaaggaaaccaggtgaagggagagaggggggaggtggggagcgaatctgatcgctaccccatccccacggcgatcgatcgcccattagaggtacccatggacacaatgcatgggatatatatatggaaatgaacatgcatgagataatccaagctctttgcggttgctgatgtggatgatgagcctgaatgttgacacaattaatggcactgtcagcgattattccacagctgaaatatctttaaacagttcaaaatatgatcaactaaggccctgtttctttcagcttgggattattataatccaaattattgggagtaagctgaaagaaacagacaacttattgaagtagcttattataatctggagcctagcttattataatctgataaactcatttaggtgagctttttccagattattgggtaaaaaattacccaccatgccaccccactccctctttagacttacaaacccaataatctaggctctaataatttaggaaagaaacaactaaccgcttatgctactacagattataacaatctagtttatagtaatctgactcaataatctagattataataatcccaagctgaaagaaacagggcctgaatacattcaaagtaatcctataaattatttcacgaacgcaaaaaaaaagaaaagaaattacacgtcattctattagaagaagtaaattaaggaaattaagtttttacacgacgcacagccatatcgcccaaccatctactctcccaaatcaagctcctacactacaataaaaatgctttgtagagacatttttctagtactatagaggtacttatcaaatgactttacaacaatgtagaggcattttaaaaaatgtctaataagtgtcttatggtgaattgtctctacaaacgaaaagacattttataaaatgtctataagatggtagaggcattttctagagacattaaattgtaccgcaaacatataaaaccaatccaaaaaagataataaaatagtttccttggttttgacaagtgttgaactcatgatctcttgattcaatcattttaatcttcaatacactaaccaactcaactccatgtcattacttgtatgcttggtcctctagttatttatatttagtcctttagtacatattatcattctaaaaagtgtctctacatagtttaaaatgtctcaacgaaatgcctttatatattagacgcattttatagtgccgaaagaatgcctctacgagataaaatctaacaaactgatctaaaaatgtctctagagtaaaagttttctaggcaatttttaaagtgcctctataaagtgtctctacactataaaacttctgattttagaagcaatttgcaaaacgtctctacaaaagtgcctctatacgaggtttttgttgtagtgagctagaagaactagatgcaattaaaatacaaaaacaaattaaaattaagtagcagattacccagccgcgcgtattttcattcacctaattaattaatcgcaagccagaaaatcacaacacatatatacttaattatgatccatattgatatccaaccagccacaaactcacaaattaaagtctcacaacacaacatcgaaattttaagagtcgatccaaaattatatagagttttggactaatattaaccaaagcacattaccatgcatgcaccccagatcgatatctagaaccgaacttgatgaagcaaccaaagacgacgacgataactaattaagcttgatcttaatcctcgcaacttaactgaccatctcatcgtcgacatcgatcaagattcaagatcaagccctagctggggcgagctcgctcgctcgatcgaccgatcagttcatggcggcgaggcggtcgacgaagatggcgaacgcctcgtcggtgtcgagcatgctgatcctgaccaccctcccgtcggcgccgaacttgccgccgccgcggctgatgatcttgcgctcgcgcaggtacccctccaggtcgtccaccccttccttcccgcagcgcagccacgcgaacgctgcacccaaatcaaatcacatcatcaatggcgatcgatcgaacacaaacatgtcagcaatggcgatgcgatcgagcttcgtgtgtgtgtccgtacgggggtaggcggagacggtctcgttggcgaaggtgcagtggccggggagctcgtcggggagggtgaagatgccggaggcggcgacggcggcgcggagcttggcccagcgagagaccatcttgcggcgggcgaagtggaacagtcggctcgagtcgtcgtcgtcgtcgccggcggcgggcgcgcggtcgtagccgtcggtgatggccttgaggatcttggcggcgcggagctgcgagtccttggagacgccgatggtgttgagctcgatgaacttgctcatcttctgcgccaccgccctgtccttcaccagcgcccacctgtgccaaaaaaagccaatcacattgagccaaaatttgttcgaatttcaaaagtattcgtacgatgaaatttgtgtgtacgtacccgaggcgggtgccggcgtggccggtgcacttggagacggtgaagagcatgatgtcatgggcggcggcgctggtgatgggggtgtactgcggccagtagtaggcgaggtcgtggacggcgacgccgtcgccggacttgagcacggcctcgcggatgccgccgtccgggttgctcggcgagcagacgagctcgacgtaggtgtcgccgtcgaacatcttggcgtcgccggcccacctgtacagccccgacttgaggaaatccgtcaccgccgggtacgactgcgccccgccacgccgcatccacacaacacaaaagatatattgtgtcaaacaaaaataaagattaaatcatgtcaagatcaatcgtacttcctccgttttacaatgtaagtcattctaatatttcccacagttcattaacattcatacttccttctagatagatatatgtctagattcattaacatcaatatgaatgtaggaaatgttagaatgacttacattgtgaaacggagggagtatttaactttaccatttctatcatttcgagttggtaatatcagtctatcttgttgatgtatttcttttaaaaaaaatcgcaacaacttagatgatatgcgaactatgagagaatgtcacctctcgagagtttagaatagtttccctatcaagatcaatcagaaaagagtaattttactatatttgagaatgtagttagaggtatcacatttactagcataaaacttatatttgtacttatcaatttttaatgtgaaatttaattaggtacttctcaaaacttttaatgtgaaatttaggtatctcaagacactttctcgaggaagaaattttacggatactgagaaaatacctcgtagtacctaagttttacactagaaataagaattttggtaccaagttttataaaataaaacttggcacctccatgtactttcttaaagatattaaataaatctacctttctcaaggacactaaaatttctaatgagaaaacgaaaaactacctttttcaaggatgaagataccactagaaaacatggcatctccaagtacttttccaaaaatgataaaactacatttttcaagaactgtaaaatttctcatctggaaaaggaaaaaacaaatttgattgcaagtgatgaaatcggattgataaattacggagtagtatggtgcgggggagacgacgttcatgggggcggaggggcccggcggcgagagggcgtagagcgcggcctggaagagctgggtggatccggtgccgacgagcacgtggtagccgtcggcgacggcgttgccgacgaggcggtggaggcggcgcacctcccgctccaacccgggctccaggaaccagcacaggctgcccacgtcggagaagtagctcatcgtctgccaccccgggatcacgatcgtcgccctctccccggcgccgccgcgccagaacgcctcgtacatcgtcgggtcgccgctgcgccgccatcaccacaaagagatcaagatcggaacaaaactcactcgccacgccacgccgcgccacgccgcgccgcgtcgcgacgcgaggcgtcacgtgtacagtgccatgcatggacgaacaggtggtcgagatcgatcgatcgatccatcgatccaccggcggcggatcagacgagaacacttactggtcgaggttgatgattgagtccttggtcaccggcggcttcccggaggacggcgcgacctccgcctccgccttcttcctcaccgcggcggcgtcgtcaccgccgaagtatctccggcggaggtagaacgcgagcgcggcgaggttgaacgccacggaggcgaccaccccgagcctcccagcctgcgccgccatcccgccaccgccgccgccgccatccttgctgcccatcgccgccatgaccaactcacactcactctcccttctcctctctatttatagataggggaagtggttggagactggagctgagataggggtcccctatttatatctaaatcgcgtacacgtttcttcctatttttagcaagcacggcgtcgccggcgccggaatatttcctccgccggcgccgacaaggctaccggcggcggcggcggcggccggaggagatctcgccggcgagggagcacgtggggggagcgagcggtttcgatcgagatcacgaggagcatggagagtttgttcgatttgtttggttgccccggattaaggaaagaaaagaactccatcgatcgttaaacctcggtgattaaggttaatgacagtgcgcatcatgcaataatgacatgtgtacttgatttatttggaaattttaaaattggaaattagagttggtgtaaaaagtatatatagaaactggttttatttggaaaattggaatgcaggcacagtcatgcaaccggggttaattaattggatcttgttgagtgctaacctgtgttagaggcgatgactgcatgcatgcttttgtttggaacttttctttatttagattagcatatgactcagatctattcgcgtggataagtacaattgccatattttaacttaggcccttattatatatagagtaaatttcacaaaactacatatatattgaccaaattatcacaaaactacatatttaaggagttatatcacaaaactacacatttagcaccaaatttatcacaaaactgcagattttaggttaagtatcacaaaaatgcatatttaatattgaacttatcacaaaactacaacttttggagtttaaatccctagcaccattgttatggtggagctataaacattattactttgtgattaaattggttctaaacctgtagttttatgataatttagttactaaacgtgtagttttgtgacacttcatcttaaatgtggagttttgtgataaatttagtgctaaatatgtagttttgtgatacaactcctcaaatctgtagttttatgatagtttggtcatagtatctgtagttttgtgaaatttactcttatatatatatattggaagaagaaattaaaatagctgcatatgcaagaacaatatacagagaaaactctattaatttgatctccctgaaagattatgcatattattgttatagaaacattagttatttttttcttgatgaaatttatatatcgaatcttagacgtcgattgatcatatcaacaacttacatttgcttgggtcattagttttttttttacgaggagcagaggtagagttgcataatatgttgaaaagaaacacgtgagtatatctataaacggtttatagttaaatagatatagtgaaaaccgacaaacggatgtcgccttgcgcattttccataattggaaagaatgatatgttttggttgggtacgcgtttaacgttttgtatattggaaagtaacctatattataaggtggtgtgtgtgatatccttaaactatactaaaatagattgacaacctccatcgaaagcgacaaaaaaaccgttccacaatttcaaatacaacaaaagcgcgggaaagaatagaaagagtgtgcttactcttacatcctgtaattataagacctctacatgtatggtctcatccctatgcaaataaccttgggtggtttttccatcggttcagtgatgctagcaaccatcaatgaaatatttttattttgacaatgcatttagcaatatatatatatatatagtctggcacccaattatctactaagatatatgggataatggttttgtttgttcaaggaataaatatccaatatggagtgataaagcaggtaaagacattgcacattgcgtgacataatttatacaagcttccaaacaaaacaaagtgtaatcatctttcagcataacaccaccacttaaatatacacgtgttatacaaaacatcaaatgtacccaagaagagtctgaaacgaaacgatataaagtactattgtgggataagtccatttgacaattctaaactcttcactttatctaaaactcacccctaaacatcaaaaacacgtatttgacaacaccctcgccccttgtccaaacaaaaaatggttggttaaatattgctaagtgctaacctgttaggtggaaatgactgcatgttttttttataacttttcctaataagctattcgttagattaattagtatggattggttagactcgatatatttgcatggataagtacacttgcttcttttaacttagcctcattggaagaagaaaatagctgcaagagcaatacttaggaaaactattttgatctctcgagcactagaaatatattgttgttaagaaacatgagttaaatttttcttaatgaaacatctagaatcttagatgtctattgatcagattaaataacataaattggcttgggtcattagttgtttttactttttacaaggaagagcagggttagagttgtaaaatatattttaaaaaaatgagcatgtgcatatatctatgagcgggtcatatagttaaagcagatatggtttggcggttcatatagttaaagcaggtatagcgcaaatcgacaaatggcgggtgttgttcatgcactttccgtaattggaaagaatgatgtccttagttggggagttgcacgttcgttgcattatgcgtttttaacattttgtatattagaaagtaacctaaattatgagattgtgtgcgtttgatatcattatattatactagagtcacttgacaaccccgttgaaagcgacaaaaaaaccgtaccacaatttcaaatagaacaaaatcataggaaaagaaaaaaaagaagagtatgcttactcttgcatcttataattataagatctctgtatatatggtttcatccctatgcaaataccccttaagcacttttaccatcggttttcagtgatgctagcaaccacctatgaaataattttatttttaaaatgcaagtagcaacatatgaactgaaatgtctggcaccagattatccaccaagatgggaatttatggtttaatttgtttattcaacgaaaataaatagtaaattgcacattgcacattgcgtggcataatttacataagttgtaacaaaacaagcgtaaagcatctttgagcataacaccactacctaaatgtacacgtgtcatagaaacatcaatctgtacagcagaagagtgtgaaatgataaagtacgtttgtcacacccacaactgtacatatcacactttccctgatcctcggcctttcttttccatcaaatctagctagctaaattctaagcttataatgatcaaaacatggtgttggtggggaagcaccgatgttatgcacatatgcgtcttccatgtaatcgaaaagatcacggtgtttgcgctcttaaaaaatcaaatgaaaacggatctctggttccagattttcagatgttgtgtgcgtatacgtcttccatgtatcaaaaagattattatgtttgtgcttttaaaaaatcaaatgaaaaagtctctttggttccggattttcagtccaaagttcatgaacattatattacatgttgaatgaagtatttaatttatagaaaaaggtctcaatacaccaaaacttaaagttggtcccgtttgtcgatgcttattaactatgcatacaagttaaaataaaattataagtttcacaaaaacaaactactttttatttggacagttttaaagccaaaagccatatatgagagcagcttttttcgctggcgttattatgcgtaaagattgcttatgcttgcagttttgtacttttgcataactcaaaagtcaaaggcatatacttggtgaggttgcttctcgcgtttcaaatttcttaatttttggcagatagcagctggccagatttttgtgttggtaatccaaaatgatgtaataaataactaataaaacaagatgaaggcagggagaaatccctccactacgaatttaaagttacaactaggtcacatccggtgggaaatgactcattcctaagaaatttatacatttcagttaagcttactgatgtagaaaagccaacaaaaaaaagactaacccctaatatgtgcaaaaattacgcctaattcggaatgaaatagcctatgctgattaaccttgctagtgagaaatgttactagagagaacagtacgcattgaacttagtcagaccatctagatataaactgagatgatggtatgacccaccatgaagctcaggtgtttggagttcttcacaaagatttgctggccttcagaaacaggtgatattccttgagcatcatctccccgccatttacagggtcaaagctgtatctgtagaaactgaatgtgccaaaaaattgttgttgtaattagtcgaaaatatttctcagaagacaaacccatgacaatgcaatattcagcaaataattaatacatcatcaaaatctaaataaggtttatgctagtattgcacggactacttcagtccaacctacttaactgatgctatcccctgtctaactacacaatgctatggcattttaaacaataatcccaataaaatataatccaaaagaagtacatataggaaggcagaagttacagatccagattgacttgaacgagcatgattgctcaataaaaaaacaaagaaagaaacagggaactgcttacattgcatatttcttttgttattttaatttgagtagcaaattgccaaaaataaaaagttatggtgtgcacaatcatcgtttgaagaatctgcagactggatcttttcaatcccttttagcaatatgaattaattcccaacatgcttatcagattttaccaaagaatattgacattattttgcttagacatacatttcttgggggacgtttgaatttagtaagcatgtgagtttcaccgacaagaaggccccacatgtcactgatagaggtggtggccatcaccgctactaccttttaaagtagtatagatagtctttgagatgtgacttttatcattacatttttaactttacatcactggaatttatataggttgcaatatgacaaaagtaattcttcgtgacaaaatctagctttgataaaagttattccgagttttcacatatctagctttggcagttttaaatatttttaaaacttggaatgttagaacaaaagtaaaacaccatgtttgtaaactaaacaaaatgtctaaaacccatttcttaattatcctctgttgtcttttgtaaagaaagagtacctgccatcaagaccgatcatcattacagtgtcttgatctccaaatgccataatataccgcgtgatttctggtaaacggaactgagcaaaagaccattctgaactgaagtatttcggcagaatccctgtaaattttcaatgtatataaggaatttgaacaggaaatacagatggaagagcaaaaaatatgtattgtcaacccccatgcagaagataaaattgagtttcttttctctatcggctcgactttaaactctcaaagcccacatgccaatatagttaacaaagaaatagttttgttctttgtgtagtgtatatgaaacaccccctatagtaatggttggcaaactgtagcaaagtatggctagcaaccaaacaccccctaaagtaaacaaatgaaatgggatcgtaatttgtaaagttgtcgcggccatgttaatggtatcatggtattagcacacaagaaggggactgtaccgcattaccaattagaatcacagtaccgagcataaaagaagctatcaactttgttatgagctataagatgctaaatacatacatgtcccagaactgagacaacacaagttttctatgtaaaatgcttttgcaaggaagtttcaccaaaaaaaaaaaaaactagtgaagacaatatttgaataactgacaatactgtattttaaaattgattgaaatattacaaagagataacttactagcccataagattcaaaccttaatcaactaacctttcatgaaagacagggatgagctcgtattggatccaatctttgtttgtgtaactggaaccgtagaaccatagttgcaattgtcattcacctgtgcacctgcagttgcagactcccccttttttgcatcctcctctgcatctttcaccctcagactgaagacatgcaccgttcctttgtcactggagactgctagccactgcacatttggtgacagtgcaatgctatatatctcagctctgtcaagtcctctccgcacctaaatagcaagacgagtacattactgtttttttttttgaaggtaagtacattactggttactgctgaacatttgtaaattacatagactatagcaaggaaacatttatgatatccaaagacataacaatgatataacaaaagaaacaaaagattattttgcagcgcaaacaaaaaaagaaaaaaaaacagcctcacctcctgcacgcaggtgccgtccctagtgttgaatatcctgatcaaagtacccctgacactggcagtagccaagagtgttccatccaaggccattgtcatgcacgaaaggggcgagtcatgagcagcaatgaacctggtctccttcaacccgaaatgctcaatgagaacctgccccttggacgtcccagggcaggcgaaaacggaggcgtttgcgtgatgagacaggcagcacagcccattcgggttcgacaccgtcctagcctggtagaacagcctcaggtccttgaacctgtaaacattgatggtcttctcaagaacaaccacaaagtagtccttggacagcctgacggctcggatctcgcttgtgaagttgtacttgtggatgcggcgttcgttgtaatcgtcccagagctggagcatggtgggtgggaactcggtgttggactctgcacctgccaatccgaatatgctggtgcggaacagcatctcggcgattccaatccctccattggggccaaacatcctcctcatggtctcgtggaagggcttgcaactgaagaccctgaagccattggtggttgctgcaatgaagcagctgttgtcctggttccaagaaaccgacagcaactccaccccatcgtcatcactgccagatgcttcttcaacatggcccataggtgaaaaagactgaagattatggcacgcaagtgaggttaatcaccaagattctggcagcagaaattgcccccttcttttttcagaattcagagtgaaccaatcgctcctagaacagtagagtagaacggcttgttcagagcacaagaactgagcactgtcgaacaattatgctcctcaagaacctaaatcatatacatacagaaaacatcatcaagatgatagaaagctaaggaaagctatcatgtacatacagaaaacatcatcaagatgatagaaagctaaggaaaacgagcactaaatcaagcagagatggccctgaaatctaagatttgatctctataataaataacatcagttgcctctccaatactccatagtcaatccatacacgctaacaagtaacaagagattagaaccaatggcctcgccgcaagagcgcaaaaggcagggaaaaatcaaacgccgacggccgatcaacaccccgcaaaagaatcagccaaccgccaaacccagaggttaacacgacgggaatcaaacctaaccaagagagagagagagaggaagtaggggcacgtacctacctacctacctacctagctctttcccgcagccgtgggatcgggaatgcgggggcggcggcgcggtcgccggcggagttccggggagctcgagctatcggcggaggcagcgagcgggagtttgggcgggcgcgctcgcggtcgcggccatggtggagcgctagatgacgagcgatgccgttccgcttcggtgttcaactcgggtttgtttggcgtggtttcgtttcgtgttcgggttgtgggagttgtgatgtgatccgggttcacttcacacggctccatggaaatcggttcggatttcgcgaaattcaaaatttccttttatgagatcgaaaacacgaaccactcgatctttctctatccttcgataagtttgacaagaatagactggattttgattttttttttttacaaatttatgcaaatttcatcggtttttattggggttcagatttcgcaaaattcagattgttttcatgagattgaaaacacagaccactcgatttttcgataagttcaacaagattaaaatgaattttaattttttggtaaatttatgcagatttcattgatttttatcagggtttggatttcacgaaattcagttttttttatgagattgaaaacatgaaccactcgatttttcgataaagttcaacaagattaaactagattttaaaagttttgacaaatttatgcagatttcattgaattttatcggttaatcaatggatttcatgattttcatgagtgaattttgatctactatctggattataaaccttggtcgtgaccgtagttctttttttttgcgttgaaaccaagtatgtttacctggttccgtaccacttgttagcagaaacaaacaatttgtagataaatcttttatatacatattcttaataattcaaaactaaatgctgtaaaaattcacaaaatcagatttaaaatttaaattttggtttatacgcgtaaggataggcgaaacaatagcacacaaacaattcggcaggttaattacaggagtacatggcttctgaataagtaagtagaatgaaaaacgggaagatgaacattgctgatcagatatacacgatgcatccgatatttaagagtatgtatgcatagatgaaataagcagcaacggattagcgacacgaaagtcatctgatatatatttcagataaagatgttcaacacaagatagcttcagaccaggcaatatagcaccagacacttggtgattcagggttcaacaaagtgatatatgatcgagtctacaaacaaacaaaaaggtccgatatttcgtttcccacagatgataaggatagatatatctaagcggctgagaggaaggccttcccgggggcacgagcagagaggcgaccatggcaaccaagtagctgcaccatagagacagtattgacaaagattagattatccgcaacgatgcatacgagaacaattacaatagcaattgacaggtcataaaagcaaagcgaaaaaggattttaacaaaataagttactcatcctgataggacccaagataagcattagtttagaaacagcgtgtttaccttagcattgacaccatcaggcatgattctaccctcgctcttaagcctgacgtattcatcgcggctgaacttggtgaaacccctgaacaagaaagtgcaagttaggaacggaacatgagcttatggtactcagagcacatcagaaatttagatgtactcgtatgcatcaccctgtttgatacttaccactttctactctcaatgatcttttggcgaccagggaacttgaacttggcacgacggagggcttcgctggcatggacagcattgttgggcttgcaccgcacagaaaggaggacctggccaatatccaccctagcacaggttccctgtggcttcccaaaagcacccctcattccagtctggagcctatctgccccggcacacgaaagcatcttgttgatacggagcacatggaacgggtgaacccgaaccctgaggtggaaggcatcctttcctgcagacttggtcatgtacttgttgcacgcgatacgcgcagcctcaagagcctcactggtgacattctccttctcccaagagacgagatgcacacagtgggagaactcatccacacccttcttcttcatcccgacatcgtagatcctgatcttggggtcagggacaccacggcagtaccttgacttggggtacggcttgttcttgatctggcgatagcaccttgcaggtcctaaccaaagcaagccacaaagtcaagttagttactcagaaacaccctaaagcacctacagccccatcactgttaatctgaatactattcataactgatcgatgaacacgcaaatagtgaatatacaaagtcatgaaagaaactaaatccattacattaatctaaataatcataattgatcgatgaacaagaaaatagtggatatagaaatagccatgaagtaactaaatccattacagggattcgcttcaaacaacaaaaccaccacaaacaagccatttctagctaggataaatgcatctacatctgctagctacatcagaataaatcatttagattcacagagaaccactaatcatatcatactaccattatctgtgaaaatcaaagatcggtacagttcccccaacaatattcacatcctattaagtccaacatgactccttcaggttgagtaagcaaactaacgagatatgcaacgaaacaactacaaaatctatctacacctaaattcatcaaagcaaaacacagatcaacaccgggaacagcaacaatccagcagcgcccagctactatggatctaaaccaaacgcccaaaacgcgcctgaaatcagggagccgcggcgaccgatccagcgcaaccgtggaacaaacagcaagacaacgagcggtagagcaggaaatggttagacttactcctccccatggcggcggcggcgtgcgcgcggcggacggcggcgggaagaggcggggatgtgcggctagggttcggaggagcgcggcgcagaggcttatatagaggggaggggggctgtggggtttgcgtcacgcgtgaccgatggtggtgattgcgtgttgggcttgaggagcccatggaagcccattgcaattgggccacctcttcctgtcattatttttttttcttttcgttttttatgggagtggatattgctggtcagagtccactcgggtgtgttctcatgtttccaactcatttctgttttttcgtgcctacatttcggtgtgttttaaaatattttatagataaattactttaaaaatctatatgatcatttttagagttttttaatataatatttaattaattatacgctgattcatcctatcattttgaatatcagggtatggttcccaactcataccttctaatacagccaagtcatcagttgacagtaatatgttaattttttaaaaatatatatatgggttattcaagttttatttatttattaatgtgcattatataccttctaatatatgtctgtttagaacatatatatttaattcaaggtttcgatcatcgaagtgttttagttgtcttttaagtcaaagctctctaaggccctgtttgtttcagtttaagattattataatctagattatataactagattactataagctggattataataaaccgacatataataagctactagtttatttctctagattattatctgtttgttagttgttagctacccaataatctaaaaaaagcacctttagaatagcttaccagattatagttatctgacttatagattataataatctatcataataagctatctgtttgtttcagcttactcgtaataatccagattataataatcctaagctgaatcaaacggggcctaaattttgatgaaaaataaactaacacataccacatcaaattagtttctctttttgttagtgtatttatttggtatagtaggtgttaatttatttttataaagttagttaaagttagagagttgtatgcgagtgggccccacctatcaatggcacatgaagtcagaggagctccttctagtagctaggccctgtttagttcccacacagaaattttacaccctgtcacatcgaacgtttgaacacctgcatgaagtattaaatatatctaaaaaactaattgcacagattgcgactaagagtgtgtttagttcacgctaaaattgaaagtttgattgaaattggaacgatgtgacagaaaagttggaagtttatatgtgtatgaaagttttgatgtgatggaaaagttggaagtttgaataaaaagttgggaactaaaccagtcctaatttacaagacgaatattttaagcttaattgctccatgatttgacaatatggtgctatagtaaacatttgctaattatggattaattaggcttaataaatttgtctcgctgtttactgatggattctttaattagttttttattagtgcctgaacaccctatacgacatcctacataatacccgatgtgattaaaaatttacactcctagatctaaacatggccttagaccggaggatgtattggattaagttactcaaaatctcagacgaatccggaacaagttttgaaaaaaataaaaggagagtaatgttaatgaacaaaattaagtgcagcatagcttcggtttgtacacttatttcgtagcaaaaaatgttgacatctcgatgggaatagaaggttctgacttaaagggactctctggttcgggcgttcaatggtaggaggttaaaatcggacgctgatatcagcataacgtcagcgctcgactcacgtgcaaaactattttaaactgttttttctcttaaattacttatccaaatcatgatccgattgcaccattaaattcgttgcaattaaatcttcaaaacaagaccacacatagatatattccgactgaaaaattttagcttatcattgaattatttttaaatgttacatgatgtttcaccaggtatatcggaattgtttcactaagtagattgaaaatgtttcattcgtttaaatcgggtgttgtttcaccttatattaaaacaatgtttcagcaaacagagaaagaatgtttcagttcactgcaacattagatatgtacatagtgaaacattgtgagtacactaggtgaaacattttttgtggaacaaaaaaataaaacgaattcccttaatagagggttttcaaaatatatgggtgatttgttgcaatggaatatttcagttcactgcaacattagatctatacatagtaaaacattgtgagtgcactagatgatatttttttgtggaacaaaaaaaataaaccaaattcctttaatagagggttttcaaaatatgtgggtgatttattgcaatggagtatatggtgcggctacgcgtcagggaggggagcacctgatccgactcgcccgcgccggtcgcccggcgtataaaaacacgaaaagaagaatttttacgcaagaaaactgttacaggtataatcaacggtgtatagtcatcaggtattttggtctcactatattggattggatgtggatgtgtgcgtcactgccctcgtggattcgtggccaatctcgcgaagtcgcgatactttggcgtagaggcgcgcgcactccacaaattccgctgtgcacacgcgccaaaaaagaaaaaaaaaacaatttctggaggcggaggagccggtcgtccaaccgcgagtggtccgctccgaccgaagcggggtcgggtctggtcgagccacacgcggccgcggctgcgtctccgcgtcgccgtcgtcgtctccagaaacgcacgagccgagcggagaattccacgaaccgtctcctcctcctcctcatcctcttctccactgcccccgcacaaatcaactctactttccaaaacgcggcggcggcggcggatcaaaccctcatttggtgggattttttgctgcgtttaatcaaatcctctctctctcttcgaccgcggggagatccggggttcgattgtttcgtctcctcctccccctctcgtgcgggcgtcggaatcgatccacgccccgcccgctcgctcgctcgctcgctctgtgagcccaaggtagattcctcctgatccgtggccttcttctgcttcggctgtcgattcggcgtgctttcttggtttgcgacgttcatgggagggggtgttctactgttcttgggggttgggggaatggggagatatggttcttcatgtgtaccctactttgccttccattccattgggttccatggcgttgggatttcgatccttaaattgtggtagttgggagaagtagtactgtcattatgctttgtcttagtgaattatcgtatcggtgatagtttgtggaacaagaattactagcagagataatagagcagttctgggcattcctcgtgctcttaagagaggcagaattcgttatctgtcctttctttttttcggtgaattatcaatagggatgatttgccttcctagtctttattctgataggatcatcctatgctagaatgtctgcgagtttgttcacttgaatatatgatatcttgtcctatgcatttggtgtccattatcgcttatgatctattgttatgcctaactcagacttcaaccatgccttcctagattttagttttcttgcagtgctttcgtagttttagttgctctttttctgatagaccatgacatgcttttatcattgtttagaggacattttgctcagtgctgtgctagctttgttggctcaagttcacaatgggaggttgtgtgggcaaggtgagtcttccaaaaccataattgatatttagcggttcatcatggctgttcaatttaccacatatattgatttgtgatgtttcttttatttatgttcatttgttcagggacgacgacatattgaggaagacaagcttgatttcaaaggtggaaatgttcatgtcataacaagcaaagaggactgggataggaagattgaagaagcaaacaaggatgggaaaattgtaagcaagctagcaatttgctcaatggattacaaatacatcttttggttcttatgttgtgcattggttggtgatctatcagtttgcttcacactatacaactttacgaagttgatatctatgcactacttatcacatggtcctttcctttcctttctttttttttttaaaaaaaaagaagtgtaattatctaatgggattgagaacagactgaaatctgcatgagagtgaaaaaaaaatcagatattccagttataaagtcagaaataattcatgaaaactgcattcagatattctagctagtaccctgtgcaaaaagttgccatttcttagtattccctgatttatatagctttctgcctttagtcaatgcaagatccttgtgtggaataaatcatttctagttatgctgacgtgtagaactgctttttccattgttctagtttgtttctaaaagattcaaacctcatttgtaaattacttaggtctgttttatgttggttttatttctcatccaaaacaagttaaacaacattatgccatactcccagttattctgaatagcacttgcatgctcatccacttggtatttccttttttttttcctcaggatttgttttgcttatttttaggatgcctgcttgttttttggcaatacacacacaacatttacgactcatccactttagatggccattctgttgttggctgaaatctcgtaacaagataaagttatgaaaattcttgatgcaaactagtacctttgacgtactcactgttttgttttgtaggttgtggcaaatttcagtgcttcctggtgtggaccatgtcgtgttattgcacctatttatgctgagatgtcaaagacttatcctcaactcatgttcttgacaatagatgttgatgacctaatggtaattctaaccgtttgtttggtcaaatttgctattgaaaaatgattaatttcagttttgtatgaaccaagaaaccccttatacatctgatggcggtcattttatcaatagtatcatttatctgtaatcctgtataactgattgtgcatcctcactaaatgccatcgattaaggtttataatcaagaatagattgtgtactgagttccagatgtgttgaattatttgctgagggatatcatacccaaagcatgacctatcatcctacttatggagtaattgctgtcgacataccatgagaactttgaaaaaaaataagtttgtttggtgtctctgtatttttttggtaaagcttcttatatattggaaattatcatataaaggctaaacacatgttgcgcctgcactgttagcattatagcattataaagagcttctcaacacttctagaattaagtaaacagatgtagtgattgcatgcaaattgtcctaaagttaactgaagtcctgacattagagtagcttctcacttagcatatctataggtcagggtgcatgttgtaatgttcttccgatttaacaactctcttgtattctctgcaggatttcagctcatcatgggatatccgcgcaacgccgacctttttcttcataaaaaacgagaagcaggtcgacaagcttgtgggcgccaacaaacctgagctcgaaaagaaggttcaggcacttgctgatggcagctgaaccttattatagcgcaacggctagaactgaaacgaatttggcatgtctgtccggccaagtttgtgtccgtgtgctcccttgcagcttctagtgtatagttttggtgtctctgttcaaaccatgtttctttttctttctgaattttgcccatgtgtctggccacacacatatgcaatctgtgaactaagaagttgtgatgtgttcagagctgtaacataagagtaatgtactagagtagttttaaaagacagtgatatggttgtattttgagctatgaagttgtgccaataaatgagtgggttttgaaagtgactctttaatgattccttctactagaaccgaactatttgtcataaaattcccatgaatttcagttttttcctgacgaacggacctcgacgttcggacctcggagtgaatgggccttagcccactcgaagattaattctttagaaaatcacaaaagcccaccttatggtatggcatgcatgtgtagtttagtaccatcttgcttattctaggagagggagacctccttaaaagggaggatgcccttctagctacttgaagcatgtgtggtggagagaagaaggggaacacgctcgctcgcctcgcagggcagggcaggcggcgcgtgtgcacgacgtacgcgtcgaatggtccaccaaaattggttcctctggcagatgcagcctccttttgcagttttgttttgctgcaaattcggattcgtttttttggaaacgttccgaaaaatgacagaaaatctttctgattttcaaacgtggagctcaaaggttttaatttctggaattcgatatatatatgctatcttataaaaacatacacctgggaacaaaaattgaagttttaaattggaaagcatttggaaccaaagaaaaaaaaatgaagtttcaaatttaaaaccagatgcctctcctagttgtgtgctactacttggatggcattatccaattggagacttcgaaaaatgagggatccaatgaccggctgccggcctacgccgcaacgcacggccgtttcgccccccactccggcctaccggcgccccaggaaacacgccgcacgcgccacggccatccgggccccaccaccagccatcactaaaccctgtgcttaaatcaattaattagaccttaatcacccagcgttaatcccacctggcactcacagtgcgcttaataaacgggcgtgtccagctcagcaccagccgttccaaaaatgtttcgaaatcccaagccgcgagagaattgtcgtctcgaatcccaaccacgactagggggccatctctgtaaataaaaaaaatcaattaacgagacgaccagtgatactccctctatctcattttaaatacagttatagatctctatgtccaacatttaatcgttcgttttacttaaaatccttttatataaaacataaataaaaaaaatgataaaacataaatagtactccctccgtttcaaaatgtttgacaccgttgactttttagtacgtgtttgaccattcgtcttattcaaaaaatttaagtaattatttattcttttcatatcatttgattcattgttaaataaactttcatgtacacatatagttttacatatttcacaaattt

SEQ ID NO: 7446 - DNA, 23350 bp, Oryza sativa
tcaatgtatgttgccccgagaacgtgaacgagaacgagaacgatcgaacgaacgagagcgataacgagaacgatcgaacgaagacaagtgagaacgagggaacgaacgtgaacgagctagggaacgtgaacgagcgaacgaacgaggacgaacgttaacgtgaaatgcaatatatatatatatatatgtatatatatatatatgtatatatatatatatgtatatgttacttcgcatttgactatatacatctttttgtatcttgcagaaaagacgtgttgtcggagtcgtccgtcaagcctgagtggaagagctagccctagaaggaattggagcaggcaagtgacgtaataatataaatgattgttatatttgtaatgcaattaattaagattattagacctgtaattagacttatcatataagattgtgtagtgttctaatattatttgagttttaatataagattactttatttgtaattagacttagtatgtaattattgactacggaagtggtgcgacaagtagcaattgactattgtagtcttaattagacttagcatatacgcacgaaacacttagcatacatgactattttagtcttagcatgtaatattatttgaatatatatataagattactttatttgtaattagacttagtatataattattgactacggaagtggtgtgacaagtagcaattgactattgtagtcttaattagacttagcatatacgcacgaaacacttagcatacatgactattttagtcttagcatgtaatattatttgagttttaatataagattactttatttgtaattagacttagtatgtaattattgactacggaattggtgcgacaagtagcaattgactattgtagtcttaattagacttagcatatacgcacgaaacacttaaaatatacatgactattttagtcttagcatgtaatattatttgagttttaatataagattattttatttgtaattagacttagtatataattatttactagctagggttgtataatatacgtcacctagacttagcttatatcacgatttgtaattagacttagcacgtaagtttgtgtagggttctaatgtatgacatttacacttagcatacatgacttagattgttaaaacataaatgtctcgtgacttagcagatgtttcttgtatcaacagatggctgaccgcgatgaggaacagatattgtacgatacaatcgcggagggaagcagccagtactggaatgaagaagaggggaacgaggatccaaaccagtacttgaacgaggaagggaacgtggagagggatgcggaggggaaccagcaggggcacgtggaaagggatgtggaggggaaccaggaggaggaggctagtggtagtcaaccctccgttggacagaagagggcacgcgggcaacgaggtgcagcgaacaagcttgagggtcggcacatcataacggaagtggaagaagatggacgtcctagtgccccagccgaagccgccaagaactatgtacgtcacagcggttgggttgtgcgggataacgtgcctgtcagtagggtgtactggcgaagaacaagggcacgcggagatcatgagagctttgtcccagattcggagaaagagatgctgtggaccacaatgctcgagacattcacccttcctacgggtacagaggacaaagtgaaaaggtggactctgaagaaaatggcagaacagtttcagagcttcaagggagatctgtacaagaagtatatactgaaggggcagacaccgaacttcgacacattcccaaagctaagggatcactgggacgagttcgttgcatataagacaggtgaacaagggcaggcgatgatggaaagaaacaaagaaaatgccgccaagaagaagtaccatcaccacttggggtcaggaggctatagcgtcgcgatgccgaagtgggaggagatggaggctagcttgattgagaggggtatcgaaccggcaacagccaattggccggaacgatcgaagttctggtactatgctcacggtggaacgctcaacccagctgatggctcactggtattcggcgttcagatacgagaggctgcgcaacgactaacagatgcagtggaagcctcctctcagggcacgttccgacccgacagagatagggacgagctgacactcgccctgcagactccagagcatccaggacgaacacgagggaaaggggtgattccttggaagattggtttcaaggaggacatccacacgtataggagtcggatgaggagcaagagagataccgaggcgaagattgcagacctagagttccgggtatcgagctacgaactcaacatgcaagaggaggtggcaaggaaggttgatgaacgcatggccgcacatcggtcccatgatccccagccgaccattcctcctgcaatggtgagcccgtcaggaaaccgtagcagctgcgcctcaacggggcaggtaggatcgcagagcatggacgccatgcaaacacaggacgaatcgacctgtcccgttgatgacatcactcagcggacaccatgtgagctgcatattcctttcaagaacttatcaataaaggtaagatttagccattccgctagttcctgcttatatatgttgattactaataaataatctctcacaacatgaaggtggcgtcgggcatggccatcccaacggacccttcaggtacttaccactgcaggccgattccagcaggatactcgaaggtcgaagttgagttggtcgaaggcgcgtacgaggacctcgagctggattaccctggaggagacggtgagacgcatctacgagacacaagccatgccattattctatggcgcaggcggtacatcatcctccctgggcgacaagcggcgtctcgtgcaccatctcctccggctccgccatctcctcctcatgatcctgcaccgtctcctcctcatgctccgccagcaccgtctccacctcaggctccagcatcgactcctcctcaggatcctgcaccgactcctcctcgtgctcctacacctactcccccgcaagctcctcttccggcaccttcaaagtcaagggcccccccagctccaccgtctgcccacacaagggcaacgaagaaggcgaaagttgacgccgccaagaacaaggacccggggtacgattgcacgcaagaggagcttgacgcttacgttgcatcagaagtcaagagacaattcaagcctcgaagtccagaaaagaagattcctatagaccccagtatcatgaacttcttcaggggtatgtctgcatctgtcaaggaggccatcaagctatcggactatgagcgaacgctgaagaaagcatcttctggaaagtccaaaccagtccctcagcttggagagcaaccaaaacaggagatcgagccgttggttaccggtaaagaaatgacgatagaacaatttattactgacaccggtctaactacggatcaattgctaggagtcgcaccaatcgaaaaggcggaagtgaaatacatgtacgaactcggtaaaccgcttgtcaagcctgagctgctgcagtccctacccacacaaatgtacaagttccatcagctgtacatggagatgagcgccgccggtagagagatgatcggagcgaggatcagggacacggacttcttgcaaggagatgacattctctggatcaatttcaagggaatctacgaactataccagctggacgccctcgacgtctctattatgagttgctggattttgtaagtatatcgttcggttagatttcttactatacgtctcctttaataaattaggtccttgtatataagtagactatagaaaataatatactcccttttatcgttgtagaatggagattcaaagggcccgacggcggagggttttcgatactggattcatcgaccctcggagagtaaacgtcgcaatgctcgaccaatatccacaagaaacagaggacaatctcgtccatctcctgaaggcgcagcattacaagacgttcatactgttgccatacaacacagagttagtttaattttactgtcttcctacataccaaatttcattcccgtacgaactttctaagtgtttcatatgtaatgcatcccacgcacattgcagattccactgggtgcttttactcttcgacctggaggcctgcaccgtcaacgtatatgactcaatggataaaaaagagtctacgtttgacaaggttttcgaacttatagacaggtaccgtcataagttcctttgttaattaagaaaatcttgttatgttaattgctactacgaatcatatctttaaactccatgtagggcttggtatcggttccgtcatttggtccgcggcaaatggagagaaagacttaggcggaagttcaaatttcctgtgagtacacatgctctatatttatatttctccgattcaaatacatacaagtgtatattaattagatctctcgttgtttgtcatttatttgtagtgcgcaaagcaaaagcagggaaataacttgtgcggctattacgtgtgcgagtattgccactgccttgcaaaccaaatcatcaccacaagagagctcgatgtacgtacaaataaattcaaaatttcattacgtagcgatttcttgtttaattactaatcaatttcatacattcatatagtttattcgcatgagggataacctgaccacacacaaggaatttatcacggcggttcaagaacaactcatgggattcatcaacgaagaaatccttaatcccaagggtgaattctactacgacggaaacacaattcaccggtccttagcttctgagctagcaacgagtactactacgtcgaaatgatagctagctagctaggacatataatggattgtaattaatacatgactacatatgtttctatatgcatgtgtacatattttctataatgtaaatatattttggtcatatatatatatctatatacatatgcattaatttgcataacatatatatgtgtataaatacatatatattatgcatgtatatacatataatataatataatatatatatatatatatacatatatatatatgtatgcatatatatgtattgaaacatatatatgcatggtttatatatatatatatatataaactatatatatatataaaccatgcagcaacagggccatgcaaaaaaaaaaatggtcagctcgatctttagtcccggattggtactcccggtttggaaaccgggactaaaggggggttacgaaccgggactacaaagggtttctccaccagtgtaactccaattcatctgtagccaatctaataggtcattcatacaataattgcatactacactattaatgcctggtcccacctgtcatagacacactgcgtcttagaatctgtgctacagctggctataaatctatagctcgctgctcttctctctcctcatttatctttttaaaatatgtttgcagctagcttatagcctgctattgtacctactcttataggtgactattatatgaatcggctattttaaattaactatagatgatttggagccggtagttagctatactattaaacttgctctcaatagaacttacctcgatctcactaatgctctcaaattatgcccggacaactttaaatataaacaatcatattatgtttcaacaatcatgatttgagactacacttataaagtttatatgggatgaaacaaggggtaataaaagtgtagcctgggagcaagagccattgaggtggatttgtgctcaaattgttgaattattgaagtgaaatgggagtagtaggtatctagtgagtgattatttgatggtttatttcagcattaagtcagtatcaatacttagttagtatgtagtaataagcaatcaatatcaggaataaagcagattaatttcagttttttatgagacaacagttaatgagaggaatggaccatgcattaatagcttttttgttgtatccatggctgatatataagagcaagttcaatagtatagccacctactagctccaattcatatatagccaatctaatagctcattcatacaatagttacatactacactattaatacatggtcccacctgtcatacacacactgtgtcttgtagtctgtgctacagctggctacaaatctgtagcccgctgcccctcctctcttctcatttatcttcttaaaatatatttgtagctggtttatagcctgctattgtacctgctctaagaagctcaatgatataaaggttgacattctcgacgatgtggccacatataatcacagctaatgaggatatttatgtaggaagagtatattagctcagttgggttttttttaatcacgtacccgcccgacttttagtctccaacttaataagggtgctcttattaatttttattctgatttaatataggtgttcgtatatatggttaatattttagtggtatttaatttaattttttaaaggtgttcataagtaagagcgtgtatgtatgtgtttgttctctgtgtttcgaaaaaaatttcaggtgatctgcccaagatttcaacgatgcctaaaccgtatggatacattgacaagacaagtgtgcgctcaagaggactaatacttgaccaccttttgctatattaataattaattaacaaacgtgattaagccacatttcgatcaatagcctagggtgttcttgaagtgcgcaatgaccaggatgaggagagcaatccttaactgattccttctagaaaagactccccatagtttcgatcaaacgacacgaggtgtggtccgggaagtttcttctgtgcctttcttttcatttatatttttctaactcaattgcaaaaggcaaccatttgaccatttagctccagccacggcgtcctgaagatcagaccgctttggtacgtacaacatcttttttccctattttgtgcatgaaaattatcgggtaaaaactaataataataattcagtacgtgtcatgaaagactctgaaatcatagtattttgagaagatattgaaaaggttactgtaagtagaggaggcgctgttatacaactgtctgaaaactcaatttagccttgtttttctctttttttttctttttctgaggaggcttcaatttagtttttcagatacgaaatttgcaaacagttgaaagaataggagtataacagtactcaaacttcaacctagagttgtttagcgttgtacattacacttgttgtaaattacatttatttcaaatgatatcaaactagatactgaaaatctatatatttgtatgcaaacatcttccctacattggtaattttggaactgtttataacttctaattaaacaataattgtgaaggtagcgaagacaccaacagtttggatatatggataataccgtcaaatggcctttcacttagaggacttttacggtacattctacttaaagtatatacttacagtatatgaaagggtagatttggtatttgttaaaaatctaaaaaggattgtttagccatttttaattgagatcatttttttccatcggtggtattttttcggatgtcgtcgtccgtacgtgataccaatccagtctacctcgtacgtggtacgtcgggtcgccggcagccgtacgttgtctcgcgtgtggctcccacagtcccacaagcgccgcccagcagctgtcgtacgcaatgatgccgtcgccgccgccgccgatcgccggaagcgatacagcctccgccgggagcaaagccaacatattgccattctcgtgcgcagcactattgccgccgtcgggcccagcagcagccgtccgcttccagaaacttgcttccgtcagtctctctagcgatataagttcttgagtgttaaaagcctgagcctgtgataatatataactactgcatatttgcatcagacttgtttatgattcaggcttcatccgcttcaataacaatggatacaagcaataattaagttaattaacaagtctaattctctacaaacacttgtgaatcggtacatatgtttttttataaaattcttcttcacttttttaaaattgctgttgtcgcatgccgccgcggggcttccctgccctgctgctgctgcatgccgcactgctgcttcggccacctgccggctgccgctgcccggctgcctttgccgatgcgagctgccgcagctgcccgccagcagcggctgctttgactggacgcctatcgaccggatctaactgagcaaatgcgaatttataaaattaccccctacgcaaatagataaaaagacaaatataccctattcaattttatactgcaggataattaagaagaagatcagattaatttacaccgttagatcaaatataatggcagtatatacttgcagtacaatgtacgtaaaaatcctcttcacttatacctgcacaagaattcaacgatcaaacaatcggttcatgatctgcaatatttggacaagaataaatgatctctatcaacaatgttcgtgcatcctttctttcttggaagaaaggcttaagggggattttactctacatatgcacagggtaaaggtgtcaaaaaaactactttggcaatcatggattgattctcttatgtaacctcttgttttttcttttctttctgttgtacgtatcgttctgtaatctgtaaattgttaatagtagtatactagtatagtgcagtagaaatcaaaaaaaaaaatcggtgtgttttttgtttaaaaaaaaatcggttcatgctgtggtaacggtatcaaatcacataaatagttatgcttagcaatttcggttttgatcgattgattgttgaaatggtactgcttatttgtatatcagaactaattcactctgatatcacatctctgttatatatacatatggagaagtatagtaattttgaggagatattgatgcttcatttgaggctgttttacccacagaaaggtattcctgagtttatctgttcttttgtacaaaatgaatttccaagttattgtgtcaacacatatataattgaagtgtcaacacatatataaacgtatatgcgtgcaatcatgcatagggctggtggcaagttattataattgaagtgcaaacaaaaattgagaattcaggagtacttctacaagtcaattgtgcaaaaacctgatgtgaacgtaggagttgtctgaaactctgaatgaatattgccctttctgctcagcagaggccaaaggcaagtgaccgagacactgaagcaagaatgatactacgcacttgtgtaatacataaaaaaaattatacaaatacttagaaaatattcactcaatttttactcaaaaggacttctgtaaggacttctaatcagcaaagttctactctgaacatttctttagtcaaactatgctttatattttgattgaaggagcagtagccacataggagttcctgaaacgcacgctacttgggatatatcatcatcctatataaaaaattgaagagatttattattcacaattgatgatgccatcttcagatagaaacaagagtacccgcacgggataacttgtaccaatattatctatccatttttctactcacaaattaaaagcactgtgttcagaaaccacaggtgtcacaggcaatcaaaccaagaacatagaaaatcaggcgcccacatgattcccccaattgccagcagatgctgcagaagattccaaacacatctgtctctacttttatctccttttcctctccactagtattttatttttttgcaatatttttcacactccaaaaccccatcatttttcagctataaatggccccctcctccaagcttcaattcccttttcccctcttccccagctcctttgttaggttttcttccagtgagctctttttgctcatattcagatcttcacttatttcctagttgttactactgcctttgagtattgacagcttcatcctgccaactcagctcaatcttcctctgaagtttcagtctttgtttctgaatctcttcagtgttcagaggggaagttctgccaaaaaatttctctggccatccattttccaaggggagattctgccaaaattttcatctctgtccatcaatattcctggggaggttctgccaaaattttctctgaaatcggttaatttataaggggaggttctgccgaaattttcgctggtcatcaatcttccctttgttgacataccctgcataagtatatacaacaaacatataactttttgcaaggtaagaaggagtttttatctgttcttgatgatagactcctagagaagttgtcctagttgtgtagatgttgttgctcatcatccctgagcacctcctctctagatttatgactggcccagccataacccagcttgttcagtccttctctgttgtcttcctctactggttctatgtcttctcagtaagctccctgtagttgtagccttttgaaattacaagacttatttatacaacataattatcaaggcatccacatataaactacaaggtatatatatatatatatatatatatttacaaaaagaaaaggaataagagggagtaaaattgttgccggtgcgaaaaaaaaaattgttgagaggtgaccatgtcgagtgggacctcgtccgggtcgagccagggaacccggagctccaggtcggaagatgacctgaacctccaggcccagatggagaagaagaggaagaggaggaaggagtcgaaccgagagtcggctcggaggtctaggatgaggaagcaacagcacctcgacgaactcacctcgcaggtttatatatatgctctgcttataatatatatatatatgtgcacaaaagtctaaagtttgtgatgcatacatagatctagtttattgtttttgctgtcataattgttttactttattttatctttatatgatagcttgcactcatgtgcaggtagaaagcaaaaaacagatgaaaacagaagtgccacttgaaatatctgccaaaaccaactcaataattgtgctgcctttttcaaaaggccccatcatctgtttcctacctaattcgttcaataacactagaaaacaattcatcatcatgatcttccttgtcataaattgagcactcaccaaactagcatcacaaccctgcatcaaaaatcaggaacagaagtctaaacacatatcactaagaaaatattatgtgtcactgaacaggtgaaccagctgaagaatcagaaccagcagctgagcatggcactgagcctgaccacacagaaccttgtggcagtgcaggcacagaactcagtgctgcaaacccaggagttggagctgcagagcaggctgtgtgccctaactgacatcctgatgtgcatgaacaacaccagtgctactcctactcctacaattccagccaccactacaagtgcttgtgatatttttggtgccagctcatggaaccagccacccatagacttgtaccagtaccagtgcttctgatctaggaataagaagagggttgttgtggtagtgtgggtaggaccagaagccatcaagtaatgtttcaatcatgtagggccattgttgtcactgttaatgtatgcaattcaatcttaattgcctgctgtaggggacagggatatttgctctttcttgtagctgttggtggtagagggattaccagatggcaaaatggtgctttggcaatgtgttaggtggggctggttttggttgttaagggtagggaggagaaaattggtaggtttttcttgagcatgcaagaggggaggcaaaggattttgtgtaatgatgctcttcaaggaaagtattcataattatgattataatgtaatatgtggatttggtggatcttcataggccaagtgcttctttgtgctccatatgtgtgtgtggttatctgaaaatagattatatgattaacatctctatttattttgagtattggttcaaaaagggtagaatgccattttgacatagtttttcttttacctattatttgcttcttactcactccagtgtcaaaattattgacgttttagctaccgaagcaaagtatgctaattcttgacattttggttttgcttgtgcatcttgaatctgcttgccactgcatgcatgtacgcagaccatgtccaaaacatcaaaaatttcgaaactggagggggtatttcttttacacaagtgtcaacatacatgacgaaagctgcagtcgtgacatatgtaaaaccacctttttgttttttcatgtgacctagatatttcgtcaacttttcttcacttatttctcaaggccctctatattgaaagcttgagttttacccttaattgtggacttcatctagcacttcagatttagcagagccatggaagcatttatcaccttttgaaggtgttatgtccaagtctgaacatttagatacagctcaaagggcattttaatttgtatagcatcaatatgtctggaggacatgtgaaatattttctccttactgatttgtctaatgaaaaatctagtatttcagacaaaccttgcttactgaagaaccaaaatgaaaatccaacacagcaccaaccttgggaagaaaagatctagaagatgcgtaagaggtgaagaaaagaaggttgatagctatatgtcttggtacgtactgtagaacagtgggagcacttatcaactttttccaaagtgcgatttcacaatgaaccaatcatcctttatttcgaaaacgaggaagacactgttgtgctttgccaaaagctatgtgctcccacatgctccaattccatataacaacttttgcaattctctggcttcagcaggaaaaaaaattcatttctctgcataaacacctcttggatgcatcctttctttcagaattttgagctagacaaggagagaaacacaagatctctaccaaaatccatagagcctaatcctgaagtgcacctaattggatgacagatatcctctacagtaaagctgatttaattgaatcgagctctcatatatacagagctgagctatcctgctgaaaggatggtgagggtgaattttcagagaaattggtacaagaatagataaaggcataactgcccaattgtcgctgttggaatatgttggcatgtgacttcacgaaatggagacatcagcatcagacatggaaatagtaaccaacaggtcatggcaaattccatggtgccattgagtctgaacttacttctgcactaagtaaaatttggtagggaaatccaaatttgagaaattctgatcaagaaagaatggacaaagaagcagtactccaaaattcaatagaagctgcaatttgtgtctaattctgactatttctcatatttacactagatgtatcacaggtacaagctgaaattgcagctggtagtggccaatcaaagaacaaactaatagagaagtaaccaaaattgctgagaagtttcatcccaatcgtttgatcgatcgatcgatcgatcaatcatgccatcttatgagcatcgcaacgcatcggcggatgatgtagagccttgccttctgctccttgagagccctcttgaggcccttgagcttcatgtcttgagcacccatcctcatcttcatgatctggagagatgtgattcactgaaagagatgagacaggctttgcttgttggatttggaagtacaaacttttgtttgagtttggagatagcaatggtacatggtttatataggccgtttgtcatgtgggctgtgtcagcagctgaagtgttttttactctgcttatgcatatctgagtaattaacttgtaactggtttcatgctttgaataaacaaaagatagtttatgtgatcttgaatcaacttacttaaatttcctgaggcttggttgacttgataataaaaaaaattcattgatcacgtaatggcatcatttgctctgcacgatggattaacataaataaatacacaatatgtatggttgagctatgaaaaggttatcctactggtactggacggtgatgccacattgtgagtcactctaggagttcgtgtgttgtgtcttgtaattcaatagttattgcggaatttcttgaagatgacagcgcaagatggtttttagtcaacttttaggtttgacaaaaaaatattttcccagtgaaatgccaagtattctctctttatcattcagtatttcctttttcagatgaaggaagctttattaaaatcaagataattacatcaaggagctacttccggcttctgtataatattattcttttgcagacttttgttagtaagtctactcatttttttgaccactactcgtaatcgaaacaatcaaatttcacccaatagaaccgttataaccttcaaggcagaggtggaataaactcgcccttgctcgctctacctcggtttaaaattcctccaagtctacacatctatctattatatactaaaagtccattaatcttcctacaagcgctctcaagccgtcacgtgacacttctacaaacgcttctagaccgccatgtggcaatgcctaatctcatcgtcgattttcacttaaatcggtggacccgataatttagacgattagattagattagatgtattttatttaaatagaaactactatgttaatgttggccgaaaaaaaacataagaattccaaagtatacgtacgactaaaaatcaataaaactctaatattgttcatcggttcgctggcaaaataaatataagtacctaagaatgggaaaagagcagtaaagcttatgctgctcacctacgattcgttaggaaggaaaaaatatgccagcgtatttagaaaaaaaaattaaagccacgagtaaaataaagccaaaaaatatacgtatgtagtaccatccaaacaaatcgaaaatataattttctacataaaagataaaataaaaatatgttattccacaaatatacatcaactagacatcataaaaaatataaagtatcaaattaacgttatgtaaaaagtcacattttatttttctttaaattatattcctttaaaaaacatacgtctgtagtactattgaaaacaatcgatggtatttaaagatatatttttctattatttaaagataaaatatattattctataatttaagcaaatatcatcataatttttatttaaattgatgaatccaatattttagaccattaaattaggtatattttatttaagaaactaatatcatactctgtctatatagacgggagtaaatgttggcaaaaaaaagaaaaaaaaactgtccattggaagaaagagaaaaaaaatctacatacggacttactataaaaaaatagaaccaaaaaaaatatgtagcgatgaccttttgaaatagtgctttctcttattatttaaagataaatatattactctataaattttgtaaatatatataagtagttaaactagatttatattataaatatgaaatatccaatcaatgatctttaaaagttttatctgaacatacgaggctgatgtatatagtaattaatgctatgataatttttttatttcatatcatattttagggtgtcaagtatcatttaacgatatacaacgctaatttaaaactacatacgtaaaaattaaacaacacaatttagttgttttattttacatcattggattagatttattatttaaaaataatatatttctcctatacatgaatacatgagaaatatagaactgttagaccggaaaccgtacgtacatatgattggaaaaaaacaataatggtcatgtatcgtttcccggaagaacagtaaaccatatgcgcgtacttatgataaagccaaaaaatcgacagtcagaaaataaaattttatacaatttaaagataaaatataataatattaaaatttacacaaatataaatataaaatatccaatcaatgctttttaagttttttatcttttatgttattttaaaattatatatccaatttgtgatcatgttgtattactttaaataaaaaacaattaatgtctataaccctaaatacatcacaacatatggagccgatatgcaataattattgttatgataataatttcacattatattttaggtgtaaaaaacactttttgaatatgcaacactaggtgttgaaaacagatactgaactaacatgcacttcactatagatatttatcaaaatatagtatggtactttggagattatcgtggtagtatttaaaaaaatcactttgtcccggttacatgtaaattcttctattgttttgggataaaatttaattccttctatttatgtgatggagggagtataagtaatataagtttatctttgattagatgaaggagtaccattagctatatttttaatagaaaatatctttcattaatatataataaaaactaaaatgttacttaaagtcatctatagcttacaaaatagaaaatattatatacataatacaaatagatatgaaccaactccattattatgacagactttttgtttgaagtaaatatgcccaaaccagttattaacgaacacatatttaaaatagtgtaagaaatattttaaaaaatatcatccatatttattcgtaacaaaaattcaaacaacattaaacaacatgcccgcgcatacgcgcgggctatctttctagttcttctttaatatttaaaagtagtcagttttgaacaaaagttgatttcacactggtagagaaaccatctttggtcggtcgactcaaatccacaatagtcccggttccattaaaaaccgggatttttagtcccggtttataagagaaagatctttagtaccggttgttgttaccaaccgggactaaaaatcatctttagtcccggttggtaactccaaccgggactaaagttcatctttagtcccggttgattccatgtcagaccgtatcagggtactaagatctttagtcccggtttgtaacaccaaccgggactaaaaacctatttttagttccggttgatgttactaaccgggaataaaaataaaaaacacactatataatccctattaccgatcctcttttcccatccacacaacaaactcctccctctctctttctccctctccaacttctttatctcttccttatctctaactcctaccttctctttcttttttttccttccattagtcacagcaaagcagacggcggccggcgagggggcgcggggggccggtgcggcggcggccggcgcggaggcgcggggagcctcgcggcagcggcggcacggggggccgcgcggaggcggcctgcgcggcggcacgggggaccgcgcggcggcgggcgaggggccgctcggcggcggcgcgggggaccgcgcggcggcgggcgaggggccgctcggcggcggctggggcggcggcgcgtggggccgctcggcggcggccgtcgcggaggggaggaggggaggcggcagtggccggccggccggcttttcttttttttctttttttcttttttacgatttatcctgtgatgtatttgatttgtgtgtgatgcggatctgtgatgtattttttagaacttgtgatgtaattttttaaaagtttgtgatgtatttggagatgatctatttgagaatttagagatgttctgtgatatgtgagaatttggatttgggatttcttggcatgattaggggatggtgtgaaatcagtattcaatactaaaacaatgaaaaagagaaaaaaaaagaaaaaatatctttagtcccggttgttgttactaaccggaactaaaaatcgatttttagtcccagcgggactaaagatagcgatctttagtcccggattcgtagtcccggttggaaaaccgagactacagggaggttacgaaccgggactaaaaagcatttctccaccagtgtcactctatctcagagatggctctttcgccctttaaagttgttcctagctgcaaaggatatggtaataaatatttttccaacaaaagttcaaaaaagtgaggaaccatctcatattctacccatgaaaaaataagcaaatactgagccttacaaacaaccagggaccattgtcacacaaaactactgaatttcatggaaaaatcactagttaaattttgaagatgtcacatgatgccaaattttaatatttcttaccttttgtgttacaaactcaaattttttaaaacttttcattggaagcaaactccaagtccctaacggttgatggtcttttccaggtgaatatgaatgttgaccagacatcagtagtagagagagagaaatgtgactaagggatagtgagaaaagatctaagaaatccacgtttttagacaagaagaagaaatatcagaatttcaatgtctgctggaaaaagaaatttaattatttgccttttcattattccagggttatatgcatattgttttcctttttccgcaccaacggacctgcatcgcgaataaatagctcacgtatgcagccaatattaagattaattttttatattatatgaaaggtgtacacacgcacataccactatgcatgcacacccccacacacaccctcacgggagacgcacaccacgtcaccacccattggtgaatgcatcccctaacactctcaaagagacggagattaacaacaaatctctagcctcattaaattcctatcgaaaacgcatcattgtgtgtataatattttggtaataagatttacctaataagtagagtcatgcatcaatgactccatcataaactactggtgtttccctaatatcaagagtttttggttaattgatccccaaagagtgaaaataaataagttttcttcaagtattttgctgcagcctaccatcgagatttttctttgttggcacaacattggctgtctggtctagggattacttaagcatacacccttcaagataactagcaccatgtcaactacagaaaagtcaatgtttttaaacaaaatggcaagcagaaatgtcagcgattataaactattgctgataacattgttaagcattgtcaacacgatggtttaaccaatagttccaaagtattaggtttgaccatgcacacatacacaaattcttcgatgatctaagaaaagaaaagataagagattttttttttcattatctctacgctggcagatgctatcctgagtttgcctccattcatgatgctcacatggcaagacctttagagaaggatacttcgctacgataaaacaataataggatcatatcgtggagttactgccctaataggatggtaaaattttgttttataaaatttgttcataattttctgccatcccatacatttgttcactacccaaaagtatactttttctcaaaggaagaggcagactgaccaatcttttctcagactatttgggtatcactttaacttccaaagtcaatgcttcaggataaagatatatatcatgtcaacatggaggtaagaagtgaaactgaagtgttccacattcaactaactgtgcaaataaattgtcagctatctattcctggtgcatgatgccaactaaaaccttgccccaaaaggctggctcagcagacaaacagaggtaagaaagcactaaacaaggcattgggaaataagctaattaacctcagccaatcagcttatgtacaatgtacctgccagtcagacctattttcctttttcatgattggatggttgtttctatgttaattaccattatagttttttttatcaagcaatcttaatcaaacacaatctaggagccacaaagcatcgcagaataacatgtggtgcacgaaattcagtgcatacataggaaatcataatgcttagcctcttgagtatacttgtcatatttgaccactttatttgttcaaatattttgacagaagtggaaagtccaccattataaatccctactgaaaagtccggcattatatcattactgccgctagagtcccttatgatttttttgtaacagaaaggaacataactattttatgttaaattattttttttcagctcttgcagttaacagacaaaacatgatgtgtgccttctgttactgccctacatagggcctgataatatataggctggtaaacttttggtttctaaaatttgttcatatttttttctctttgccattccacacattctgtcactaccaaaggaagaggcagagtgaccaaatttttggtttattaatttacaagaacacctgagttttggtcagactattggatacacttaacttctcccaaaatcaatacttcaggataaaaatatatcatgtcaacgaggaggtaagatgtgaaactaaagtgttctatattcaattagttttgcaaagtaaacacaatttatcagttattcctggcgcatcatgcaaactaaaactctgctcccaaaaggcaggctcagcagacaaacggagacaagaaggcactaaattaacaaagcatttaacaatgggctaaacctcaggttatgtacaatgtacctgccagtcagagctcattttaccttaataatttttggatcaagcaatcttaaacacaatctaggagagcattgcttcgcagaataacatgcagtgcacgaaattagatggcgcaagacacagacgtacagagggtatcataattcttaacttcatgagtatacttttcataatttgaccactttatttgctcataaattttgagaggagtagagaagtccaccattataaatcactacggaaaagtccaccattataaataattactgataaatgccagcattgtcaactaaatgatttagtttggagttccaaattaacatctggtaggcgcagcacatgtacatacaaagattgatctattccctcttgcataaatatataatgttgcagccacaattaacaatactctatttgcttttctcaaaaaaaaaacaatactgcttcatgactatagtactccgaatctctgtcacttctggtagcctgagagtaggatagtaattttttttatggatcaaaactttgatcaccatatttgccaatccataacacatcttgttactttcatgggtaccattatattcttcctaaaggaagagacagagcaaccaagcttctgctttgcttcacagagagagaactgaattttggtagtactattggtgtacggcaatagcatccaaagttttttttaatgaaattagcatgaaaagtcaatcccttcaggagaaaacaaaataatatgtcaacaaggagggtatgtatgaagtgaagctaagttgtcccattgtcaactacttgtgcaaagtcagaacaatatgttaacatttcaagttgatgtcaactgaacttttgctcccaaaagggaggctggcagacaaacaaagacaagaaagcactaaacatagcatttgacctcatgatctaattaatgttcagctatgtacaatgtatatatcagtcagtgttcagtgtttcaagttgaaaggaacagcgttttggatggttgctgctaagtaaccgtcctagttttggatcaagaagaatctaaaacgaaatccaggacgagaacaatggcgacgtgttgctttgcacaaacacatgggttgtacaaattttgagtagaaagtcaaatagtataacacagaaacttccttttcatgaaaaagtactcaacgtgtgacaatgtgagctcatagagctcattttttcacaaatacaagtcaggtttggcaactttatttattcaaaaaggatttatcactgtaatagattggtccattatttcggtggcagagcggaaaattttagtaagatagggagttaaaataggttatagccaacatataattaacatgaccatttcaaaaataagtcatctcttgtttaatcctttcgcaaagcaaggataaaagcacgggtgcgatgttgggcccccctcgtatagaggtgggcttggtccacaacaaatttaagaagcttgtcaaaaccagcattccacaatacatgagttccttttttaccttctttttatttgctctctaattctttgattccatcaaattcattggtgatagctaaaccggaaaggttattaaagcttttagcccacattagataaaatatggtttctatcttttttctaactttgccttagttagaagtgacaagtgttcacaaacaaaatgattaataagttaaacaagtatggatggattcacccaaaagaaaatgatccttgcattaggtggaatccaagattgcgtggagacgtggtaaacttatcctttgctaatcttcctaaaagaatcctcttccggtcgtcacctttcactagaaatcaaagaagaaagaacagtacacaaaagaaaaacgctcaagcaacagtgcgatttccggtcaccggtatatgaccaatgacatgcagtaaaagtgcatgatgaatgcacttctttattagtcaatcaccacaaatgacactgtcctttaaatattattaattgtttctacaattactatctacatatttaaatatatggcatcgttgactttggtcaatctatgccagtttaacaaccatttttctattagaatataatgataatattttcttaaaaagtgtaatattataaaataaagaaaaacatataagcatgatttttatgtttccaaaccaaatatatggagagctattgatgatcaaagctttgaaagttttgaccgaataaagtcaacagtgatatatatttaaatactaagggagagtgttcttatgaaatgacaatcccctagtggagtatgagcaaaaggacacaacatcataagttcataactatccaatggattatgagctaatcccatcaacacccaaaaacatttaatcgaaacaaaacaaaaaagattaagtgaagcaattgggaattgcatcactatccacttgcaaaatggtcaaacatttggcacccaacaagggaatagaatcacacaacactaatctgctgttgtgccaaaacagtaagcatagtgggcttcatactttagagagcccacttgcatttctctgtgcattaggttctttgatgaacctaaccatgttctgcagagatgctcaacttttcagtcctggttttagccatccaataaagcatgtttaccgttccctaaaccgtttgctt

SEQ ID NO: 7447 - DNA, 33896 bp, Oryza sativa
  unsure (1)..(33896): unsure at all n locations
taaacttgctctaaacgcatactacacaattcatagttggttccaccagtcatacgcacatgcatcttggagtctgtgttataactggctataaatctgtacccgctgtccttctctctcctatgttatcttctccaaatgtgtttatagctggcttatagtctgctattgtatctgctcttgtatctgctctgatgccattttagtctctcaatgttctcactaattatgtctcaacaacttttctcacagtatatcacgattaaagcaaacatttttttttcaattcgcatacatgttttattaatgtattataccactctactacgtacctccgtcccataatagatgtcgctttgattttttcttgcaacgcttgaccattcgttttatttaaaaaattagtgcaaatataaaaaatgataagtcgtacttaaagtacttttgataataaaactagtcacaaccaaaataaataataattctaatttttttaaataagacaaatgatcaaatattaaaaaaaaactcaaagcgaccagtaatgtgggaaatgtgggacggaggtagtatcattttttttatcaccacacatttcattgaagtgtcgcttctatatcctgcaacaattcgctgcatatcatttagtttgatctatcgtcaattccagatcacgttaatttaacctctagttttaaatttaagagtgtcaaactttagtatgcatgacatactcccgaatttacactgacactgacactgacatagtctcttcaatgcctatgttcgatttttgtttttgtaatgatatattcataaatatgttaaaaatataattaactaaacgaagacagttttaatcaaatttcacatataaaattttagtgttttcatatatacaagattttgagacttgatgcgtatcctaaccgacatccattcgagatgtaaagcatatcattattttgtcgacacatgtcgctagtacttgcgatgtaaatattagttaaggtcttatttggaacacagaaatcttgtagcaaaaacatgaacagaaggaaagttagagatttctactgcctgacgggaagtgtaattaaccaattaagaggcatcgaagataatatagtgttacaccaaaattgacattaaaatgtgtgatatatataataatttactctatatagactaattaggaattgtaaataaataggtggtacatacaatatgcaatacattaaaaaatgaaaaagatgacataacctaagaagtacataaacccatcttttaatttgggcctggctctctcctccctccgctgaacgctgatgacctactctggtaatctcgtacgacacaccatacaactgtcaaaacaattttttatgctttacatcttgaatatgtaataagtgactgtagcttcaattaaagcaaatgccgaatttaatatccattatataaaaaaacatcttgaatatgtaaacccaaaagcctaggcccatcctaccaatgtatacgtacctagatgaagttgagaagaggtctgtagactctgctgattccagagatcactttggatggcttacagtccacgcgtacatgttacgacggttcttgcatgcttttgtgctatgcatctcggaccattgctttcctgtttatcaattcgatcacagcatctatatatatgctttagcatatgctttgcttttccaagtgtcactaaactgtttgtacgtatggaattaatggaggcgtttgccgtaaagattatggtcgaaagccaaagcgatcacttctccctttgctcgagcttgcgttgcgttggcaattaatcgatctgtttggaaattaaagcaacacgtatgctgatcgatcttgatacgatcatctccagaacaaattaattaatttagtttgatggtgcttgttgtcttatgagctttgatcgtatttgcttctacatatgtttcttaaagacaacataataggaagttaatttgcaacttctatatgacttgtgtcacgaactcggatttgagtcgcaacgaactctcatgtgattcgaaacggaagggaaaggaagctgacttgaggaagaagaagaacagagacaacgagaagcagaggagcaggagggagattggaattgagtttgaggtttcagtttgaatataatatttcgcatcccgctctctcgcacctgccgactatatagcaatgcgccatctagtctctctcactgacagtggcccagcctttcgctactgggtccactcactcaacggaaagcgtgcgttgggccgctacatccttttgggtcgatcttgctgttgggccgctgttgacgtctcagtttgaatgccctgctcagatgccgccgtgacatcccctcccccttgagtggcaacttgtccccaagttgttgtagttggaaagcgacgacgtagctcctgctcattctcccaggtgacggtggcaggttcaccgccagaccacttgatcaacacttgttccaccatcttggatcctttgcgtacaaatcgacgatccataacttgaagtggtaccggagatgcctctggtttcggacgaagaacaggaagcctgggcgacgctgtttcacttggtgccaaagcttgcttcaattgtgatacgtgcaccactggatgaataaggctggaggagggtaacgccaagcgataggccacttcccccacccgctccaaaacctgaaagggaccataaaaacggaaatagagtttgcgatttactcgagttaccactgactgttgttcgaagggctgcagcttcatatacacccaatcgcccacaacaaaaactcgttcggaacgacgattgtcagcctgaaatttcatccgagtctgtgcacgcaggagatgatcccgaatcagagtttgcattttctcccgctcatgaagccaatcagcaagctcagtagactgacaagctgcagtaactgtcaacccaaaatatcaaggtttgtggccatagagaacctcaaaaggagtagtgcccaaagcagagtgaaaggatgtattgtaccagtattctgccaaagcgagccatttactccaatgagaaggacatgtgtgcacaaaacaacgaagaaaagtttccaagcactagttcacacgttcagtttgcccgtcagtttgcggatgataagaggaactcatccttaattgggtgccagccaatttaaagagggaagtccataatgtgctagtaaaaatccgatccctgtctgaaatgagagactgaggaagaccatgtaacttatgaatgtactgcatataagcctctgcaacatcaagggcagtaaaggggtgagccaacggtacaaaatgactatatttggagaatttgtccaccaccactaatatgcagttgaaagaatctgagcgaggtaacccttcaatgaagtcaagagataccatttgccaagcatgttcgggaactggaagtggctgtaacatgccgggatatctgacatgttcagacttagcatgctgacaaatatcacacgagttgacaaattgagttactgtggagcgaagtcgaggccaagcaaacaattgtttaactctttgataagtaacatgaatgcctgaatgcccacccactgcagcagtatgaaggtttgctaaaattttctgttgcacagctgtattggtaccaatccacatacaatccttgaaatataacacaccatttttcagagaaaaattgggtacagcaccaacactgatgcatagggtctgaaccttgctacaagcatcaggatcaagcgagtaaccagacaccacctcctgaatccaatcaggcaaagcaacagacaaggcagacaattctaaagtggcagaagaaggatacctagacagagcatctgctgcaccattatcagtgcccttcttataaatgattttgtactgcaatcccagtagtttagtgagagccttgtgttgccagggagtggtcagacgctgatcatccagaaaagatagacttcgatggttagtccgaatgaaaaattcagcatgttggagataagggcgccaatgttcaacagccagcataatggccaagctctccttttcatatgttgacaagccctgatggcgaggcccaagagacttactgagaaaagcaactggatgcttttgttgcataagaacagcaccaatgcctttatcggaagcatccgtctcgacaataaatggttcagaaaaatttggcatggccaagacgggagcagtaatcaaagcttgttttaatgcttgaaaggctgcctctgtttcagatgtccaaatgcacaactgacccttttgcagcagattagtaagtggtttacttaagatgccatagtgacgaacaaatgtgcaataataccctgttaattccaagaaaagcaacaaatttgccaattctggaccactcaaatcttgtcgtcatcagtcgacacaccattgggagtgatgatatgccccaagtaggaaagccgttgttcagcaaaagaacacttactctgttttaccttgagctgatgcttgaccagaatttggagcacttgtcgcaggtggttcacatgatcttccaaagttgcactgtaaatgagtatgtcatcgacaagtaccagcacacatctgcgaagtaaaggagataagatgctgttcatcacaccctgaaaggtggcaggtgcattggtcaagccgaaaggtatcacacgaaactcatagtggctactatgtgttttgaaggctgttttatgctcatccgacatcttcatacgaatctgatggtagcccgccctgagatcaagtttagtgaaccactgtgcccccgacaactcatccaacagctcatctataattggcaatgggtgcttattcttcgcagtgatatcatttagatggcggtagtccacacaaaaccgccatgtcccatattttttcttaaccaatagcacaggagaagaaaatgggctggaactaggttgaattatacccttgtccaacatttcctgaacttgctgttcaatctcgttcttttgagccggtgtataccgataagggcgcacattaacaggcactgcaccagggacaagagggattgtatgatcaaaagatcgagctggaggtaaacccattggttcatcaaagacagaaacaaattcttgaagaacgtgttgaatcttgacaggaatttgttctgaagatcctctgtcctccaaagaacataactgaacaaaatgagcaactgctctcttgtcactgaactcttttagttgttgagtggatatcatttgacactgttgcaattctggcacaattccttgaagagtgacagattttccctgccagcagataaccaaggacttttgtacccaatccactgacattgggctgcactgcattaaccaatccattccaagaattgcatcataattagttaaggccataatcttaaaggtggtgtaaaacacatgcccttgagtcgtccaaacacaatcaggtaactcagctgtacaagacaaaacagctccattggccacctttacctgtgctatagtaggaattaactgcactcctgacagctgatctgctaccttggaactgagaaaactagctgtgctgcctaaatccaccagtatcagcacctccttaccttggatataacccaaaatcctcattgaacccacatgttctgccccttgtattgcgtgaactggtacaaccattactacttgttcttcagacgtaatcaattcagcagattcagaaaaagaactctctccaattgcatccaaaacagagaataattcctgaactgcgtgtaactggacagagttagcacatctatgagttgtagaccatttttcagcacaaatgtaacataacccctgagctcgcctttgtgcctttagagcaatcatcttgtcagaaccccaaattggttgaccaccatcaattccctttttttgtcatcaacctttccaactgcagatagaactcctttgcctggtggtagaggtagtggcaaagccccttttaatgctgaattagagcgaatgtgcattcctcctttagagtccttcactccagactccggtggagcttccagcacttcctcttgcaaagacgcaatagccagagtagattccaaatcgcggggatgttgtaacaatactgcatttctaatctctcggcgcaatccttcagtaaagcgatgcaccagatactttttgctaatgacaggatcataggccagcaattggttcatcaactcgtcaaatttctcatagtattcccaaactgttcccgactgtcgaattgtatccatttgtataattaacatgtcatgctgatccctatcaaacttagtggaaactgctatgcaaaaatcatcccaaacaggaaaccgcacatgagccctagacgaacgcaaccaggatgctgctctaccatagaaatagatggtggctacatgaacccacaaccctggaaaagtattgttcacatcaaaatagtgctcacacctcatcctccaatcctgggggtccgtgccatagaatttagggaaatctagtttaggaactctatgattatactgtctaccgccttgttcaaaaccaaactccccaacctccgaatcagatttgaaattctccaacgagtgcaaaggaactgaatgagattcaaacgtagccttgtctagagttgggatcagagtggtcaccactccagatgccctcctccggaaattctgttgagcgccgtggccatgggcccaattgcttccgccttccgccgcgacttgatgcgaagatgtcggcggcgtaggcagcaacggcgccttcctttcctcatccgtcaacggaacccgaggggaaagcgtcgtcggcgaagcttgcatcgatttgccaaggaaatccagttgctgacgaagttcgccaacctcgtcgcacaaatcctgaatcgctgactccacttgaggctgccacccaccgactcctgcatccagcttcgcgacgactgcctgagtctccgcttgcttgttgttcaacgacatcagcgaatcctagatgtcgccgagaattttgctgaagtcgaggttctgtttctccatggcctcaacctgcaattgcaaacgagacgtgtaccttggcttctccaggatcgctgctatgataccaaatgtcacgaactcggatttgagtcgcaacgaactctcctatgattcgaaacagaagggaaaagaagctgacttgaggaagaagaagaacagagacaacgagaaccagaggagaaggagggagattggaattgagtttgaggtttcagtttgaatacaatatttcgtatcccgctctttcgcacctgccgactatatagcaatgcgccatctagtctctctcactgacagtggcctagcctttcgctactgggtccactcactcaacggaaagcgtgcgttgggccgcttcatccttttgggtcgatcttgctgctgggccgctgttgacgtcttagtttgaacgccctgctcagatgccgtcgtgacaacttgatgcacgtagccaaatccaaggcacatgataatcaaacacaataatctattcttattatttcttggtttgtgtcaaaaatagtgtttgcccttttcaatgactacaatcaaacaactagaagtattcgatgtcgtgttgagtttagtttccataccaaatattaatgacgataaaaatcacatcatcatccactagcaattattatttagagtagtttacatcacatgcaagtatgtcatgttgggtttagtctcacatcgataattgatgatgagggagcacaacttaaaaggtaggggacggtcctcacctatcagactagtcttttgggttgtgtagacccatgacctaaagttgtggctccgattgggcctgtggtggagcaggcccaatgtgacctgggtggcccacaattggggggccaggctacgcactctaataagtggtatcagagcccaacgtttgaaacccagaacaatttttatgggacacttggtgaggaggccggtaacaagtcttcggggtccacatgtcacatggtggggtcacatgggttgatggggagattgttgggtttagtcccacatcggtaattgatgatgggggagcacgacttaaaagttggtgggcggggctgcgcactctaacatgtcacatcatcacacacaagcaattattgtctaaagtattttaaatatcatgtaaatatgacatatcatttacaattttgttgtatttttagaactcattatgcaagcaatgtttaatcattatctcgacaccattttcacattattcaaacatatacatctatcatttatataataacatttatttaaccacgtatcccgcggtaaagtgcgggtatcaactagttaattataagcaacatgtatgtcttccaataacgaaataatatccggaaataaaagacaaacgaagcataaatttaaaaactatgctctaaaactaaaattataaaatttctctgtatccaaatccaaaatatatatttatacttgcagcctatgtttattgcacggattgatgggatgatgactagtgatatgaaatcaggggcgaagccaggatagatggtcaccgaggtcactattaattaacgatcctaacaattggctatagcttctaataattttaagtctattgttgtagtagtggttaccttttacatatcagagggtgtttagatccagaggtgtaaagttttggcgtgtcacatcggatattatataagatgtcacatggggtgatcaggctctaataaaaaaaactaattacataatctatcagtaaacagcgagatggatttattaagcctaattaatccgtcattagaaaaagtttactgcagcacagcattatcaaatcatggagcaattaggcttaaaagattcgtcttgcaaattagtcgcaatatgtgcaattagttatttttagcctatatttaatacttcatgcatgtgttaaacgtgcgatgtgacatggtgtaaaaattttacgtggaaactaaacaaggcctcaattacaaccatatcattattgtactaggttactatatttgggaaaagaatataacaacctcttatatggtgaaaattacctttgttatatttccccaggctcatgcttcatgatcatgtaattgaacttgaaaaatcaaacgttcatatttcagaactctaatttcgtcaaattcaaacttgagagaccaggttcaaccaaattgtgatgataattaggaaataataataggattagttggttatcctaaataagggccactttatgagcgccagtctaaaacatatatgtatatctatctagactgacgtataatcacaattgctaactaattttctatttgctagttgataatagtatcgttccttgccaccaaatgagctttaacgaaacaatcaccggggtctagtgttttatttgaccggggtcatagctataaaataggaaggagtataaggggactcataagaaatcatcggggtctcctaaccccaataaattgctatagcttcgccctaatgaaatatccatcatccatcgtgcatcgtcgattttaattcctttagtgggcctaatccgacccatccacatggagaggaggttattttagtttggaaaaggtacaccaaaggtccctcaacttgtcatcgagttacgaaatcgtcccccaaccgcaaaaccagataccggacacctttcaactaacaaaaccatgcactttatatcctccagttgttttgaccctggttttgtcctatgtggtggctgagtcagcgtgggacccacgtgggccccacatgtcagtattggcaagtcagcctttctctctcttttcctctcttctctcccatcctcatctctctctctctccattctctgcgactgcgaggccggcaatgcgaggtgggagaggagggcgtcggcggccggcagccagcgatcggcgacgggtggcgcgcgggcggccgggggaggcgcggtgtgcgggcggccgggagaggggcggcgcgcgggctcccccgccggctgccgcccacgaggcccgcgaggcggtggcgggggaatgagttgcgggcgggcggcagagaatgggtggcacccggccgatgggagaggaggaggtcggcgctgtacctgctcatctgggaccaccgcgtggtctctactcggaagcagaacacgcggccgatgtcatagccgccgtttaggatggcggcgtcgcagatgtcacactcctcgtcgctgctgctgacgtcggcgtcttcatgtccgccatcgccgcctccaccacccggggcagctacctcgttgcatccatgtccgccgccgccgccttgtttgggtacgaattagacgccgttgccaacatggagctcgaggacgttggtgattgcttgggcaacgttgccggcggggatcgagggagtggtgaactggcggtcgtggagatacagcggtaggcggtgccagaggtggatccagcgcggggagaagaggtagccgaggcggaagaggtcgaggacgcgggcgacggcggcgtccgggagccgccgccagtcggcgtgccggttggagggaggcgtgagcaagcggcgcggagtggactcggtgacctccgcttgcgaggacttgaagccggacatgatgaaggcagatgcgcggcggcggccggggacctcctcgtgagcggtggccggcggggcagcccgcgcatcgctcctcttcccgctgcccgcgcgctgcccctctcccgccgcccgccacagctcctccccccaccacccgcgcgccgctcctccctgggccgcccgcgcttcggtgtactttttccttttagttttaaattccagcccatgacatggatgtgccggaagtgaggcacatccaatggagacctcattgggccatccattcctcataggttgtcacccacttagcatttaggctcttcatccggtcaaggaataagttcactctgggtccctctatttgtcgtccagtgcagatccccaacttaagaaaccgtttaaataagttccctcgatagtattgtgtctggttttggctgaggtggcacctacatggctcattttggcggagcggcgacagccgcgtccagctcgtcggcatcggtcgtgctgctgctggtggtggtggtgatggcatcgtcgtcgctcgtggcggacggctcggatgtggcggtcatggcgtcctcggcgacaatgtcgatggcgagtggaaacacagacgacgacgactcccgctgctcgaagtcctccagagcccgcgccacggagcgctggacgtcggcggcgctgtggagggtggccgggggcggcacgggcgaggggcgaagcggcgaagttgaggcacgcggcgcggccacggagcgcgagcatggcggcgtcgtgtgcgcgcgcggtggtgtcggcgccgtcgaacgtgccgagccagagcccagagcctgcagccgcggcgcccctcaaaatcaaattcatcagttcttgtaatcttgttctcctagaccctgacaaatgaaaactcgcagtggttcatctgaccaaaaaagaaacaaacagtgtattggtccttggtcgaattcagattcggatggattcacgagtcgaataatcaaatcaaacgcatgactagagtagactcgatctagcaacaaaaacccagtggttcatctgaccacaacagaagcaaaacagctgaccagatgattcggatggattcagtctggctaactctaacctgacgtttcctccgcgagcgtggtaagatgaaggactccccccccctcccatggcgctgctcctcaatcctacacgccgccatggcaatacttgcagttgagcccgaacttgcaccatcccttggtggcgagctccgggcatgcatggacgtccccccgccgccgactctcatctccggcacaattcgttggtcctcctcgccatgagcgtagcgacacgctaccccgttgtggcacctcccctccctccacttcatgcacagcacactcttgtggttggcaacacccatggcgccggcgaccgcgggcgcgggtgcgggcagcagcggtgggaagttgacggcgtaggagctcggcctctctgccgccgccgagtccatcgcgctaggcaagtcccgcgcgtcgttcaacctgaatacatgcgggcggctgccgcggcttccgccgggttatccggaggcggaggcaggcgcagcgggcaacgagaagaggggcggcggccgccatcggtaggcccatgggggtgggaatggaggacgtccttatctccgccggcgagaggagggattagaggggagagatgaagagaggggagatggggagggagagaggaggaagaagaggaggggattgagaatgacaggtgggccccaccattttttgaaattattgtatgtgtgaagctgacatgtgggtcccagaggttttgttatttttcacggtcgaattgccacgtaagcaccacgtcagataaaaacaccgtccaaaccgctatgggacctatgtcactggttttgacagccgagggacctgttgtatctggtttttcagttgaaggacgaaaatcggattcgttgacaagtcaagggacctcagatgaacttatttctccggccaatgagcgaaggctgtgtttcacaccaaaattggaaagtttggttgaaattagaacaatgtgacggaaaagttgaaaatttatgtgtgtaggaaagttttgatgtgatggaaaagttggaagtttgaagaattattttttaactaaacacggccgaaatgtttcggtcgctgtatagttaatttcatgcgggcttttaatctactgggttcatctcatgctgctgctctgttagatgatagggaaaagtacgtacgaggtccttcatcttgtcatcaaactataaaatcgtctctcaaccagaaaatcaatatatgagatccttaacttacaaaaccggtttagtttaggtccttaggtggtacgtaaaatctaaaccaagaggcttctcgctttagtcgtatcacgcgacacgcctcacagctgttcgatcgtgcttgtcgtcctgacgtacatccgcgtggccgcgctctaatggctcaatgagaaggatcaacgtagtgcctgcctgccttttttttaatagatcatgtatgcctttttcctcttcattcaaataaagttttctctcaaattatttatctgatctataatccgattacaattatgtttattacaattaaatctgtcgacgttcgatgtctcgactacggtatttgcatggcatggggatcatcagtgctaggatatacacgagactgaggtaaaagagatggagacaaggacttttatacaggttcaggcccctgaattgtcaggtaataaccctacatcctgttggccaaagccggtattgctcttattcaccataatcacactagtacaatatttggggtagcatatctaactgttgtcgacatggcggtctgaagatctgactcgtagtcgataacatggtagtcttcctcctcgaatccgtgcccggcgagatcagagatagcgctttcgtctctcctgacagtatccggagacaccgtagggtactagccgtgtttatccctgaagtcgatatccggcggcgtgtcttggcgtatgtaggcttctatgttgtggcttctatgtcgattgtgttgggtgttgatcctctgtgtgtgttgatcgtggtggtcgtctttccttattcggaactcctcctatatcctatatccgaaggttgcttccgtataggacatggtatgtagtgggtcctgccgagatttagtcgactactattaggtatatggtatccataaccctgacagtatcccccgacttcaatgcaaataaacgagttcatattctcaaccgcagaccttggaggaactgttatcgagcgcacgtgaccgttctcgataagttcagagataacgttagacttcctttatcagcctcgtgcggacacctaaagggtttgtctgagtcaatctccgacgtcaaacaagaaagtacaaagcatacgactaagtctcccgtcttagtctcccgtcttgctgtaatcgagaatttggattgaagtcaagaaattttatctcggcgggtacaccatttgttcattccgtattccttgtcgagatcgatcaaccgttctcgagtgatcgagaaagtgcataatctgcgacggagccttgtcaatatttgtcgtattcgccttagtcgatcttggtgtagaaccatagagacatgcgatcttcgataatgtcgaatagaattttcctaaaatcaatactcagaaaagaatattagatacaaatagcccctgagcgaatgctcaaagggtgacatgttataatatgtatggaaaactgaaaatgaattaaacttacagaccaatgttttgtatatgagcgtctactcttttaccgactccgatcagtcagtttgttgagttatacactctccctagcccccagccttgtcgtcggagaatcgttctcggaggataagactcttggacctttgacctgcctcggttgaacaagcactgattctagcccccagccgtgaaattggaaaacccaatttccgattacacggcttggttaatacgcacggcgagaactcttacacgaccagatcttacatggtctttcgtctctgaaggatccgacaaggccttatcggctctgggcgtccccagccgaagttcccttaggttcctcagaggccttattaatacggcgtaaagggacattaggataggtttcaacgctaggtgtcttttgtggtaagggatctctgggtaaaacacttggcgattttgtgtatctgatgtcaactttgttggagtagaggtaatggaagaatcgctacacctctggtcgaggactaggtggtagtcgcaagtcgaccactagaagtagaaatagtgggagaatcgctacaccgctggtcgagaaccagatgtagtataaactcgaccactagaggtaaaggtagtgggagaatcgctacaccgcagatcgagaaccaagtgtagtttaaactcgaccactagaagtcagggtagtgggagaatcgctacaccgctagtcgagaaccagatgtagtctaaactcgaccactagaagtaaatgtacgagagatcgctacgattgactggttgagaactagtgagtaggtgtctctcgatcatttggagtcgtggtacgaggaccgctacgctgccggtcgaagactagtcgtaactgttcctcaaccatctgaagtcatggtgcgaggaccgctgcgttattgttgtagtcgtccctcgaccatctgaagttaaggtgtgagagattgctacattttactagttcgagaactagcgagtgagtagaattatctctcgaacaccaatggaagttgcggtgcgagagattgctacgtactggttcgaggaccagcgagcgagtagaattatctctcgaacaccaatggaggttgcggtgcgagagattgctacgcactggttcgaggaccggcgaacgtgtagagttatctctcgaacaccaatggaggttgcggtgcgagagattgctacgcactggttcgaggaccagcgaacgtgtagagttatctctcgaacaccaatggaagttgcggtgtgagagattgctacgtactggttcgaggaccagcgagcgagtagaattatctctcgaacaccaatggaagttgcggtgcgagaaattgctacgtactggttcgaggaccagcgagcgagtagaattatctctcgaacaccaatggaagtttcggtgcgagagattactacgtactggttcgagaaccagcgagtgagtagaattatctctcgaacaccaatggaagttgcggtgcgagagattgctacgtactggttcgagaactagcgaacgtgtagagttatctctcggacaccaatggaggttgcggtgcgagagattgctacgtactggttcgggaaccagcgagcgagtagaattatctctcgacaccaatggaagttgcggtgcgagagattgctacgtactggttcgggaaccagcgagcgagtagaattatctctcgaacaccaatggaggcgctagagttggtttattacatgtgtatctcatgtggccagcatgactcacatacccaacttgtagcatatccggatgtccgttcgcaatcatgtcgggtgatcaagccgacggcattcgcgaggaattatccattaacaaccttttctcgagtagtccagccatggccggtgctatgagataggttgtcggtcttcgttggtaggttgggcgcgacgactctgcatttgtcgagattattctcgataatacagtgtactcgaccacaacctactcgagtgctcaattgttcctgaaaaatattttctagaaggcaaaatatatagcagataatatcgagtatgtactcaaaaaactgcatggatcttctagtattatcaggatataactagcagatgtaaatatcaggtattatgtaaaccgtaaacaagcatgatttatacagaagaaaacagagggagcccctagtgttagactgtagtcggcctaacatcagaaacactcgcgcaatagatgttgtataaaaaacatgctctaggtaaacataataaatcatagatctgacaatgctgtatgatctgaataggtacgataaattgcatataaaatattgcgtacctttgtaaatacatgccggatgtatctacgaaattagtagatcaatttaagaaaccaatctaccaattaccttgttgcgtacttgttcgatatcatgcgatctgacatcttttggtatgtcgcggagcttgaggcttggatgatctcgatagaccaagttgtcgatgacgatgatggttccgatctagtcagaagatatacttggataggttggatctccccacagccgaagtcgccgagtagcttgtacttggagagtccatatctcaaacccatctcatcgaaaccttgaagcaccaaaatccccctacctggcgcgccaactgtcgacattcgatatctcgactacggtatttgcatggcatggggatcgtcggtgctaggatatacgcgagactgaggtaaaagagatggagacaaggatttttatacaggttcgggcccctgaattgtcaggtaataaccctacatcctgttggccgaagccagtattgctcttattcaccataatcacaccagtacaatatttggggtagcctatctaactgttgtcgacatggcggtctgaagatctgactcgtagtcaacaacagggtagtcttcctccttgaatccgtgcctagcgagatcaaagatagcgcttccgtctctcctgacagtatccggagacaccgtagggtactagccgtgcttatccctgaagtcgatatccggcggcgtgtcttggcgtatgtaggcttctatgttgtggcttctatgtcgattgtgttgggtgttgatcctttgtgtgtgttgatcgtggtggtcgtctttccttatccggaactcctcctatatccgaaggttgcttccgtataggacatgatatgtagtgggtcctgccgagatttagtcaactactgttaggtatgtggtatccataaccctgacaaaatcttcacaacaagatcttacatattatattacgatgaaaaaatatttatatttgtaaattacttttattatatacgtaagttacttttatcatatatatatataagttacttttagatttgactaaattacttcttagacatataaaaataaattcaataaagtctaaaagtaatttacatatattataaaagtaacttaaaacaacacaaaagtaattttatcacgatattagaagtaaattcattgtagggataaaaatatgattttatctagaaattaaatttaatcagtacatatcaacacaagtaagtttaacattttttaaaagtaacttcaatgttaattggaagtaacttttgcatggttgagaagtaactctctgtaaatccgtttaatcaccgattgtttttttcctttcgttttcgcttttcatatagaatgagaaaagaagataaaacctttcatggattgtaaataacattgatggaataacttttaggtttattgaattacttttttatgtccaagaagtaatttagtgaaatttaaatgtaatttagatatattatccaagtaatttatatttttttcatcaaaatataatcatgtgagattttgttataaagatttaattgttacgaacacaacagtgtaatcggatcatagattggatgagtagtttaagagaaaattttatttgaagtataggtagatactatctttaatagatggagtggtagctggtttagacaaaccagctaccactagctgtgtagccacatccttggtggtattgaccccggttttatctgacgtggtggccgagttaacgtgggcccacgtgtgtcccacatatcaggatgaccacgtcatcactctctctctctctctttccctttttctttcctttcttcccctctcccactcttctcgtctggggaagttggccagtgagtggacaggaggctggcggggcgagtgtaacatcccggcctagagcttaataggattaatagaatactcgtaccaacaagttgcaacttcttttccggaagccgatcttgtcacgtcctgataaattcattccaaaataaaattcattttctaaaaggaataatagaattaattaaaattcgaaaaagaaattggcaaacactaaaaatacgtacaagaaaaattcaaatgtggcccggagaatttttgttaaattctccttggtctaaaaggagccctcaaattttacttgaattttcagagcaccggaaataattattaagcaacaaaaacaattatcaaagtttaataaaaagaaaaaacctaaaaataattctcctcttcctcctttgggccaagcccagcccgaagtccttctctcctccctctctttctctccctccccttctctccctctctctctcccgggcctctcttcccctcccgggcagcccactccctcctctcctcctccttctgggccgcccctccctcctctccttcccggcccaccttttctccctcctctcctcctgggccgcctcggcttcgcccggcccaagccgagccgcgctcccacccgtgccgcgcgcgtgcgcgcgctgaccgcgcgccccgcgtggggcccacgcgccaggccgccgtcgccttcctcctccagccgcccggccacctctctctctctcccgtgaaaaccctactcctttcctccctcaaatccgtgtgattcgctcatgggattccaaaattaaataggggaaattaatccccattgaatcctcttcaattgcccccaaattcccccttgattcgtgccttcaatccccgggaacggacgcgccaagtccggccgccttccattgccgccggccgtggttcccgccgccgttcccgctcctcccgtggccggctccctccccgcgcctataaaatgcaaccccctcgctccgttctaccattttagcctcctcccaagcccccccccgtggcctcaccacctctccccgccttctccttctctccctccggcgccggccttcctccagccgcccctgccgccgcgtcaccacgccggccggtcgcgccgtcgcctcctccagcaccgcagccgcctcctcttcgccggcctaccctccgtttcccgcggagacctccggaagtgcctccccgccggcaaccgtggtgttgccgccacgatttcgcctccggccgcctctgccgcgtccccggtgcgccggccgacgtcgccaccacctctcccggcaccggagtgccgtcctctctcccggccaggccacggtgtcgcccgaatttcgccggaacgccgtcatctccgcgccggcctctccttcctcctcgtcggctcgtcgccccgctgcaccaccaccttcaccaacatcgcagcggcgtgttccacgccgtcccctcctccgctcagccgctgctgcctgccatcatcgtttcatcgtcgtctccgatcgttctcgtcgtcgacgtcccgtcggtcgcccggctcgtcgtctcgcggcgccgcctccgtcatcgtcatcgctgcggcgtgttccacgccgtcctcgtccccgtgcagccgctgccggctgtcctcgtcgcctcctcgccggtcccggtcgtcgtcgttgccgtcgtcctctcgtcgttcccggtcgtcgtgacgttcgtccctccgtcgagccgttctcgttcgtcgtccgcgttcgtcaagcgagctgctgcagccctgtcctcttcttcgtcctcgcctccgcgtcgtcaagccccgtgccggccgcgtctcgccttcgttcaaggatcgccgccgaagtcgttccctcgccgtccgtctccgccgcgcccgttcgtcgttgtcgttcccacgcctcgtcgcgtggtggtaaggtttcctcctctcgttgccccgtcctcgtcctttcggtgtcgcccgtgcccgttgtgcggttgtcgaccccggtacccgtgtaccggtgtcggtagtcgttcgcttgtgtgtgtggtgaccctgttagtgtgcccactcggaagccgcgtggtttcacgtgtgcagtccgcgtggtgtctagtggagtccgtttgtcggccactcgcctcggttgacacacggggtccgcttccgtcgacccgtggaccgtctctgtgtactcggtctaccgcggtcctttaggttgacatgtggggtccgcatgtcaacggcgcagccttcctgtcttttccaggctagcgcttccacatgttttataattgcaaagcttaattataataatccgcaaatctccatataacagcattaaacttcggatgatcatatcttggtcatacgaactccgaatcgacccgttcaagtctcctaatgtttgttaaaacctaaagaaccctgtgctttctttttatgtattgttattgcttctttataggcttgtagctttgcttgtgtgcttcgcgtagctttcgtcgttccggaggttcccgaagcgtggttcgcggtcgtcgccgaaggttcggaaggccgttctctctgagcaaggcaagtcacatcatccttgagcatattgaatcccagtttataaaattattttgatttaaattaatgcattaccgctttatttaaattcccgcgttatcactgttttatttagccatgcctatttatcgttgttaagacattattattgctattgttattattaccttgttcaccctaggaaaataaaaccccaactagtgggtactctatttatggttccactagtatgaacttaggtagatgcttcgctggttaattaggcaacattaggtggttttataactttagactttgggaagtctcatatcatttggacactatggaattgttggattatggtggaattggacatacacctctcttcctctttcaaaacccctaaaacctgttttcgatggggtttgggtgcatgccagttgtgggaagtagcaccccggccactataaggattaagctcgggcctctgttgcaaagcactaccgtacttccacatgtctagtgggtaaggcttagtttgtggctcagtctggttataaacaaaagtacacggatggaggtggatgaagtcgggggtcgatggacattctccagggcaaatgaaggctacacgagctgcggcccggtagtcgagatgtcgtggcagagggttggtgccctgctacttggggctcagtcctgcctgcctgtcccggaggttccggccgtaggcgggattgggtcggtactcttgtctatggctaggatgggttggaaactatgtcacgtcttccgtccgtataccgtggtggtatgtggcacgtggttacacgtgaggaagatgtgtcttgtgggtaaagatgtacacctctgatcagagtataatctattcgaatagccgcgccctcggttatgggcaagccgagcaatgtacccaagtcagtgttctaattcttaaaatttgctcaacaactaaaatgtggaatggttggcctgggttggcttgggacgagctgggacccagggtcgggttgccagttcggtctgaatcatcgtaggccttgggttaaggcaggttcgtgagggttcacggccttgtttaataatactgtgtagctctaggatcgtctttataaaatggctttgggcaactaagtgacttttaaatgctgtttactgcaaaacttaacccctatattattatccccttgtaccccccttgcattaattatgcatctccggtgtggcttgctgagtactgtggttgtactcattcttgctcaatctttcccctcttcagtaagagaagctttggagaagatgtcttaggtggagtcctggcttataccccagttgagcgcctgtgaagatggagccgtaggcccgctagtccgctgctgtttatttttgattgtcaggcctgaagcgcctttgtaataatgtaaatattatcgatataataaagatgtgtcttttatatcatgtttgtgtggtgtaccccggcttttcctgggacggggattaatacactggcgttcgggaaaaggcaattttcccggtcgcgacagatctcgaaagaaatctgaggttaagcatgcttggcctggagcaatttcttcccgagtgcatataagtgaggagaaagtgtgcagaaaagacttgtccagatataagcgggcctgtatatctgattttctggttgagggacgattttataatttgatgacaagttgagggacctcatatgtaccttttcctttgatgatattggccatgtttagattccaccctaaaatttttcaccctgtcacatcaaacgtttgaacacctgcatgaagtattaaatatttgaacacctgcatgaagtattaaatataggctaaaaaatgactaattacacatattgcaactaatttgcgagatgaatcttttaagcctaactagaaaggtagcccgcgcacatgcgcgggcaccttatgcaagtggatttttattaaaatatcctgtattatgtcctaaactaaaattaaacttattttgtgtgatttttattaaaatatcttgtattatgtcctaaactaaaattaaacttattttaaaatgcaatcaaacaaaaaagatattattcgatttcttttggggttataagatatccttctgacgagttaaaataccctaaattaaatttgtgatggaaatattagtgcatataacttggcatggggtaaaggcatacgttctaaattttctcccataaaatattgaagtaatggtcatagtatatttagctaatcatcactaaagtggattgtcttgtaatgaatacatgtttctagattgttctacgtcaaaactttacaatgtactatagcaagtttaacaaaaaaaaaagaaatggacatggtctttaattcctatatggaactgacttgatttattgctaacgccactgcaatgttgttccactgttaaaattcctaggtacaacccaaatgcttatcagtatgatgtttaaccaaccacacttttcaacctgttgtctatattgctagatgaatacctgctatgattagtgacttcatagatcatatgtgtaattcggacactatgattgtctttcttaaaagtatttatttatcgcctacaaagatcattctaaaagtatcaaggtcaatttgtataggtacatagccctcatatgcatgttaagagaaattaattaagttggcataaagtcgttagatgcctaacaggatataagtaatagatggaggtccatttgtgtttttttgcccatatggataattttaattgtcaaggagataaaaacagagagaaaagaatggtgcacgttgtacacaggtaggtagggagggagggagggaggtttgggatgtttttctaaatgactaatctaacaacctaaaataatgtgtcagatgtttatgtcgaaaccgatggttggatgttttgttttcttaagagcatatataaaatgtgtaatgaacttttaacaccgcatgccgcaaagaaggagggagggaaggagatttagggtgttctttttaaaaatatatatctaatgacctaaaataatgtgtcaatccattgaaaataatgtatccatcgatttatgtcaaatacgatggttggatgttttttccccaaaatttctaagatttttctttaatttaagaacgtcatgtagcagcttaccttttattgttctcgcccttgccttgcattctcctcgttttgcatgagatgatagaaataaggaattgcagacaagacatcttgcaagtatttataagatgtttaatggattttaacactacatgaaggtgggagggagggagggaggtttgggttgttttcttattaaaaaaaattaacaaatcgatatcgaatgctttgtttgtttttaagattttcttgtattttctttaatttaatagtaccatttagcagcttagaagcattcgtagtatgtttagagtgacaaagcgagagctactagacctaataggtggaggtctatttgtggttttcttaatgtcaaaataattgtgattttaatttgtcatgaagatagtttgttggtacctacgtgatgtggaggttccggatgtgtgctttttgtttagaataaaagatctaaacttctaaattaaaataatggatcgtcgatctaaataaaaatcgatggtcagattagagtgctacttgacaacctaggagtgcttgtaaggtgccatttggcggcttagtcgtattcgtacgatattcaatgaacttttagtatacaatagtcttttttctgaaattgctaagattttatttaatttaagtatgtcaaatagtagcttaaaggtgtttataaaatgtgtaatggtttttaacactgcatgggggtggggagggagggagggagggagagaggtttgggatttttttattaaaaaaatctaacaacctaaagccatcaatttaagaagaaattgaatgttggctgctttatattttttgaagattttctaagtagaaattgaatgtcggctgctttgtatttattaagattttctattattttctctaatttaatagcaccacgtagcgatttagaagtgttcgtaggatattttaagtgacggagggatagctgctagagctagtagttggtctatttgtaattttttttgcctataagaatagttttgattttagtttctcatgaaatagaaaaataacaaaggaaagacagaagggaagtacgtacagtacatacttacgtttgtacgttagtaccatatatgttggtttcggatgtttttttacaaaatagatcaaaccatccaaaataatgggtctaccaattcaagtaaaaatagatggttggatttctttttatttattagagtgccacttgacaacttgagagcgtttatagggtgccacttggcggtttgagagtgtttataggaagtttaatagacttttagtatataatagatagatagatagattgcttcatgatttgacaatatagtgttacagtaaacatttgctaattacagattaattatacttaataaattcgtctcttggtttaccgacgaattctgtaattagttttttttattattgtccaaacacccaaacacgtcgtaactttacacctctagatctaaatcccatagctatagtaggactagctatacatttatcacaaatttaatccgcccgcgctaactaccgaagaagccactgctgctgtcctagcaaactgccggccggggtttttgggctgctcagctggtgccggcaacccgtgctgacctggaggtgatgcgagtgtgggggaaagcttgtcgtgtcgatggagacccaacacatctatgtgatataactaattactccattcgatccagaatataagaagtattagaatttgacatagttattaaaaaaatagatagaaataagtgatggagggttgtgattaaataggtagtggaggtaggtaggaaaagtgaatggtggagggttgtgattggttaggaagagagttggtggagaagttatattttgggacaaatcctaaaagctaaaaattgttatattttgagacgaatggagtaaatcggaaaggatcaatctcattaacattctcacgttttttcaacaactagttgagtgccttgcgttgctgcaggaaaaaaatagtaaattaaaatcacaatgagaaaaatgatgttaaaaaaatcattgagcgtaaatttgttgcaacaaaaacattaaaataacatgaacaataattacataatatacactaaaaccaagcctacaaaactaatcaaacactggcacatgcatgtatgtatattggatttctgctgacacgtgaatttatcgagcaagtataataattttaaccataaaatcaaccagtttgatctcaatcagcaatctacccgcccacgtacaacttgcttttgttttattacttggacatcctcttaatgctacgacattatttgataattgcaaatatgacatccacattactgaaaaatgccttccatgaaacatgatacacatagacctaacattgcaatcgtgcacatacatcaagcggttttagctatatgcatcatacgatgcagatgatcacgttaaaaattaaaaattttatcggccatgatatatacaaaccaaatttatatcaaattcaaaagttactttaaaactgatgagcatagtagatatctccaggcaacgcaatgtcaatcaatagaacggcgacggtgacgatcagttctcatggtatttgctcaggggaaggacttgattgtcatgattgccgtctttaaagggcacaccctgaaaatggatgacaaacaaagtcgtttggtggtcttgttaggtaaaaaaaaaacacaattctatatatctgccatcagttttaaaggaagaaacaaatgatgcttgtatataggggtagttaggattactgaaccataggttggacacttgaaaatattccagtggagttcagggcgttaatagcaacaccatgaaccttcaaatatggagtataaggtaacaatatataccataccatagcaaggagccaatgtaacaggaaagaccaacattgaagtactgttgaaaaagacactaattccatccaaattccgttttagtacctccacagatacactgtggctgtaataaaataaagcattctcttttgtattgactccgccaatcagaaaatgttaatcagaattgtcaccaggtgataatctcaaaaccaagtagacaaatcgaatcaaacttttgcacatcatcatcgtaaatggggtaaatctttttttagttgaaactggccactcctggagaaatgatctttgttgggccactaaaaaatcacattagtcccggtttgagtaaaaacatatttagtcccgatttgaaaatacagtacttcaaccggaactaaatattattcttactcccgattcaaaaacaggtttgacggagcgtggggctcctcaccgggagaccgcgcaggcccccctttgccgattcggccgggggcgctaagtgaggttcttcgccctcgatctgaggaacgtcagcgagagaggaagtgcacaagacacgggcgacgtagacaggttcgagccgctgagaagcgtaacaccctactcctgtgttctggtggatctgtgcgtgaaggaataccgagagccggagagcgagagagagttcaggctctagaacccctctttctctttttttcccctctttttcccccttctaggcctggtcctcctttttatctggtcaggggtcaccacatgggcctctagctgcctaagaaaggaaacatgctttttacaatgagggctagtctacagccggaagtgacctctgacaagcagagcacacgcctccagccccgctcgccagctttcccggtggacgcccatttcaaccttcattcaatggccagcgacttccttgccatgcttgcgctgaagcctggaatggatctgaccgggactgacataccaactccaggagttagcatgccggctccggctagggacgagagccaggaagctctcatcattccgacgggacggggcgaggcgtgtgacaggccgcctgttgccacctaacccgcgatctgaccggtctgtgaccggtcacacgccgcgaccggtcacggaccggataagcgtgcgctgcgccgcattaaatgcggcgtggcgcgctcgtccaacccgctataaatgcggttaggtgagccccgctgtgctcacctaacccacacacgtggcgccaaaaccacagggggtcggggcgccccnacccttggggccgaaacgggggcggcccgacccctcggggagacagaggaggggtggccacgtcaccctcgggcccgaccccccccagggggtcaggccacgtgggtgaccgcggctacccaagcctctagtcacgatacccccgaccccatgtcaccgacaaggttagagccctattatttttagcggttgtttataccaaccagcaccaaacttttaaaaaatacaaaaatccctttccgagccgtcctcaccgcctcgtcgatccttatcccctcatcatctcctcctctcattttctccacctcctccctctccccatctcctccccctcacccctcccttctctgacaacgagaggcctcaccctctctctctatttatatatgaggtaggctgtgcaaagccaacgaatctaacacaacttagctaggactcctaactatgtaggaaaccctctcttgcaagtaaacaacttatctctttccttatctctatcaaacttcccgaattcggactcccttacaaattcgactcctctttccatacgtacacaattcctcttgtatatcatatggatttcttcatcaccacatgcattgtcctctagccttaagtatcccgcatgatctcttgatccttggacatcaacttctcccaagttgactccgatctttcaccggcaacactctcccgaggcctcaagcaacacctacacatgcaacaaccaagagaccatattccgagcccaagttcgtcccaacttgactcacattagtataacaatagtatccatacgcatagaaaccatctagaagccaaatccaacaaatcaacccgaaaccgacatcgatcaggatcatgccggtcagaccgtcgggccggccggtctgaccgccgcaacacccgcggtctaaccggcgacactcagccggtctgaccgccagggtcaaccaaaacagctcacttcacaaaatcaaccatcttataaaatctctaaattaacattagcaaaccagcaatattttcatcacaaaatctaaatcaactccttgattctacaatctccctcttgatgaaaatcattggcaaacaacaaatggtttgtggtgttttgtgaagcaaatccaaaatgcatcttcaatgccaaaaaaaaattttcaaagaaaaatctctcacttttgaaaagaaagaaattccttctacttatgacaattatgcacaatttgttaccttgttctcccccttttgacaatgagttcatcaacattttttttccggagagctttgctataccaaaagtaattcaagaacatgtgttgcaataacaaggtagatggcatgacaatctagttaacaagcatgcatagaagtgtaaacatgaacctaagatattgtcaaaaagatcaaatcaacactaaagattcatgacttcaaacgatttataataaaatatattaacaagcacatagactgaaaaataaacactatacatatagacctattgcatgtattactctttctcaaattagctttagcacaaaaacaatcaagagaattttttcactttgatttgagcctttttctcttttttttttcaattattccgggcacgtcctcgtcgtcaagactgtttccaaggattcggcacccattacttttgctcacatcgaatacatacttgttgtcaagactgtttgcaaggattcggtattcatttttttcatagatatttttttattatttgtttattctcttgcacaatgagcatttacaaagctatttgaggaataacaattcaataaagcatatatataaagcatttataaattaaaccatatgctagcatcaatattgcatatttgcttaattcaagtcataaattatatgtcatgtatcaaatcacttaaagacaatatcaaaagctcatataaaaactaacatgcactcaagctagtctagtcatcacatcacctaacatgtattgctagcatataccggaatatactaaggcacaaacaaagctcttcttctttttcatttttttatatttttttcaacttctttttcttttttttatcacaccatacatgaataaaacatgtatgcaaaaaggaaaaaaaaataagaaaagaaaacatgaatgcaacaaagagccaaaactcccctcaattgatgccaaaaggatgaacaattcccaactcgcctcgaagaaaagcaaattgaggagaatccaacggttttgtgaaaatacctgccaattgcaattgagtatcaacaaaagccaattcaacatctcccttctcaacatgatccctcaaaaagtgatagcgaataccagtgtgcttcgtgcgtgagtgttgtacaggattcttagcaatattaatagcactagtgttgtcacaaagaagaggaacttcctcaaaagtaagaccataatctctcaaagttgaaataagccaaagaatctgagaacaacaactagcagcagtaacatattcagcctcagcagttgattaagcaacattagactgtttcctagaagaccaagcaatcaaagaaataccaagaaaatgacatgttccactagtacttttcctatcaattctacacccaccaaaatccgcatccgaataaccactcaagcatatagaagacgatgtagaacaccaaattccaaattctagagtatgttgcaaatacctcatgatgcgtttaacatcttgacgatgtgaagcacgtggagaagcttgaaaacgagcatagaaacacacaacaaattgaatgtctagtctcgaagcagtgagatagagtaaagatccaatcatgctcctatactccttttgatccacaacttcaccatcttcatccggatccaacacagcagttgatcccatcggtgtagaaattggcttgcaatccgccatcttgaagcgccttaaaagatccttggtgtacttcgtttgatgcacaaacgtaccttgcttcatttgcttgatttgaagtcccaaaaagtaagtcaactctcccatcatactcatttcgaattccctgcgcatagtctcagcaaactacacaaccaaacggtgagatgaacaaccaaagatgatatcttccacataaatctgaacaaaaagttgatcaccaccatgcttaagaacaaagagagttttatccacttttcccattgtaaaacctttagcaagcaaaaagtttttcaatctatcataccatgccctcggagcttgttttagaccatacaaagcttttgacaaacgaaaaacatggttgggaaaatcaggattttcaaaaccgggtggttgttttatataaacttcctcctttatataaccattataaccattaagaaaagcacttttcacatccatttgaaacaatttaaaaccttttgaagcagcaagagccaacaaaaatttaattgcctcaattctagcaacaggagcaaaagtttcatcataatccaacccctccatttgagtaaaaccctgagcaacaagcctagccttatttctcacaatcaaaccatcctcattttgtttgtttttgaaaacccatttagttccattaatattatgaccaacaagaggttcaactaaaaaccaaactttgtttctttcaaaattctctagttcttcatgcatggcattgatccatgattcatcagttaaggcatgagtaacatctttgggttcaaaagtagcaacaaatgcagaatttacatgagtatcacgagttgttaccttagaccttgtggtccattctctaatgttacctattatgtgttctggaggatgtcgtcgttgaatatgaagtggagcagaaacatctaatgaaatttcgtgttctgcatcatgatttgacgaagtagaaacttctggaggtcctctattattagcacccgacgaacccgaagatgagcccccaggccggtttgactgctcctctgcctgcggtctgatcggcggtgggtcgacggtctgaccggccatgacccgttagtcgtcttcctcatcgtcgctttcctccatgaaaatatcctccccttgaacctgtgataatgtacctgaaatatcgggtcttgtaccttcactagcctcatcaaaagtgacttcgcaagtctcaacaactttgttagtgtctaaaacaagtacacggtaacctcgagaatgtgcagagtaaccaagcataagcccatcagtagaacgtgactcaaattttccaaatttcccgatttcaacacaaagcacttacacccaaaaacacgcaaatgttaaatcttaggtgtatgaccaaatcgaagctcataagatgtttttccaagttttgatctcaagaaaacacgattggaaatataacatgcagtgttaacagcttcagcccaaaatcttctaggtgtatggtactcatcaagcatagtcctagccatttcaaccaaagaacgattctttatttcgacaacaccattttgttgaggaacacgtggagatgaaaattgatgttcaagacctttttctttgcaaaaactttcaaaaaaaagcatttttgaactcactaccattatcacttcgaatagttcttaaagatccagaaaattcaagagccaaacgaagatacaaacttttaaagtgttcaaaagcctcatctttagtagccataaagtaaacccaagaatatagagaaaaatcgtcaacaataaccaacatataccactttcctccgacggattgctctctagctggaccaacagtgtccatatgtagaagctgtcccggtgcatccgtcatcacagaaataataggagtatgtgaagaagcaaccatcttagcatgacgacatggcgaacaaaccagatcacgatctttcttaagtttaggcaaaccacgaacaaaatcagaaccactaagtctagtaagatgatcaaaacctacatgtccaagtctacgatgccaaaacatcacatctttagaaaattttgcaacaagacatgtaatctctgaagaaacacttctttcaaaatcagccttaaaaactcttccatatcgagaaacattaagcacaacatcgccagaagaattaaagacttacttccagttttcttgaacaacacatcaaaatcctcat

SEQ ID NO: 7448 - DNA, 56626 bp, Oryza sativa
agctttgccgtgacatgtctcatgtgttgggacgaggctcatgtgttgggcagtcgcggagtgcgggtaaagtgtacatccactgcagtgtgagtaaaccaaatctattcgaatagccttgctcgcagttattgagcaccgggacgtgtgttacacttggctagactctaaattcttaacttgtgtgggatgggatattgcatgatgatttttatgctgttggagccacttcctaagaggagggaaggtggacgtcctcagaaaaccatgacgactcaatggcgggaagctatccttgggatcacaatggatggtggacagaaccgtcgttgtttaatgtgaacactggtattaaaatttgatcagtctatgctaggttttaggcttgtgaaaagatttgcaaaacttgctttgcgcaaaagaacctggagccattccttgaaataccctctatcatatgcatcgttgctgtggtggcttgctgagtaaggttggtactcaccctttctatttaaatatcttttaggagagtgatgaagagaagcccttgtcggtacgcttgcgtatccaagaagatgatcggagtgcggtcttgttctaggtctcgttccccagtcggctacctgtagcatgtcaaccgggcccttatattattttgtcttccggtgctattctctgatagttgttggcctacctggccctaatgtaagtatttaactattttagcctgaattcattcgtgatatgttgtgattcaactatgtatgtgtgtaccaactaatgatccagggattggtacggataaacatagatgatttccgatttccaaaattgggggtctacatagcatatccggatgtctgttcataatcatgtcaggtgatcaaaccgacaatgttcgcgaggaattatctgttaacaaccttttctcaaatagcccagccgtaaccggtgctatacatgagataagtttttgttcttcataggtatgttgggtgtgacaactcacattttttcgagaacgttctcgataatggggtgtactcgaccacacctactcgtgtgctcaattgttcctgaaaaatattgtctagaaggcaagatatatagtagagaatatcgagtatgtactaaaaaaaactgcatgaatcttctaatattattaggatataacgatcagattaaatatcaggtattatgtaaaccgtaaacaagcatgatttatatataagaaaatagagcgagctcccagtattagaccgtagtcggcctaacaccagaaacattcgcacaatagatattgtatagaaaacatgctctaggtaaacataataaattttggatccgacaatgttgtatagatctggaaaataggtacgataaattgcatataaaatattacgtacctttatagatacatgccggatgtatctacgaaatcagtaaattaatttaaaaaatcaatccactatttacctcgattagccgtgctaatcaccttgtgtagatgtagccaacatgtcttgatcagtgcacatttcatctcgaatgttgtttgttgtgactatgcagaataccgtggggacacgctagcttgctcgatttgattggtgatgtgcttggcttggacttaaccagccgatgccctgcaccgttcggatccgtcatcaagatgcaggaaaccgaagtctctcaaaaccgacattgctgagtcattattccccgcgatgacgtcttgaagcttaagcgatctcgatagatcgaatttgttgacgatgatggttccgatctcgtcgggggggggggacacttcggttgggtcagatatccctacagttgaagttgtcgagtagtttgttgttggagaatccatctcttaaacccatctcgtcgaaaccttgaagcaccaaaatccccctaccgggtgcaccactgtcggtgtttgagatcacaactagggtatttggattgtatggggatcattggtaccagggtatatgtgagattgaggtaaaagagatagagacaatgatttttatacaggttcgggccccttatctgataggtaatagccctactcctgttggtcaaagccggtgtcactcttattcatcacaatcactccaatacaataattgggatagcctatctagctgtcgtcgacttggcggcatggataactaactcgtagtcgacgacaggttagtcttcctcctcgagtccgaactcatcgagatcagagatggcgctagatccctgttgtcggcctccgtaggcaccggatggggtatgtctaggcttacctttgtcatcgttatatggcggcgtgtgttggcttgtgtgtatgttgtgtatgttatatttacacccatagatgcctccttgtccaagtagaactagggagaccaatatggatacgatccgagtagtccttgtcgttttcatatataactctatccgtccttccttatccggaactccttctatatacgaggtatgattccgtataagatttggtacatggtggaccctgccgagcttagtcaactactattaggtatgttgtatccataaccctgtgtagcgcccgttccgtcgtggcgcctagcgggaaaatttaaattctaaaaactctaattgcgaaaattgtttctttgcttgttgtcagtctccgtgccaattccaaatctcaaatccccaatccatcgtcaaattcaaatccctaatctcaatccttctcgaaaagtctattttgcctccctcaggttcggtgggccgattccctctcggcccatctctctctctgtctctctctctcccctccctcgctctgcccgtgcgccgcacgcgtgtgcgcgtgagccgcgccgagcgcctctccctccctctccgctctcgctgccgttcccgccgacgccgcccaaatagccgcgctgcccattgcttcccgcgcgcgcgcactgtggtggccgatcggccagtcgccaccaccgtcagccctctaccgcgcctgagcccgcgcctgccgcccgtgtcgccgctccgttccaaaccgcccccgccgtcatcgccgtcgtcacgagtcggccccgccactccgcgcgctagcttccaagggatggaggcagagctcctcctccctctgccgcgtagccctctctccctcctccttttcctaaagaggcaagaggaaagcccccctttctctcctcctttttcccttttctctcccgccggcgtcacacccccccgccccgtcgccgttttggccgcgaccgacatcgcctcctatttaaccaaggcgccctcccatcgattcctcctcccgtttcgctcgccaccaccgcgccattgccgcccctctgtctcgcctccgccgttcatcgccaagcaccgggagagccggagcgtgcgaaggacgcgtgaaggggacttcgggcgcatcgtcttcctccgcttccctggcccgaggccggagagatcactcccgtgccgtcggcccatcgtcactgcgccccgtcccgcacggtagtgcatctccccgttcttcctcctcgttccccctcctccccttagctttcggtagaagcttgtgtagcctccccatagctagctggcgccgccccaagccttgccgccgcccactgtgtgctcgccgccgtcgccgcccgagctcggtagcgcctctcgtcgccggcctccctcggtgcgtttccctcctaatccggcgcaaggaatggattcccggagtcgcgtagatgctctagctcgcccgaattgatctcccgtcacgctgtcgccgtttccctcttctctcaccgccggatgccgccgccgcaatccgccgccgtcgaactccctccggcgaatccaagccgttggctcgtctcccctcgtctcgtgcaaccacccggtgtgctcgctttcgcctgtatcgccgtggttcgccccgccgttcgcagccgacatcgtcgtttacctcccgctggaccgcgtggcagccacgtaggcgccacgtcggcactagctcggccaagaccgggtcgagccgaccccagtcagctgctccctctggccccgctcacgcgcgcggtccaccgcgagccgtgaggctgcgcgtgggcccgccgcatccgcgtcctccgcgaaccgcgcgcgtgcaccgcgtctctctccccgaaccctagcgcgcgccgcgtgctccctccgcacggtgagccgagccaccgacaagcgggtcccactcgggaccacgcgagaaggatccggcctaccggctccctctctcctcccctctcgcgcgtgccttgggctgccttctcgggccggccggcccattaagctcagccaagccgcgcccttttctctcgggccgcgccctagccgcccgagggaagtctatttctcctccctttatcttttcctttttcaaaagggtttaattaaatccttttcctctagatcaaaaatccaataatcttagaaattcaatatctcctcaaccgtatgtccgtttgactccgttcaacttccaaaattcctcagatctcgagatctatctaatggcacgcttagaggtcaataatagggctttattttcgccgtttgttgagttgtcccgtttcgcgtgtagtttcggagcccgaagacccgcagtgcgaggatttcgaggatcaagctcaagatctcgagcaaggcaagtcacctttgatcatcttgcacctataatttaaatctaagtatttctttttcgcaaatattgcataaataggattatcacgagtaattcggccgcggcttgcgagatagcctgccggcccccaatcctaaattgctgcaaataccctccgtgaattattgaacacttaaacctcctttgtcaactgttgtgcttcgatgcacgggccttcgggcacgcgcatcggaacacctctcctcaaatttaaaatatccaatgatgggtaaaacttggggttttacaaaagacttggaaaaactcgacacctaggtcggcgcttgcgaactaaatgaatttccaaaatcgcagaccggtgaacgtaccgggagtacggtttcccgctcttgcacttaaggaccgtttccttggaatttcatccgaacataaggcaagtgcgaccacatgggtggaatgggacgcccctggctgagtaattagctaatcaagggagccatgatgccaagagacatgtggattcaacggggtggtgccggggagaacccccgggtttcctggcatagtatggtccgggacctaacctggtgttggtttgggacccctctcgttggcatatggtgaacctgtgtcggctttcgaaatgccttgttatgaaagcctcaaggtctccagacgtggccgttctgcacgggctggatgatccgggttagtaatgtcgtgtgggtaaagtataccccctctgcagaggttattaaactgttcaaacagccgtgcccacggtcataggcggatgtgaggtgattactagcgtagttttgtttgactactgcttttgtgaaattgctgttgtggaatgggttcgatgtttggaaaatttgcggctgatgggatcagccaggcccgggtggctgtttgaaagctgttgcccgggtgccaaccttgatcaattcaaaaggctgatacattgcacatactccgaccgggcgagacacactgtctcatccgtgtcgtttgagaagcactcacttagttgtttcaaaaaggagtttaaataaaatcaattgtaaaaaaacaacagcctttcccttgaagcctgcattaaacacttaattcccatggcttgctgagtactcctgtactcacccttgctctatataaataatctccccccagttgctgaagaagaggagttcttccaggagcaagtcggctacgatgagttttagggtttcggcctagttcccaagtcgcgcctgtgatgattggtccaagtcttggcttccgctttccccttttgtaatgcagttgtgagctcgggatctgtccgcagcccaacatgactgtactcctactctgtaataaagagacctctgttgctgtgatattctgtcttcctgtgataccagcactgtttcctgggactaatatcgataaacaggttaatttggagcgtcacgggctagttccgttcggggctagttcggggcatgacaccctggcaatgcgtagatacacagggccgagaataccgatttcttcaacaaggtgacatagaagatgcgtcattatattgaagaaggatggtgaaaagatcatctcaaagctgataagacattgcaccacgtcatttggtagggttgttaatatgtctaaattgatgaacttctgcgaaattgcattcaggaaagcagacaactttgttattgttgtatgtacattatcaggaagcaattatgtcagcaacacatggcagtctcttgtgagactttaggtttgtgaacgtcttctcattcacccttgttattccctttatattcgatgagtatccagacggtaccctgatgcaatccaagcattcagatatagtttccttctctgccttgctcagagtgtggctggttagatttaagtaatggcttcatttcttttttttttggatgaaggtcgtcatgttgtttcatatgtttcagatcatggcatgcttcaagtctatctttcgacttaccatatacacctaggaaccccagcaggttgacatgaaggttcttagtgaggttcatcacgtcgattgcgtggtgtacctctaaaactttccatcatggtaactcccaaaatgagactctttcttccacatcatcgcaagatcatcttcacttgctatggagtggctaccaggtccctttccaaatactatttttagatctttcactgtagcaatcacaatttttccattacgatgtttaggcctagtacggtggtctgtggtctgccttctgtttaaaatgtttgcctttctttcgtacaggatagcttacaacaagaaatcgatgatggcccatgtacacaactctcctacaatgtttcaaatgcatgctgtcagtttcacccataccacaactgtagcagcaacgtaaaagttgcagttttgtgataatttcccatgctatcgttgtagcaagctgaaacatgtcgctaatgttatagcaaactaatagtttgatcaatttaagttgtagttttctaaaatttactcataataatattaaaatagcctacacctgttgcaacgcacgggcatttttttctagttttatctacaaatttattctctgtaccctttttccataacctatttgtaagagaatggcgtatagaaacatagctagaaatgtaatatgttaaccatacatcaatagaggatgtagtttccccttaaacaaattgtttttgattggctacaacttttgtaatctctttgttttcaacttgtaacttatactctacataaattcctgaaatatatactgttgggcaaatgtggggtagtttccccttttaaaaaaaaatagaggataaagttactaaccttttggatcttttcaatttgtctaatatcaccaaaatactgtagcaagaagtttgccatgacatctcttcctcctcttcttggcagcaatggctagacgaggaacatatataggaaatgatctttagtactaggggcctaacatggtctgataatattgaatcgggactaaagattgtacagtatcgttggtttaccggtactaaagattatctttactaccggttagtattagatcagagaaatttgaggttttggtaacacaatgaaaaatcagttctccagtagtggtgatgcacagcttgcgcccgattctgtagaggggatctaggcatcgtctactgtgaagaacggcagcacgtagggaggacaaagtgaggatggggaacagctcttccgcgtgatcgattgggctcaggcagcacaacggcgagccacctctgaatcttgttagtcaactttgctatcaacatacaaataggggtcagaattcttttcttttaatgtgatcagtactcttaggaatcaggaagatcaccccatcattcagtcttttcagctcaagggtaccattaaaaaacactatcaaacatctcaaagggctctacagaagtgcacattgaaaccatctgggcttggtgcagtgtgtatgtatatgcatagaatcaaagcaaatggttaacatatatttgtttataaaggataatatcaaaccaaaccaactcttattatattacataatgaaagcacaacaacaacaacaacaacaacaacaacaacaacaacaacaacaacaacaacaacaacaacaacaacaacaacaacaacaataataataataataatcgtcttacacacctcatatatatagcatacacatataagaagttgcgcgacaaaccgtttacaatatgattacagtcacacaatccatcacaaatagattcagaaggactcctatgtaggagtaggagtaggagtatatatatatatccaccgtatatatgtcttgtactttgactggagcccacaatgcttgtacgcaacacagagaagccgtccattcatggttacttatgggtttcttctgcgcccgccgtcacgaccacctggcattgttcaaacaaaagatttcaaataatgtatcagtataactgatagttatatatacttcagtgaattgttttgtatatacatcaagtacatgcgatttattttgttctgtgttataattttgacagttttatattcttaaaactgccaagattttgtctttttttttctggctgaaatatattgaatttagatatggtacttcgaagctaggtctaatactatcgatattacatgtccatttttttaaaaaatttctgatgacatttgttagtttatgtatggatattgattgtgcaccggaagcttatatgcatatgatacgttgtccaccataataattatagaaggtatactattataaattatttcgcaccgagaaaggttttccttttttagagaaaatttcacaaaactacaagtaatttgaggtgatatatcactaaactacagatttaacaataaaattatcacaaaactaccggtttaagactaagtatcacaaaactatggatttaataataaaattatcacaaagctacatgttttggggtttaaattcttagcactaatgttatgattgatttataaccatccaagttttataattaaattgatgctaaaccagtgataactttgttattaaatctgtagttttgtgatattccaccttaaatctgtagttttgtgatatatcatcttaaaatctgtagttttgtgataattggtaaatatatctgtagttttgtgaaatttactcttttttttaacatcgaaaggccttctttgatctgcaagaggggtatacgtgctctgtttcgaagtgtttctgatggggatgttacctttaacaggctttctctgattagattgtgcactacctaatgatgtgccagcatctgcaacaaggaaaaataagagagaaattagtcaggcatatatgtatacccttgctttgtgtttacacgattgaaaaacaatcttttcggaggagtctctctctctatatatatatatgtacgtgctgtgtttgtagagaaaaactgccactctttccatctgcataaatgtacatgcgtttctgaaaaatgtacaatatcgtgacgcgtgtcactgcatatatatatacatgcatgcatgtgtgatcgatcgacgtgaacacgaagaaataacaggcgtaccaacgagctagaacgtactcactcagctcgctagtctctgaatgcttgcatcgtctaataattaatttcttacctcctgtaaaagtatgcatcttgccagacggctctaatacttgtggaacaccgtggggagctgttcttgatagagttagcgatgcacccccatcgggggtatgccctgatcgacatgaagaaaaagaatataataacagcaaatgacgatgctcggatttttcatatatacagtacaatggaagaaattaaccaactggccgtaggtatgcatgcatgtgcctgcatgaggtcgatgtcaacttgttaataataagtggtactttatctgttttatacttcctctgtttcagattataaaatatttttgactttggacaaagtcaaactgttttaagtttaaccaagtttattgaaaaaaaatagaaatatattcgatctaagataaagttgttataaaaatatatttaattattaatttaataaaactaatttggtaatgtaaatattactatatttttttataaatttagttaaacttaaagaagtttgactttaaccaaagtcaaaacatcttataacctgaaacggagggagtattatataagacgtttttttttgtcaaatatctttttgtttgttcaatcagttcataataaaactaatttggtgtcgttgatatcgctatatttttctataaacttcatcgtatatttttaaagtttaattaaaacaaaagtcaagacgtgttataatatgaaacagagggaatagttatatattttatgatgaaattagttagttcatgttccatcagtcgttgtaacttattaggtactccctccgtttcagtcgttgtaacttgttaggtactccctccctccgtttcaggttataagacgtttaacttttatcaaagttaaactgtttcaagttttactaagtttataaacaaatatagtaatatttataatactaaattagtttcatcaaataaataattgaatattttcataataaatttgtcatggtttgaaaatgttgttttgtataaacttagtcaaacttaaaacagtttgactttgaccaaagtcaaaatgtcttataacctaaaacggaggtagtatttaattttatttaaaatgaagaaattatatactccctccgtcccaaaatataatcattttttgattctgacacggcctccgagatgctactttgaccaacaatatctgtaaaagtaagatgtcttaaataaaggagtaacatatattaggatagtttggataatgataaatctagtaacatcaattttatatgattgatctttttttatttttttactattaatagtcaaagttgaaaatgtttgacttgtcactatgctaaaaatgcttatattttgggatgaagggagtattcaatttcaagcacgaagcaggttttgaaatttccaaaccccccccccccaaccggtaagatcatatctcacccaaaattttccattttatgcaattttttgtgatttttgtcaaattttattcaaattcattcgaaatcagttaaaatttcaaataatttcggccaaattttttttgaaatttccaaaatttcgcccccccccggggggggggcagaaatagcaatttcgaaatttaaaaccttggcacgaagtacccacttggatcggcgtcctcggccgggacgaacgtccagagggagagggcattggccaagcgcttctcctgcaggtggacggtcctcttggtcgagacgccagtgaagatgtggttggagtagctcccactcttgatgtagcatacgcccttgtgtatctcctccaacgtccagcgttctccaacatctcttccctggccaagaacaacatccagccgctgccgcccgtcgccacgactactcttgacgacgaggggcttgctgttgtttttcaggacgaagttctggttagttgtgctgccgccgccgccggtggcctcgtcgacgaccttgtaccatatcagctgcatgcagagaaagccaattataccggaattcattcattaattaattaacaagatccagagaagaacatatatgcatgcctgtcggccataggagttgctggagggttgcgttctctccggatcttccacaaggacgacgttgccggacgtgtccacggcgaggtagttcttgcctccgttatcgacgatgaagatcctgtaggtttcatgcccaatatttgctgtgcatttcgacatcgaaacaagctggatctacgtttctcgcagcaaaaaaaaaaggtccaccgagatgaagtggaggaagagaggaggacgaacaggcgaacaggagatattatggaatacggatggatgtgttagctgaatacagaatgtattatttataatatattgtacgcgcaaataccagccaatctgaatgtttatctagagatcgcgagagagtacttctcggtatagtactccctccgtgttttaatatatggcgccattaaatttcgttagaacattttgtcttattaaaaatttttgtacaaatttttaaaagtaagtattgcttaaagttctttagtgataaatcaaaccacaacatgtgaaaaatatatttatttaaaacattttagtaagacgaatagataaacatgatatataatcctgtaaatgacatcatatacatatttaaatcagaggaagacaggtagtaatatattggcaataaactacccttgtggatatagaggccagattaatgaaaatctattatctaaaaaaattggcaataaactagctatagcttgctcactaattgtaaattttcctgccgtgtactgtatggcaggtcagtcatcgcaaacgaacaaaaactaattttccggttgtctacttttcaagagatagacatttagatggctgatcacatatagagtagtgataggtccataaaaaccatggcccactgtaataatccgtatatgtaggtctgttaattatttgttcttaaaaaaactcttactaccacaattggctggctacatgtagtttactttacttactataattacttgtgtacagtgagagtagcatataaaaatatatatactagtaatgtgtgatgatatattacttgctacaattcatgctacacccgttccaaaatagatgatctcctagaatacatgttgtctcaaacccttcaataaaatgtattttagatgtcttgtaattaagcgttgtataattgaaataataaccacgaaatatgtgcattaatttggacatatatatcatcttaatgtgtttacaatgttaaggaaaaagaaaacagatgtaacattttatttttacatacaataacacacaaacacacactctctttaatagactctgcataaattgaactttcgccgaaggacgccacgtgtttgttggcaaacacggttccccgggcccggtgctgtacgagcttcgactgggaaattaattaatcttcctatgcaaacaatgttagtaattcccattggcggacagataaaaacaaatgaacacctagctacatcctggaaaaaacgacagttccgatcaactccatcacgaagaatgaattaaatctatttggcaaacttaaacttccacgcaaatcctattgcatgctgacgaacaatagcgtgtttttgttttttgttttccacattatgatcaatctttctatctattacattattaaagatatagttgaaaagagacgtcgtgttatttctattgtctagaaattctcatattagtcatagaaaaagagaaaaatcagtgtcattagataacactatccaggacaaggtcatcactgacagatacaaaccgtcttctctgacagcttcggccctcgtcacatataagtatgtggttcataatgacaaaatatcatttatgataggtgaacaatcgtcatagatgagtcatctatgatgggtgtgtaagttatgtgacatgtagtagcttccatccatcaccgatgactcatctctgacaagttgtaactcacgaactgttattgaagacaaattaataatcatgattttgaattttaaatgcacaaaaaaactaaaaaatattatttttaattttaccaaccatactatacacggtgatacatcactacccaccaacccatgattttatgagctatatagatattcacacatttgttgagtattgaacacaaagacttccctatctacgaagactacccttaccaactcacctatagagcacttgttgattactttttgaatactgttcttgtaaggaataagttcaccacaggtccctcaacttaacagcgagatattttgacatcccttaaccgcaaaaccagaaatcttcacccctaaacttaacaaaaccgtccaatttaggtcctatggcagtatagatacctggtttcgctgacgtggcatcctagttagcaaaataaaaataaaaaaatgtggggcccacatatcagccccatcaacatctctctcttcttcccaggcagctggcgggaggggggttggtagcgcacctgtgggagaggaggattggcgagagaggcagctggccacaccggcgagagaggtgggagaggaggtggcaccggctatgtggtggtggcagcggccactgtagccatggcggcgaggaggtagcgtgggggcatgacccgctgcaatgacaagcttggggcgacgatgacaagacgccgactagggacggcgaggaggaggcggcgacttggcaccggctgtcggggggacgcggtgctggtgccccggtggagccccaccccgagcggctccctcccgctatcctccatcgacaacgacgacaagaccactgccgttcgcgtctccatcaacttcatccaagtattcccctctgtctccgctgaagccgtcgaggaccaggccgcatcggtcgtccactacaaccctgtcgccggccgaatcacgaagccagtcgtcggggagcctgagatcgacagtaccggcgaaggggtgtggttcatcggggccgaggtgagctacactgcctgcgtggactccgtgctcaccaccgacggcaccgtcgagattgagggcgagcgcctccccttctctcctccaaccccctcttcacttcctcctccccttgccccgcctcgacctcaccagccgccgccgttgcccccactgccggcatactccgcccgatgcgctccgctcctcctctagccacctccgctgtcgtggcatcggggcgcatctagttccggtcgagacggcgacgctgctgatcatcaagcaacgtcctcgggactgcctcttagccgtcaggagcggagacgcagggggcaggggaagcgacggcacaaggggcaaaggaagcaacaacgggcgagcgcgtgtgcaccagtgcggtggtggcggcggagctcggccaggctcaccggcttgcctcgccccatttgccgtcggcggcagcctcctggggagaggagctgaagagaagaaaaaaagagagaagagagaagaagagaagtggtccccacattttctatctcatttcacttacatgtggacccacatatttttttatttttattttgctgactcgaatgccatgtcagtgaaaccaggcatctatactgccatgggacctaaattggacggttttgtatagtttaggggtgaagatttctggttttgcgattaagggacgccaaaaaaaatctcgctgttaagttgagggaccttcggtgaacttattccttcttgtaactattcctttccaaagcatgttgcatatacttaacactttcaatgatttcaaatcaaaatgcaatcaactaaaatgttttacatcttagtgtgttctataatttttatataatgaatatctccatccaaggtagtttgaagaattcaaaatttcgtctttcaaaatagatctcaccttataatggatattcagttatgcaaacaatctcaaataaaaatattgtcaattataatgttgtagatatggttgagaccaacgacttcgatatagggcatgtttccattcgaggtcatttgaaaattcaaaattttgttgttaaaaatagatctcagcacttgtattcatattaggggatgtagaagatctctaatgaaaatgttgtcagttatgaagttgtagatatcgtcaagatcaacaacctttatatggcatgcctccatctgagattattcaaaaaattaaaaaaattaaattctaacccatcattgatagttcataactatcacttgtaaaagataatgttatctgtgatgacgtatggtagtgatgacggaaaacacggtggcctgggagatctgcttaactccagtgcagttccaaggctagcctcgagtatgtcaagggcgtactagctgattttatcctgtaatcagcaagaaagacaacaggccgataggatagcatatcgttggcggtctcatacgatgtagttagaccaaatcggctatggactgggtagatcaaggaataaaagaccctaaacatgcctcatcggctataatactgcttgttaggtttaataaagagcttaagacttggcccacctgcacgaagtgcctttttgggtagctctcttccattttttcgacggcccaacgccatcgtccatgatgaccactttggtggggtttgcccagggaggcagttcgccgtcatgcacccggttcgcccgcccctcaatctgccatgaaagcagcaagtcatattcgcgagtggtcaagtccatgttcatcttttttgcctcggtctccgcctcccgcagcgagcgaactgataaatcaaacatacacaaaaaatagaagtatgctttacttcggcttttcagaagacaaaataaggcgaagagtgacttacgattaacgctcgcgggaagggtgaagcgcagaaggccgaggacctcctcgtccgaaataagcgtaacacccgagtctcataacaagaggtaaatccgaagcatgcagtactccacaacaaggtctcggcagctgagccaaaaggcgatcttgcgaaggaggctgaaacgtgattccattgtctcgtccacctccacgtccagcttatactcgatcgatatggcccggcagcggatgcgccacaccttcgcccagttggagcctgcttcataggggacgttgtggtaaaaccacttctccatccagtggcggaagcatggaccagccacaagtcagatatttccagacgaaggatgaagttaatgctgccgaagaccgttttcttcggcccagctggtgtcttcatcgtaggatcgtggcggtgaagatggcgttgaagagttcggcgtaaggggcgaatcctgacgttcggcacatccggtcgaacactgcaatctgtacaagggcagaagggctcaactggggaagctcgatctcatacatgcgaaggacgtctagcagaagaacctcgcaaggaaagcaaagtcatgcgtcgaagaacgcagagaaaaccagcttccgcccttcacctggatgcggaacgagagcatcaccagacacaaaagcttggccttcgacgatcgccctagacgccactagcgtggcaagatcaccctccatgaccagcgacttgcccagaaagcatgagacatcctcgcccaatcgcccggggtcggggctagtcacgacagccaaagctggtttgcgaggggccacagtctcgaggataaaaagacgcgaagtggtgaaagttcaagtagcgaagaggctcagaaaagacggagagcgagagcgttgagagatctgcaagactcggaacaattgaccgcagcgaaagtgagaatgacctcgggggagggggattatataacttcacccccgcgatgcttcaacttccagccaatgacggcaagccacatggcatccaaatagcgaggcaatggtaactctcgattcgggccaacgggccaaacagtaaaaggccacattgaacggaaaaatagcaatttctgaaagatgcagcccataacattcattttttggagaaattcaaaattcagaaaaaacttcaaatcaaaccaaaattaaactctattccaaacaagtcaagtgttgcttcttttgcaggaatgaaattatggttttggcaagaacatcggccgaaaggggtgcctcatgccataccttgtatttcacacggtctcggccgaagctcccaacttatacttgcgcgtgaggggcttgttggaggcatgacacgaggaccttcgaccaaggatgcctaaaccagatgcgttggggcgaaacaccagccgaaggccaaggcttttgccttgggcgaagcaagaaggattcgctaggagccttgatgtcttcgccacagccaaagaagctgtaaggcctaaatgggtcattcgtcacttgagggaccatagttaacccccattaaggggcccaaggcaaaataagctttagttaccctcataaatgtcaccatcataagggtacccatgtaaattccccagtacacattaactctacggtgcatgagcttgtactaaggctataaatagccccctaggggcatgttatggggggttctcaaaaaaattcctttaattaatacatattgctttactttctagtgtgtgaactgtgtgaaccacgtctttcgatgtacgcagttgtcattcgataacatatatattatatttacttgttatatatttgaacaatcgttgttacacaatgagtttcgtgtgttttcatttccaaaggtacttgcttgggtgaaggaaaagagatcgagcgtaaggaatgcatggatgatcaaaaaagttgattaaggaccaaaccaagaccttctccaagtccacttgtacctcaccacgtcacttttggtccatacaagacaatagataaagttcaatacgttttggattcggatttggacctcaggacaggatcaatttcaaacggacctagccgctgatctagaaggaatctcagggcccatgagttcttgctggaaagcttatagtgtctactttgagatggtttttgtcccacgtcaaaattcccatcgagctgtcgggaatatacaaaacaagccacatacatccagtccgaatctgatttgagtcttaggtattataattatgtcgtgggctaaacccaatgggttctacgccctagggaaaccataggacatcctaaatcatatttattcagtagtcatcatagtttggaattgggatttgcttaaattatttctgtcattgtaatttcgccgctagatcggtttgtggaaccccaaagtcaagtgcttaatcattgatatgcaattgtgttgcaatctatcttgctcttgctttgtgttcttcgattcgcatgtagggattagccttctcggcaagatcaatcgggcagtgcacggttgataaacagaggagacgtggtgctgcgtttgtagggattggatcgtctttatcagaagccagaacatatatgtcaagtttttgccaaatcgagtgttgtcaatacctatcgaaagatttagacctagtttcctaattagtatctacggtcagactgatctacatcgattcgaggataacttttaactccattaaaagttttggtgtttgggtactataaccatattcatcttctggttggcttagtttgccgtgtgtagtgtgtatgtacagtatacacaaatatgcggccagacaatcagacatgctgtgatgcagataacatctaaaaacaataaaagaaaaaggaaactagcggtattgacttgatgatttttaaatgtctctgcggtaacgaacagaccgggataagagcgagatgaatggaggagcggcagccaacgagaccttaaaacaaaaggaaccccgatggtaataagtacatgatgacaacgaagagggggccgacgacaacggatggacgaatataggggatggaccggcagggtcaacagatatagctactccttccgttaaaaaaaaaacttatgactcatccagatacataatcaaatttattattaatgggaacaataaatgaatcctatagaggatatttttttataaaaattcattacagtgcgcataattatacgaaggacaccctacatatcataatttcagaaatcgatggatcagtatgcgtaggttatttactcatctatatgccaaaccatttggtaattaattaaggctttggtcatgacatatcttattgtggcattcagcattagagcaagattaatacaccctccggttataagacgttttgactttgttcaaagttaaactaatttaagtttgactaattctgtagaaaaaagtttgactaattctgtagaaaaaactagtcagcataatttcattaaatctataattgaataagttttcataatatatttgtcttggttaaaaatattactattttttttataaaattagtcaaagttagagtagtttaactttgatcaatgtcaaaatatcttataagctaaaacggaggtagtagcataccttgctatatgcagcagggccagttattagtttgtagatgagctacaagtttgtagtgatttatatatatatatagttcacattatccttgctcaatgttaaatattggctccttaattataaatcaatctataaatcactacatatgctattttaatcatattattgttagatttttttatctaaaaaaagtttatgggaattttattttgatagtattgatatctaagttggaacttctatcgggatgatagccatatcctataagttgttttcttatggtcttgtaagaattctgaagcaattaggagtccaactctcgtcccagttaatatgcatgattcttgggaagagaatcagcaaaaaatcaccttggacaatttatttgcaaaaaatgtatgtctatttaaatcgcacataaaaaaatcaggtcaaattttcattgtaaatatagatttctttattatataagagcagctaaaccttatttgcagccactacaggagcaaccgttcatagtcattatggataaatcctttacataggatgtttttaaaataatttcttatacgactccttatatattttgaaaagtaaacgaacttaaaaatcgactcaaatactaacgaagtataaaagtatcagccaaagcatctttaattttctttaatttttataataatagacaaaacatctttaatttttttaatttttataatagtagacatatagatatatcctcgcgatagcattgtttttgaatagtccgtaacgcgttttacgccctcgaattaattataatcgcgtagactgactaggtagagcctcgtagaaattaatgatcagctgcctagcaaccagggcgaacctggtatcggctaatgcttctctatcaatgccagcgcaaaacgccatcaaatgttaaagacttcagattattacaatcaactgtggttcttacacgtttcttgttgctggacacaagcccagaaaacggcaaatgctccgtcgtaatcagataatggctgcactatgcgctgaccggtcgagagaagactagtgtagtaattcgaagttaatttaccaccagctactcctcctagctgtacagatttatcgtattagacgaaccgagggagtattttacatagagttttatattttttttactataagattgtttagtaaaaattaatttcttatgtacttatgaaagccgctataatgtaacttatacgattcaggttgcacgtacgcattcaaattatctctgttcaataattaagtagctataatttttgcaaaaattatactcccaccattccataatataaaccacaacttttttaagatgtttcataatactccctccatattttaatatatgatgccgttgactttttaacaaacgtttgacctttcgtcttattcaaaaaatttatgtaattataatttattttattgtgacttgatttatcatcaaatgttctttaagcatgaaataagtatttttatatttgcataaaaattttgaataagacgagtagtcaaatatttgttataaagtcaacggcgtcatacattaaaatagagggagtataagacatgcatgaatatataccattaactagcacttctttcccactaaattattatttttttatgtcccccatcctcaatatatatgtttaattctattgggtacacgcattatatttattagggtaatttaaactatgaggtgataacttataataattatttcttgaactttaggttgagagtggttgcgccttatatttcagaatggagggagtactgctaattactactacgcattatggtatcatgatctgatgcaaattaatcatcgacgttgttggagtccatgtcgaagttgtcttcagatacggtggaggctgcggatcgacggccaccaccatggctcctgggtccggtcgcgggcgcgcctcgaccacgcccttgcatcagccgtccggtcgcaggcgctctacggccacctccatatggtgaggaattgccgcaagcggcaatggcacctcgaccaccgggagggcaggctgcgcgtaagccaagggtctgactgacgccgcagccacgcacgagagggaggtcagcggagccgcctccttttgaggcggagcgaaggtggctcccagatccgccgacgtcacctccttgtgcatcggcccaaattaaaggtggctcccagatccgccgatgtcgcgtcctcgcgaaccggagcgaaggagaccctcgtagctttctagatccggccacccatccccactggagttgaggtcaagggcggccatgcctatcctagaagcaccgccgctgccaaatccagtgaactagtgcagggagtcggtgtaggggtcgagcccatcggcggaggcgtgtgaatcggactgtgacatgaagtccctcgtgccggagccgtcatcatatccgtcgccgtccatctccgcctcggactgttgcggcgggcaagatcggccgaggtagaggctgccgtgagcagctgcggcgggcgagatcggcaggggcagaggcaggcgtgattggcggagatggaggcgggtgtgagcggcggtggcgggggagatcggcggaggaggaggcagagctggggaggaggaggcgggcgagatggggaaattttgggtgcaagatgagagagagcgagcaagtgagggtgagagagcgaccggggcatgcagtgagcgtcccgcatgccttccaaatgacaaatgcaaagttgcccacttttgataatagtgtttagatctattttaccaaaaagtagttcaaaacagtaaaaattttaccattttggagggtctaaataagccctatatatacggctaataataaccatgcatgatatcatcgcgtgcgtggcattatacgtccgatcccacgggagtttgactgaattttttcatatactggacgtcacaccaacggtgactgctgcgattcaattttagtatatacatagcttaaatccaaaacttatgtactgtacataaatatttgcttggtcgccgattaattgatgcctagctatatatgtccaaatcaagataggattatcaaccccgcaaaaaaaaaaagataggattatcagtttgttcactagtaacgttagaccagtccgcgtgaaatatcagtttttggatttatatgatgcccctatatatcaatcttatgcataattgtacatatttagaatttcttttgctaaccgaaatgcattggatgaatgttaaatggatagtccccgtttaaaagatataaagcatattagattttgacagcgtccaacatttgaccattaatttatttcaaaataaattatcaacaactgcaaaatagtatgaagatatttctaaatacgagtctaatgataataaaggcatgatactaaacacatgtatgatactaaataataaaaatggtcgatcaagatgtagaaagcttgagtcagtttgatctagggagttgtttgagtcagttaaacccttttgtagcttgaggatgtgctgcttgaaaggaatgatgcaatgttatgggtgttggttgatatctggccaccaagccagaaagtgaagcaaacggtttggtccagcaatgcatacgcgtgctccctagcgttgaggagcgagtcatacacatttctctccttagcgctataaccagatgcgtcgtttttttcttgagaaggaattattccagatcccctcaacacacgtaaaaaggaaccttgatcttatgcacgagtgacgactcacgtacgctaagccattcccaaaaccatcagactaccgatcctaaggtgcgttaaaggggaccgaagggcaaattcccatcatcactatcgcaccgtggggttcccgtcaccactgccgcacggtgatcccatcaccggcggcctactaccactagaccgacccaacttatggttttagcaagatccggtcagtaaactataaaattccacataagaggtgatcatgcatagcctaagatcatgtttaagaattgactctaataatagcatcgggcctagagactagggcccacgggcaacccagctcaaagccaatgtatacagtaccctcagatgaattgtatttactattacaaaacaccacatagtgaccggtcttataggtgctggtttgcttaaaaccgacatctatgaagcttttttcacctttttacaatataaaagtaagaactggtacatataatcactcattggcactggtttataacaaaactgacataattaatcccccaaatcataggtgttgattctttttataaaccggtacctgtagacatcacacaggtgctggttcttataataaactggcacatacaagtgcgatgtcataggtaccggtctttatcatgaaccattacatatgggtatcacatatgagtcgtttcttaataaaaaccaacacttataagcccaaaggtgcatgcttactattgaaactgatgacgtaattcatatatgtgtgttttttatctaactttttcatataaagtcgaatgaagaacaacgctataacaattgtagagctcaatgatatctacaattgtgtagttgatgacttttttatttaagatcgtttggatgtccaaaaatgtgttaaaaggtctcggatctatttgcataagtgattttttcaaatttctaaacgatatcgggtaaagacaaaaactatatcaaagttgtagctctagatgagatctacaattttgtagttgataaacttttcatttgacctcatgacagtagtctcaaaagaatagcatttatttccaatacatgaactgtttgtacgttagatggtaaggaagctttagatggagagaaagttcttatattcaaatctttcttaatgaagcacttacaaatcgggtagggtggaaaaaaagctcgggctcgtgagctcagctcgggcttggctcgagcttggttggcttgccttggctcgtaggccaaacgagccaagcccaagcctccttttcagctcattgctgaaatgagccgagcccgagctggctcacgagccgcttgttttggctcgcgagcctagcccatcatgtgtttatatcgagtattttattttttatgaagttattatttgtaaacttgaaatttattattaagattttgaagaattgaatatataaacttatttaaattttacatgttgatgatttgttcttgcttttttaataattataaaatatatatgaagagatgtttcaacaggaaggcttgcaagccagcttgagctggctcgagccaggaaacaagccgagccgagcccaagttttagcttgtttccgtaactgagccgagccaagccaagcctagtttgttgtgagccactgcaagccgagccggctcagctcgtttccacccccttgtaaaaaacgtttcggtactgaaaattctgaagcacaatcaaaacatgtattgaaacattttaatacactgtatgaaacaatagttttgaatatattggaacataaaacacatcggagtaaaaatcgggcgttatttcaccccttgtaaagaaaaggtttcagtactgaaaaaatctgaaacacagtcaaaacacgtaataaaacacttttgatacaatgtatgaaacaattgttttaaacatattggaacatgaaacacatccgagtacgacgaaaaaaagaatgaaacactatagaaaacctcactgcaacatttcaatccaactaatgaaacatcatggtacatgggccgatacattaaaaaattagagagaaaagcctagatctactgcgagctcgcccgagtccgctaaaaccacgtggccatcgtcgtcgatgccgtgccaagctcggacgagtccgctacaaccgcgtggccgccgtcgtcgacgctgcacggagctcgccatgcagagctcggccgccgtcgtcggtgccgcacggagctcgaccgccattgttgacgtcgtgcagctcagccgcgtccgcgtgtccgctatcattgatgacgcacggagctcgtggccaccgtagttgatgccacgcggaactcagctacgtccgtgtggccgcctccgtcttctccgtcacctccgtaaccccgtcgctgcctgcgtctggactgaatctaaaggagttgatgaaagggtagagagagaagaataaaaatataaggatgcggttgtgttggcggaaatgagataaggatgcggttgtgtcagtggaaaatgaggtaggggtgcgggtgcccgatatttctgtcgatgggggataaccgtagaccggatatagagggtattggggtacattggtacgaggatctacgtaatacgacatcaagcaaacagaaggcaaggattatactggtttgagccccttgataggtaatagccctaatccagttggtatgggattatatgatggaaaccacagattacaaagggaatagcggaactcgatgataccgacgatactgtagtcgagttggtttgactagatcacccggcgacttggctcccgtaggctccggcttcgtaggctgtggtggatatgttggcagtgagattcgatgccttaggtcctgcctagggggtcccttttataccgcgggtcagttgatctccaagtaggactcggagatatcggacccttacgatatggtaaagaccaagtcttgtacgagtaggactcctcccatctgtggattctgttcctatcacgtgatagatttccttaacgtatacagtaactatccatatacacgcgggtataccgtatcagtatacaacgtacatccaagaatagagggtataccttatccgtgactctgacaatttccttcatgcatcgggcacccattgataagcattttttctttcttaaacaaatatctatgaatatgtgttgaaaaaatcatgtgacttataggaactgaagtgtgaccgtatatgtgcctaataataagaccaaatatttttcgggttttttgcaccaacaaaaataaaaaacaggtacacccttacaagtgtcgattctatattagaaccggcaccgtgccgttttttgacaaattgatcctttataaaaacttattttgaaaatagcccctgccaaaaacttcaaccaaaactaagccgtcggctcaacgccatcaaggttggcgctgaggtataacgtctcagcgccgataatgttggcgccgagatttttgttgagctggcattgagccacgtggcacggcctagaattcacttcaaattcctgtgaaaccatagacaaaattcaaattcaaattcctctcaaatatcctcaaaattcaattctacaaaccttgagaaaataagaaagttcactgttcattttgggcctctcttcctttctctcccaggcccaactctcctcctccttttctcggaataactgcactttgactccctcaaaagtgacctgaatctaattcatgaccctaaaccgcaaaaccggatatctcgacccccgaactattaaaaccggtgtaatttgactcctttggtggttttggaggatggtttcgctgacgtggcgctgacgtggctgtgttgacctagtctatgggttaacgtggcgcttaggtggcatctaaattaaaaacatataggtgggacccgtttgtcattcacacatataaaaatttgtgggggccattggcatatgggccccatatgtcatcctctctctttcttcttcctcccctcttcctccattctctctttctctctttttctccccttcggccggcgggacctgatgtggcagcggcgccgggagctgacgtgggagtggcgatccccggagtggaggagtcgacgatggtgaggcagcgctcggcgagatgggtttgacgttgtggaggaagtcgaccggtgggggttgtcgttggcgtcgtcggtggccgacgacggaggtggaggtctaaggcggcggcccatgcggtggcatccattgaagctccctcgccgagctctatcccgttgctatcgccgtccaccaccggtcgccgtcccgcactccctcactgtctcctgtgaagaagaaaaggaggagacggggaggcggagaggccggcgagccgctcttctcccgccagcaggcgcgtgccgttgcctcacctcctctcccaccagctgtcacgcgccgctctctcctcacccgccggccgatgcgcaccgctgcctcgccttctctcctggcgattggcgcgctccgcctcctctcccgccggccgccatgcgccgcttgctctttcgctggctgttgtgcaccgctgtctccttcctcgctggcgaacgacggccggtgcgtgccggcggaccgcgtggccaactcacggcgccggagctcctccgctaccgccagatctgaccgaacctcgagagctaagctcggcgttgcccagatgcggagctcggcagcagcacctccttctcgagcgacgaccgctctcccgccgctgccgtcactctagcccccgctcgccgtcgttgccgctgccgccggcggtccctacttgccgaatggggagggagagagagataagagacaagggagggagagggatagactgacatgtgggccccacaaattcttcagtgcgaatgacaaatgggtcccacatgtaggtttttaatttaaatgccacctaagcgccacatcaacccatagactaggtcaacaccgccacgtcagcgccacgtcaacgaaatcgccctccaaaaccgcaaaaggagtcaaattgcaccggtttcaatagttcgggggtcgagatatccggttttgcggtttatggtcatggattagatttgggtcacttttgagggagtcaaagtacacttattccccttttctctcctctccttcccacctaagcaggccggcccacggcctctctcccgcagcagcccagcccaaccgccactgtttgtcttcctccctgagccagccagtgcatgcacacgagccgctcgacgaaatgccgacccgggcgccgaatcgtgccgagccgtgtgctgcaccgagccgcctacccgtgcaccgcgcatcgcgccaaggccgcgccacgacaagccgcgaatcccgccgggagacacggcacggcgtcaccttgcatcatcgtcgtcctgtcgccgtcccgtcccagaacctccgcggacgcgcgtcccctcgccgtcgcctcgtcgtcttgtctccgtctcctcccgggaagccgctgagccgcgtctctccctctctctctcgcgtcgcgtcgccaccgccgcatgcgtcacccccctatagccctaccgccccaaatcccggccatagccgtcgtcggccgtgcgtcacccacgtctcgccgccgttcccgctctccgcgcgtccgtcgcttcacatcgcgtcgccaccggtgcctgacgccaagccgtcgcgtcgccgtcccttcctctccgcgaatccggccgaagcagctagccccatacccccggttctcccgcgccctagctgccagctcgccgccgcgtcccgccaagccgcgccggctataaaaggagggccgagcccctttcaccccacaccattgccatctctctctctcatctctctctttctctcgttcttctctccgtgtcgtcactcgggccgccgcgctcctcctctcggcgccaccgacgccggcagaacctcgccggatttcgcggccgccttccccggcccctggccgcggagccgcgcctcgccgccgcgacacgcctcgggccgagccgagcagaacgcgaggacgaggaagaagaccccctccagtcgctgacaagccggctccacgacccttttcctcctcagccactgacaagccgggcccgcgcctccttcttcccatccttcactgacaggtggacctccttgccgtcaacgctagcggaatattcccttcccgtccaataaataaaaatctcagaaaatccttttaacctttgaaaactcctagaaaatcaacagtaactccgattgaccccgtttaagttcttaaatttttctaaaattgagatctacacagtggcactgttgtttatctgatttaagcttgttttattgccttttcttatttagctttgttttcgcgtttagagcctgagttcgaagaagccccggacgccgctttcgaaagagaagactccaaccctgtgcaaggcaaacccctttgatcacattgcccctatatttttaatgatatgttgtttgcaaagatgcattgtttagttcacacgattaacatgtttaggcctcggattgtttatacaaccgacggaccaacctagtagttgcacttatatttcataggttgatgtttccatacctttgatagctccacaaatatttgcgccggtatcgttatacgattaccgaggtagtttcgcttagccatgcttacgttattgccgtgtgggaaacttgggttattccaaatacatgcttaaaaatctggtacagtgtaccggggagttgtgaaataaaatgtgttgtgaaagtggtgatgatgcggagtcacgcctttgtggtttggctacgtattattgttaaggaccgatttctttgggaaatccatccgaacacgttacagtgcgaccacacagatatttatgggatgcctctggttaagtaaattgttatcacatgggagttggtgtgccaatggttgtggaatgccgaggatgaggagacgaagtattacacatttattgcccatcatgggtgtctttttgcctctattgtggcgtgataccagtaagagtaggaggcatcctcggtatttcctgagtggatgacggctgtcattgcctaatactcggctatggatcttagcccaactaggtggcatgcgattttcatgtgttagctttggaaaggccttatcacgaacttccggtactggccagtaccagtgtaagtttcgtgtcgtgtgggtaaagcgtgcaacctctgtagagattaatgaactgttcgaacagtcgtgcccacggtcaagggcgagtgtaaggtgtttctcatagtgtagatttgtttgacaaaggtttgtgaaaaaagtggttactgaaaagggaacgttaccagagtccgcctgtgtagcagacggctaacctttgtggttaggaacgggtctgtgtgacctggggtgtcgtccgacaccgacgtgttgttagggccatgatggcgttgatgtgctaaggtaattgggtgaactatgtgttgttgtgatagtgaaaacgagttaatgagggaacaaattaattgttgttcgttaatcttgacaagttgttgcaaagcaacttgtggaatgggttgaggcgtgagcctcctcccgacaactaaaacttgactcactcactaggagttttgtgaaataaatcactttgccaaaaaggcagctttcgcaaataaaaccttagcctcgttgtgtaaactaaacatgtcattcttccccctggcttgctgagtacgttaagtactcacccttgccccttataataacctatagagtgtgaagacgaagatgtcgacccgaccgccgaggagtatctccaggagcaagccgagtatgaagacttctagatgtttcgtgcctagccccaagcctcgcttgtggaataagttagttgcctaggttctttgcctagtgcatagttgcttagtcgcttagttctccgcgctattcacttctgcgccgtcgcttttatggttttatgtaatgttgtgttgtttatctatgggcctgtccatgatggcaacttatgtaagtactactatccagtgatgtaataaagcagtttactttgattccacatttattctgtgtataccagctaatgtatcctgggactggtactatatcacaggtaatgcataacactccggtgtgagttagctgtgtctatggctaacgaatgtcagggcgttactgctcctctctctcccctcagcgcccctctcgataaccgatgtgatggttcccaaccatcgtgtccctgcggttgccaccgcttcacatttatatgtactcttgatcaatgagaaactatcaattcgctctattatgtcgctcaattctctctcgcttaatctgtcgattctattcactctcaacatgtgttacggatgcatcaatatatacccaggtttttgtgacatttactcttcttgttttgttcaagtgacatgcatggaagatattttaaaaggcaattaaagctacttgtacggtgtgaaggaattctcatgatcctattgaggatgtatatacagaaagctgcactaagatattactttaattacttttcctttagtactcttctttttttttattggcggagcctttcatctttttaaagaaacacactttagatagtggatatgcacatccgtcggaaattgcacctaatattattcgatggaagagtcgaagtgaaaaggacaaagatgggatcggaggaatggaacacacaatatatatgtgtgtgttaacttcgttttattttgtacaatgaacatgccacctttagcagaatgaaacaagacagaaacgttacaaggaaatgagcatcgatggagtcacaggtaagtaatgttcatgaagtaaattaaggaaatattcccttccattgccacatatatacagtgctagctctcttcattttcaatcgcttttgaggtgcctctgtcgagtgtagtctatgccaaatggcctaaaaatttatatgctatatttgtgatttgcaatttgacctgattatttctttcctcagattcattctttcgttgcatatttatatttcaataattcataaactggtccatagtcaacagattatgtattattatatgtgcttcagaatttcagatcaccatataaattataaagatttcgcaattaagcatatcatgtgcttcagatcaccatatattatatatatgacacttggcatgcttaaccagaagaattttcaggggattaccaaacccaaattgacatcaatcttctcgccgaccaactagaggcaaaactatgcgacgttcctttggacgacggcggccggcgacacggctcgccggagtgccacatttccatcgtgaagccgcaagtccgcctcgtcgacgtatcgcagtacgctccgcaggtgctgctcgtcggcgcctaccaccacaggtcgctggaccggtgtgagctggacaagctggcggcgctccggcgtgccctccccgacggcgacgacgagcgggcgtccacgctgaggcgctacctggcggccatcgccggcctcgaaagcgaggcgcggagctactaccgcgatgacacggatgacatgggcgcggaggagtttgcgttgatgctgctgctcgacgggtggtacatactccactacttcggcgtcggcgtcggcggcggcgggagagcggtggacatcttcgccgtgcgcgacgtgttctacctgctcgagaaccagatacccttcttcatcctcgagaaggtctacgagctgatccactctccccctccttctccgggagctacagccatcgccggcggcgggtcgtcgtcttcctccgtcgtggttgtcgatgggttcgtgcgccatctccggtcactcctccgagaccagggctactcgaatctggaggtggacatcaccagcacacgcccctgtcacctcgtccacttactccacatgcacttcacacccatggcgatggcgccggccgccgacgacgctgccgctgtccccatccccaccaggcgcgcgcgcgccaccgtgtaccgctggcgcggggcgacgcagtaccacgccgccggcgtgaggttcaagagacgggccctcggcctcggcgacgcacggtgcgtcctcgacgtggagctccggcggctgacgctgcacgtcccgacgctgacggtggacaacaacacgtggcgggtcctgcgcaacctgatggcgctggagcagaacaacccaaacctgggcagccacgtcacggcctactgcctcttcatgtcgcatctcgccggcacggcgaacgacgtcgcgctcctggcgagcaaaggcgtcgtcgtgcacttcatggggtgcgacgaggacgtcgctaagggattcgccggcctgtgcaggggcgtggcgctcagcgtcgacgacgcgcgccagaactacctgcagccgacgtgggagaagatggagcggcggtacagcagccggccagtcaactggatggcgctgctgcggcggcggcatttgagcaacccgctggtggcgaccgcgctgctcgccgccattgttggcctagtctgtgaagttcttcaggctgtgtatgccgtcaagagctacaagactagaagctaagccactgagacgtatgcccctgtatgcctaccgattttacgttcattatcgaagtaccaatcattctccgctgcgttggattctactccactatgtatagatggccaaaatgagtcgcccgacacggcctggccgggacacgactaaggcacggtccaagatcagtcggaccggctcggcctgagattaaccatgtcgcgccgtgcccatccacggcgggcgcctacacctatatcccaggcatggcccaataagactcggatcatgccatgctggctcgaaggcacgactagcataccgtattgatccttggaataagtttattttgcctccctcatttttttaaggccgtgccttatatggctagaataagtatattttaccccctcacatctttatatcatgcattatatggctggaataagtctatcttgtatccctcatctctttgggccaggcgccaatgggctatggcgcaagctaccattgagccgtgccggcctgcgggagcgaggtaccgttgagccgtgttgtgccggggacggcacgacgttgtcgtgccaaggaagaggcttatgcgtagcccaatagtcgggtcagactggcacggggccgacaactgtcaaaaaataccatacctgggctgggccaaatctttgtgccgtgtactgagctgtcgagctgctggccttttggccaactatactatcacaccatctatggctgaacgcctaatttgtactcctttcatactcgtaaagaaagtcgtttaggacagcgacacgatctccaaaacacaactttgacttcttgtttctataaaaatatttattgaaaagtgatatatgtatactgttatgaaagtatttttcaagacaaatctatacatataatttttatattttcaaactcaataatttgggagttattcatgatttatattcctaaggtttgacttaaacattgtcctaaacgacttcctttatgagtatggagtgagtacataagattggttgcgaagcaccccgcctactagcatagaagaggaccccgaaaagttggccctaattgaacaaggtaacaaaataaagattacatgcttttgtttggatcatgtttcagaactggttgcaaaaaaagattgttgtacttccaagcccccccatggctcctgcgtccaagcctagttctcctaatccctaaaaatcttgtacgtatcaggattcaggagatatcattttactagcaataggaggtggaacatagtttttctaatcttgattaatttctttggttttcagctttggatgtgagctgtggtatgctgaatttggtgggcagctgattgcgcagtcaactaatcaagtctacttttggccaatacttaagctggggtttcttgtaacccagttttgctgtaacttcggcgttcaaaaaaaaaagttttgctgtaacgttgctggtctgctgcacatgtattgcagtatgaactattgatattcatgttggacgtttgttgttgcttgtcagacagatgattattgtgtggttttagaaacatcattacttcaatatagtattatctagtactccaaatatctggtggaatcgtggcatctattatccaattatatatgacctttttatgctcttggctgttcagtttaattcttagcttttgcttcagcatgcgctacttgctagcgtacatttcaaacaagggtcacagtctgttcgggttcaccgagaaccgaaaaaacgagccgaatttgttcggtttagtcggcttggttttaccttattttagacaaactcggttgccatatcttcaaaaccgatcttctccaaaactgaataaaccgagcaaaaaaaaaccggaaaaccgaacacccactcctattatgtccgtgctcgttgtttggaaaaataaataaaaaaaccctaatttatttccgtcaattttggatggcttagatcacgctatgattcatgcaagcacaatggcctttttatatcttctacccccgtacacgacactcattttcttcaccaaaatctaacccatgcagtacgtcaccccttagccacattggcaacagaaagcacaaatggcatcggcgcggacttgcctagtccttcaccctgcccgcctctcctcctctccaagtcaagtgacaacgcggtggccccacccaccttttaaatggtcaagatcctagcccccggcccatcaacactagcccaccgcctgttgctggtcccatggctttgttggcgccgccatcaccttactatcccacattatgtattattattctttttttcaacattataaaaaactacataatatatcctctcaaacaattatattacacagtttttttcacctatatgttggcgtcccagcattattgttataaagccagatcaatcatctgattgttgtaataataggttgttttaacaagtccatcatcattagatgtcttttgctaagaatgtcgcgtcgaaatgaacttgcgtataagaaatagatccaattactactatataaacaggcattggtaccgattcgtaactactggtgccggaagtcaaaccgatacaaagagacggaataaaaacggcatatttacaaacgaaaataattggataaaacttttatattcatattcttagcgaaaaaaagcaaatgttaaaaaataaatttggatgaaaaaaccccaaaatcaactctaaggttgaaaatttaaattttggctgataaacataaccgaaaagatgagaacgtttgatcactaccaactaagaagaaataaaagaaaattaagactatgttcgtactggatttttcatggaaattttttttgtacgaatagctttttagtcgccgttgattgtgttctgtcgagatggaaccctttcagcctttcagatcgttgacattgatcttaatccacatcagaaaggaatttaagggaattaaagaggattaaaggaacaatgcttaaagattatttttagatagtacgtaaaaattccaaagttcccctcaaattctaaacttaaaaataaaaacattcctcaaattccaagccgtttggtcccaaataatcccctttctctggaccatttgtggcagtccatcatctttcttcgttctcctccccttcccttgccgtggaagtcgccatggctcctcggatcgcggtgatgccaccgccacactggctcaaactcaaactcaatcctcctccgccttgcgcaactccggaaacggaatccccatcgccgggaacacatgcttctcccccgttctcatccgttaattagttcctccattagagcaatgatatgatcatatgatacactggtggagaaacccttcgtagtcccagttcgtaacccccctttagtcccggtttccaaaccgggagtaccaatccgggactaaagatcgagctgacctttttttttttttttgcatggccctgttgctgcatggtttatatatatatatatatatatatatatatatatatatatataaaccatgcatatatatgtttgaatacatatatatgcatacatatatatatatatgtatatatatatattatattatattatatgtatatacatgcataatatatatgtatttatacatatatatgttatgcaaatgcatatgtatatagatatatatatgaccaaaatatatttacattatagaaaatgtgtacacatgcatatagaaacatatgtagtcatgtattaattacaatccattatatgtcctagctagctacgatttcgacgtagtagtagtcgctgctagctcagaagctaaggaccggtgaattgtgtttccgtcgtagtagaattcacccttgggatcaaggatttcttcgttgatgaatcccatgagttgttcttgaaccgctgcgataaatttcttgtgtgtggtcaggttatccctcatgcgaataaattatatgaatgtatgaaattgattagtaattaaacaagaaatcgttacgtaatgaaattttgaatttatttgtacgtacatcgagctctcttgtggtgatgatttggtctgcaaggcagtggcaatactcacacacgtagtagccgcacaagttagttccctgcttttgctttgcgcactacaaataaatgacaaattaacggcgtgagatctaattaatatacagttgtatgtattaatttgaatcggagaaatataaatgtagagcatgtgtactcacaggaaatttgaacctccgcctaagtctttctctctagttgccgcggaccaaatgacggaaccgataccaagccctacatggagtttaaagatatgattcgtagtagaaataattaacataacaagaatttcttaattaacagagaaacttatgccagtacctgtctataagttcgaaaaccttgtcaaacgtagactcttttttatccattgagtcatatacattgacggtgcaggccgacaggtcgaagagtaaaagcacccagtggaatctgcaatgtgcgtgggatgcattacatatgaaacacttagcaagttcgtacgggaataaaatttggtatgtaggaagacagtaaaattaaactaactctgtgttgtacggtaacagtataaacgtcttgtaatgctgcgccttcaggagatggacgagattgtcctctatttcctgcggatattggtcgagcattgcaacgtttactctccgagggtcgatgaatccagtatcgaaaaccctccgccgtcgggccctttgaatctccattctacaacgataaaagggagtattttattttatatagtctacttatatacaaggacctaattaattaaaggagacgtagtaattaagaattataattgaacgatatacttacaaagtccagaaactcataatagagacgtcgagggcgtccagctggtatacttcgtagattcccttgaaattgatccagagaatatcatctccttgcaagaagtcgaggtccctgatcctcgctccgatcatctctctaccggtggcgctcatctccacgtacagctgatggaacttgtacatttgtgtgggtagggactgcaccagctcgggcttgacaagcggtttatcgagttcgtacatgtatttcaattcagccttttctattggttcaactcctagcaattgatccgtagttagatcggtgtcaataataaattcttctatcgtcatgtctttcccggtcaccaacggctcgatctcctggtttggttgctctccaagctgagggactggtttggactttccagaagatgctttcttcagcgttcgctcatagtccgatagcttgatggcctccttgacaggtgcagacatacccctgaagaagttcatgatactggggtctataggaatcttcttttctggacttcgaggcttgaattgtctcttgacttctgatgcaacgtaagcgtcaagctcctcttgcgtgcaatcgtaccccgggtccttgttcttggcggcgtcaactttcgccttcttcgttgcccttgtgtgggcagacggtggagctgggggggcccttgactttgaaggtgccggaagaggagcttgcggaggagtaggtgtaggagcacgaggaggagtcggtgcaggatcctgaggaggagtcgatgctggagcctgaggtggagacggtgctggcggagcatgaggaggagacggtgcaggatcctgaggaggagatggcggagccggaggagatggtgcacgagacgccgcttgtcgcccagggaggatgatgtaccgcctgcgccatagaataatggcatggcttgtgtctcgtagatgcgtctcaccgtctcctccagggtaatccagctcgaggtcctcgtacgcgccttcgaccaactcaacttcgaccttcgagtatcctgctggaatcggcctgcagtggtaagtacctgaagggtccattgggatggccatgcccgacaccaccttcatgttgtgagagattatttattagtaatcaacatatataagcagcaactagcggaatggctaaatcttacctttattgataagttcttgaaaggaatatgcagctcacatggtgtccgctgagtgatgtcatcaacgggacaggtcgattcgtcctgtgtttgcatggcgtccatgctctgtgatcctacctgccccgttgaggcgcagctgctacggtttcctgacgggctcaccattgcaggaggaatggtcggctggggatcatgggaccgatgtgcggccatgcgttcgtagctcgatacccggaactctaggtctgcaatcttcgcctcggtatctctcttgctcctcatccgactcctgtacgtgtggatgtcctccttgaaaccaatcttccaaggaatcacccctttccctcgtgttcgtcctggatgctctggagtctgcagggcgagtgtcagctcgtccctatctctgtctggtcggaacgtgccctgagaggaggcttccactgcatctgttagtcgtcgcgcagcctctcgtatctgatcgccgaagaccagtgagccatcagctgggttgagcgttccaccgtgagcatagtaccagaacttcgatcgttccggccaattggctgttgccggttcgatacccctctcaatcaagctagcctccatctcctcccacttcggcatcgcgacgctatagcctcctgaccccaagtggtgatggtacttcttcttggcggcattttctttgtttctttccatcatcgcctgcccttgttcacctgtcttataagcaacgaactcgtcccagtgatcccttagctttgggaatgtgtcgaagttcggtgtctgccccttcagtatatacttctggtacagatctcccttgaagctctgaaactgttctgccattttcttcagagtccaccttttcactttgtcctctgtacccgtaggaagggtgaatgtctcgagcattgtggtccacagcatctctttctccgaatctgggacaaagctctcatgatctccgcgtgcccttgttcttcgccagtacaccctactgacaggcacgttatcccgcacaacccaaccgctgtgacgtacatagttcttggcggcttcggctggggcactaggacgtccatcttcttccacttccgttatgatgtgccgaccctcaagcttgttcgctgcacctcgttgcccgcgtgccctcttctgtccaacggagggttgactaccactagcctcctcctcctggttcccctccacatccctttccacgtgcccctgctggttcccctccgcatccctctccacgttcccttcctcgttcaagtactggtttggatcctcgttcccctcttcttcattccagtactggctgcttccctccgcgattgtatcgtacaatatctgttcctcatcgcggtcagccatctgttgatacaagaaacatctgctaagtcacgagacatttatgttttaacaatctaagtcatgtatgctaagtgtaaatgtcatacattagaaccctacacaaccttacgtgctaagtctaattacaaatcgtgatataacctaagtctaggtgacgtatattatacaaccctagctagtaaataattatatactaagtctaattacaaataaaataatcttatattaaaactcaaataatattacatgctaagactaaaatagtcatgtatattttaagtgtttcgtgcgtatatgctaagtctaattaagactacaatagtcaattgctacttgtcgcaccaattccgtagtcaataattacatactaagtctaattacaaataaagtaatcttatattaaaactcaaataatattacatgctaagactaaaatagtcatgtatgctaagtgtttcgtgcgtatatgctaagtctaattaagactacaatagtcaattgctacttgtcacaccacttccgtagtcaataattacatactaagtctaattacaaataaagtaatcttatattaaaactcaaataatattacatgctaagactaaaatagtcatgtatgctaagtgtttcgtgcgtatatgctaagtctaattaagactacaatagtcaattgctaggagtcgcaccaattccgtagtcaataatgtcatactaagtctaatttgcaataaaataatcttatattaaaactcaaataatattagaacactacacaatcttatatgataagtctaattacaggtctaataatcttaattaattgcattacaaatataacaatcatttatattattacgtcacttgcctgctccaattccttctagggctagctcttacactcaggcttgacggacgactccgacaacacgtcttttctgcaagatacaaaaagatgtattaggataaatgcgaagtaacatatatatatatatatatatatatatatatatatatatatatatatatatatatatatatatatatatatattgcatttcacgttaacgttcgtcctcgttcgttcgctcgttcacgttccctagctcgttcacgttcgttcgctcgttctcgttcacgttcgttcgcttgttctcattcacgttcgttccctcgttctcgcttgtcttcgttcgatcgttctcgttctcgctctcgttcgttcgatcgttctcgttctcgttcacgttctcgcggcaacgtacgttgacgtgttcgttctcgctctcgttcgttcgatcgttctcgttctcgttcacgttctcgcggcaacgtacgttgacgtgttcgttctcgctctcgttcgttcgatcgttctcgttctcgttcgttaacggcggtgtggcggcatcggggcggcggttggcgcggcgcgtggcggcggcggcggcggcgtggcgacggcggcggcggcgtggcgttgcggggccgtggcggcggcggcgtggcgtggcggcggtggcattgcacgcgcggcggcgaaggcggcggcggcgtggtgacggcggcggcggcgtggcgttggcatgcgacggcggcgttgcgcggtggcgaaggcggcggcgtggcgtgccggcggcggcattgcgcgcgcgccggcgaagacggcggcgtcgcgtgccggcggcggctcggcgcggcgtcggcgtggcgcgtcgtcgtcgtggcgcggcgtctcgtggcgggcggcgcgacggagagagatcgagatcggagagatcgagatgaagggagatctggcggcggcggctctcaccccagagatgcggcggaagcggaggaggcggaggcggcggcgaggacgacgagctcgagacgacggcgagatacggcggcgtcggcgcggggatttgccctaggcagtggcggcgaaggagagaggctgagagagatcgatcggccgaaaacgtctaagtgttggtgaagaagacgagggcgcaccgggaatatatatacccccggatctttactcccggttgttctcaacaaccgggagtaaatatcttttcccgctatttcgaaattctttttaaacccggttagggttaagaaccgggactaaagattatagcactgcatatgattttcgcttacatatgtgtttataaaatagaagttattgcattaacattatttaaagtacaaagattaatgacaattacttcgaaaaattatttttgtctgtaataaattaagtggataaatcgtaataagcaaatatatgacttataattaataaaaattccaatatatatatatatatatatatatatatatatatatatatatacttagcatagatatgaatgatattattatattggtaaaaactctaattaagatatgtatgtacatactgcatgatttaaaattaataaaaattgtaatcatcatatatacttagcgtaggaattatattaaattaaatgctaaaaactctaattaacatatgtaaatgccacatgcatgatttaaaccttttaaaaattcgaatagtcatatataagtagcatatgaaagatagtaaattaaattgtgaaaaactctaatatatgaatgatagttttaaaaatatattaaatttaatacttttaaaaattctccagtcaattataattagcatatgaatgatagtaaattaaatgttaaaaactctaattagcatatacatgatttaaacttgttgaaacctctaataatcgtgcgtaattaacatatgccatacatcaattgatttatatggataatcaatacatccaaaatagtttacatcgtgtacacaataattacggcattacatcggcggtgacggttgactgcacgtactttctcctcactattgttcccttcttgtgatcgctgcatgagtaaggggtgtcttcatttgataggaggatgctagggtcaatcgtcaccgtgaaagggggttgcccatccaactgatcgtaatcctcgtcagtcttgtcctcaactccgacgatttttcttttgcctgggagaaccacttgacgcttaggctcatcaggccctctgcccttctttcctttgctagacatgtccttcacgaaaaagacttgcgttacatcattggcaaggacaaaaggttcgtccgagtatccaaccttgttaaggtcaacagttgtcatcccactgtcatcaatcattacgcctccaccagtcaacctaacccattggcaccggaacagaggaaccttgagaggaccatagtcaagttcccatatgtcctcgatggcaccgtaatacgtggcagttattccatcgtgtcccatggcatcgacacgaacagcgctgttttggttcgtgctcttcatgtcttgggctcccgtgtagaatgtgtacccattgatctcatatccctggaatgtcgcgatcgacccagacggtcccctcgccaggaaggcaagttgttggttgatcgactcgttacccatgagatgttgtcgtagccacgcggggaaagtatcaatgtgatgccgtgtaatccatgcatcggacttaccgatgttcctggcgcgaactagagccaagtgctcctcgatgtaaggagctaccaatgaagagtgttgcagaacagtgaaatgggctttacggaataaattgttgtctaccgtcattattgctttccttccgagagttccctttccccgtagtctcccttcatggcgtgattcaggtaccccgattgggcgaaggtcttcgataaattctacgcaaaattcgatgacctcctctgttccataacccttggcgatgcttgcctctggacgagcacggttacgaacatacttcttcagaacgcccatgtacctctcgaaaggaaacatgttgtgtaggtacataggcctgagaatacggatctctttcacaaggtgacaaagcagatgtgtcattatattgaaaaatgaaggtggaaatatcaactcaaaactgacgagacattgcaccacttcattctgaagggcatctaatctatccggatcgatgaccttctgcgaaattgcgttcatgaatgcacatagctttgttattgttgcccggacattgtctggaaggataccccttattacaactggtagcagttgtgtcatcaacacgtgacagtcatgagactttaggtttgtgaacttcttctccttcgtgcttattattcgcttgatattcgtggagtatccagacggtacctttatgctctccaagcattcaaacatattttccttctctgccttgctaagagtgtagctagctggactcaagtaatggcttcctttctcctttggttccgggtgaaggtcgccgcgttgttccatatgcttcagatcattacgtgcttccagtgtatctttcgactttccgtatacacctaggaagccaagaaggtttacgcaaaggttcttagtgaggtgcatcacgtcgattgcgtggcgtacttccaagaattcccaatatggtaactcccaaaatatagagttctttttccacatcgccgcgtgaccatcttcgctctctatatgctggcttccaggcccctttccgaacactactttaagatctttaaccatagcaaacactgttttcccgctgcgatgtttaggcttcgtacggtggtcggccttatgttcgaagtgcttgcctttcttccgtaccgggtggtttgctgcaaggaatcgacgatgacccatgtatacaaccttcctacagtgcttaagatacgtactttctgtttcatccatacagtgagtgcaagccttgtaccccttgttggactgtccggataggttgctaagtgcaggccaatcgttgatggttacgaacagcagcgctcgtaggttaaactcctcctgtttgtcctcgtcccacacggggacacctttcttcttccacaactgtttaagatcttcgaccagtggtcttaggtacacgtcgatgtcattaccaggttgcttggggccttgaataataatcggcatcattatgtacttcctcttcatgcatagccagggggggaggttgtagatacacatcgtaacgggccaagtgctatggccgctgctcatctctccaaaaggattcatgccatctgtactcaaaccaaaccgtatgtttcgtgcgtcctttccaaattctttaaattctctgtcgatgtttcgccactgcgaaccatcgtcggggtgtctcagcatcccgtcctgttgacgctcttcagcgtgccatcgcaacattctagcattccccttgttcctgaacaaacgccttagccgtggtattatagggaaataccacatcaccttagcaggaattctcttctttgttagctgcccgtcaacttctcctggatcgtcccgtctaatcttgtatcgtagtgctttgcaaacagggcatgcttctaggttctcatactcctcaccgcgatataggatacaatcgttcggacatgcgtgaatcttatgaactttcagtcctaacgggcagactatcttcttagcctcgtacgttgtctcgggcaatttgtttccccccggaagaatgttcttgacgagtttcaataaatcgccaaatgccttgtcactaaccccattttttgccttccattgcaacaactccagagtggtatccaactttttgtgcccctgctcgcaacctgggtacaacgaagttctgtggtcctccaacatcttgtccaatttatgggcctccttttcactttcgcagtcctccctggcatcctgcaacatctgaccaagatcatccgcaacgtcgttaccatcagcagctatttcctcctcgcccgtttgatttccttcaaatccaacatactgagcaaagtccggaatattgtcgtcttccacttcatcttcttccatttcaacaccttgctctccgtgggatgtccaacaattatagcttggcatgaaccccgactcaaacaagtggaaatgaatagtcctggatgcagaatactccttctgattcttacacttattgcatggacaacaaataaaacccctttgcctgttagcttcggccactctcaaaaaatagtgcacgccgtcaataaactctttggaccgccggtcagcgtacatccattgccgatccatctacatgagtcaaaaaaaccgtacacaaataattattcttacaataatgacagtcatacaataattataagatatctttattcatacaaaaatcataaaatattacaccaaataattcttaaaaactatttgtaaagttttaaactaattttaatgtgttttacttcttttaattttcattttagtttgttttctattatttaagattaactttcactagagttttccttctcaactattttataaaaccttgtttagcaaatgaactaaatttctatatattctttcttccccacacacattttctctctcatcaacttacaactaaattttggagacaaaaaaagtgtgcaaaacataggtgcaaatgtagtatgacaaaaaaaaaacattggaggatgaagttgcaaaccttttaggcacctccgatttgtatgtaatcaccaaaataaattcaatagaaattttggcatgacctcccctcttttttgaagaaattttgaagcttgctcgggcagctggaggaggaagaagacatatatataggggtgggactttagtcccggttggtagcaccaaccggggctaaagatcaccgggatctttagtcccggttggtattaccaaccgggactaaagttacgactttagtcccggttggtcccgggggggcctgacatgacctgacagcattcgaaccgggactaaagatgatctttagtcccggttggtaacacaaaccgggactaaagatcaaatatgcccgttacccttttgaaccgggactaaagatcatctttagccccggtttttattgcatccgggactattgtggaaatcggccgaccgacgaaagatggtttctccaccagtgatatcacttcgtccacacccaacattgctctgtcaccggtgaagaccatcgttctctgtcaccgagaagtctatgacaccttccagattggaagaaacatgcgaagttaacttggtacgcaaaattgtcactcggccagtcagcaacttgttacaaacgctactgtggggtcacctagttcggagtcatcatcaagcgctactgtggggtatatggttcccggttacctcatgttttgcctttgtgccgaatagcatgggatgggccaagtgccctaggcccacgcagcttacttgtaattaaagaaaaagattaaggattaggcaattattcctatcccatgtaaatagatggtaggtattcggattatacgggataccgtaccatatccacccggctgccctagcttctatataaacaggttagacacagccattctccacatatgtgctcacgtgctattccaacgccgtactacgcatacctacacagattcaatatacatacaactggactagggtattacctcacatcgagagcctaaaccagtataaacatatgtgccaccatctctccttgatctagtgcaccctataaattatattgcagatcataagaatcgacagtcaatggggacgaacaacctcggttggcccgagaagcagagcaacacacagtagaagaacgcaaaagaaggccgaagatgaacaagcaaggatcaaggaaggacgcaaacgcaaggaagtggaagaccacaggaaacacaatctgtccatcacagcgtatgctgcccacaaagcgaacctccagactccattgcagaggtcaacaccaatgtcttcatcacgccaaaacagaatgctattgcagcggctacagagctatttcacaagagggtatccaggagcttaccatcatggcttaccgtctacaccctgaccatccacgcagcaggaggagattcaaaagaaatggcaaactagttgcccgttacactcaccgattccgctaggagttagctcgccggcttaccaaggggcgcaatcgactcttggaggattgccagtaggatcgtagaaggagggaaggtgggtcaatgtcgcgaccgggaaaattgccttttcccgaacgctagtgtattgatccccgtcccaggaaaagccggggtacaccacacaaacatgatataaaagacacatctttattatatcgacaatacttacattattacaaaggcgcttaaggcctgacaatcaaaaataaacagcagcggactagcgggcctacggctccatcttcacaggcgctcaactggggtataagccaggactccacctaagacatcttctccaaagcttctcttactgaagaggggaaggattgagcaagaatgagtacaaccacggtactcagcaagccacaccggcagatgcatgattaatgcaagggaagtacaagggaataataatagggattaagttttgcagtaaacagcatttaaaagtcacttagttgcccaaagccattttgtaaagacgatcctagagctacacagtattattaaacaaggccgtgaaccctcacgaacctgccttaacccaaggcctacgatgatttggaccgaactggcaacccgacctgggttccagctcgtcccaagccaacccaggccaaccattccatattttagttgttgagcaaattttaagaattaaaacactgacttgggtacattgctaggcttgcccatatccgagggctcggctattcgaatagatttactctgatcagaggtgtacatctttacccacaagacacatctttacgccgcattccatggccttggaacccgtcgtaaagatgtgacataacccttcacccatcctagccgtgaacaaaagtaccgacccaaccctgcctacggccggtatcccgggacaggcaggccagggttgagcccctagcaacaagatctagaccgggtgcgccacacacataggggtgagaccacccgcgtactagtccagtgccatggcatctcgactaacgggcaccgacccgtgtagtcttcatttgcctagacatctcgattaccgagccgcagctcgcgtagccttcatttgcctcagagatatccatcgtcgcaacgacttcatccatctctatccgtgtccttttgttcaggactagactgagcaccgagttaagccttacccattagacatgtggttagtacggtagtgctttgcaacagaggcccgagcttaatccttatagtggccggggtgctacttcccataactggcatgcacccaaaccccaccgaaaacaggctttaggggttttgaaagaggaagagaggtgtatgtccaattccaccataatccaacaattccaaagtgtccaaatgacatgagaattcccaaagtctaaagttataaaaccacctaatgttgcctaattaatcagcgaagcatctacctaaattcatactagtggaaccatgaatataatgtccactagttggggttttgtttattctagggtgaacaaggtaataataacaatagcaataataatgtcataacaaaggtaaataggcatggctaaaaaaaacagtgataacgcgggaatttaaacaaagcgataatgcaataatttaaatcaaaataattttataaactgggattcaatatgctcaagggtgatgtgacttgccttgctcactttcccaaacgccggcttcaacttccacgaagagcggatcttccgaagctgcagcgtctacacgaccgacggaaaagaaaaggcttacacactaataaactccacataacagcaggaacaaagcacaaaaatgggttctttacttcttaaggaaaaattagagacttgaacggtccaattccgagttcaaatggccaagttatggccatttgaagtttatatgctctttaaatggatatttacgaatttcttcatttaaattttaattaaaaatcccatttattgcgtcagccgagggagagggcgcgcggaccgggtccacgggagtggggcccacgcgtcagcctctcggtccacggtggaccgggcgcacgcggctggcggcggtcggcgccgtgggtcccacgcgtcagccgcacccgcgggcgcgggcggctgacggccgggcccacttggcagccgcgagggcgcgcccgagggcggcctcgccggcgcggccgacgggagcggcgcgcccgcgccccgatggtcaccgccggcgaccaccggcgcggcggagcggcgcccgagagagaggagggaagggggaaggcgaacggcggtcctcggctcaccccgggacaacgacgacgacgagaacggcggccggagaggaggaaagcggcggcgcggttcgggatgacgatgacgacggtgctccggcggtcggcgggcgaagcggagcggcggacggggtcggcaaccactcggcgaagccgatggaggtggcgccgagtcgggaggacgtccggagcggcggcggcggcgaaccggaggtcggcggcgacggcggagagagaggtggacgtcgcgagcacgaatccgacggcgagagcaagcggcgaacggcggaaacggaggagggaggcacggggagcaaatatatagcgccgagagggggagagcgcggccggagagagaggaaaccgcgcgcggagatctcgggcgccattgaagacgccggcgaacttcgcgggatgaatccggacgaatccgagggagagagaaagggaaaagagggggaatcgggagagggaaacgcggggagtaattcccctctctttaaggcgcgcggggaaggcgggatgcggcggaatccgcggcggcggcggcgctagggcacgggcgcggcggcgggcgcggcgggaggaaggcgatgacaggtgggccccacccgtcagcgagagtggcgggcgggcccgcctgtcagcggcgcgcgcgcacgcggggagccgatgggccgcgggggaagagagagagggagggactgggccgagccggcccaagaggggaagggggggggaaacagacttcttttagggtttttctttttataaaaccttttcactttgtttatttcttctcaattattatttgtgctctgaaaattccactaaaatttgagggctccttttagaccaaggagaatttaacaaaaattctccgggccacatttgaatttttcttgtacgtattttagggtttgccaatttcttttcgcattttaattaattctattattccttttagagaatgatttttattttgggatgaatttatcaggacgtgacagtcaatcctgaatcgttggatcttagagagaccatcctgaccgatcaatgaggaatgaggaatgtaacattgtgttggtgaatgaattatagggtagataagggaggaaggaaagaagcaggagagaagaagaaagaatagaaaaggaagtgggacccatgggacccacattccccttctcctttgacctctttcacctgacaaccggacatcacttgggatattcactggaatattcctctctgttatatttagctggacaccaacgggttatatgaaaggtgccgcttttgagtaagaaccggcatctatttcttttgtccacaaaggtgccgggcgggtcccacgctaactaaaagatgtcggttttaatttaaaaccagcatctatctctgacagaggtaaaaggtgccgatttttttaaaaaaatcggcacctattaggatataaggatgccggttcttggtattttgacgggctcacgggcgcgtaggttcgaaaggcactatagacgccggttttatcacttccggcacctatagtgctggcatctatttgatgttttgtagtagtgtacgtaattaaattttaatattcatcacgctgacctaccatgcaatttcatctgttagttacgttacaacttcagctaagattttgtaacaaaaaatcatctcgcgtataaaataggtccagcgatataacgtccattgcctacatattttcactcacttcccgttctaatatcatagaattgtatgccatgatatcttgcaacgtcgaatgcaatcatgattgaaaataaaacatgaaaaagtctcaaagagagagagcatgttcaacaaaaggttaagtaggacggtggtgcgaaggaagagggactgggcggttgttcaataatagagggagacgatgacatgctaaaaccatagctaattatggtaagagaggaggagagaatgggagaaacaaaatcagaatcgaaccctaacacatgcatactttgaattggaccttctcacttcggcatggcaaacaccccatgcatatatatatatatatatatatatatatatatatatatatagtattataaaaattgaagatatttttgccggtattttgatacaagaagcaattcaagaacatgaagatgaagaagttctatcagaaggcgcttgatgaggcatttgtagctgtccaagaatcaagcgatattgagtttgaaagtgatgaggatgatggcaaggggaacaaaggcaagaatgatgtttgtctcatggctagaagcgtggatgaagattctaattgtgataatgaggtaactcatattcctagtgttgaatatcttcaagaagttattgctagacttggttataagatttctagatttgagaaaaagattaaccaatatgaagctactattgaatctcttaatgcttaaaattctagaataaaatctcttgtttctgataatgatgagtgtaaatcttgtgaggttttatttgaggaaattgaagctgttagatatgttaataggtctcatgttaaaaagattaagaaatctgaatcttgtcttgctatgagttttgtcatgaacactagattggttgatgaattgtttttgactaagagagctttgaataaatgtcaatttgctttgtttgctagttcgatgtttaatgtgattagctctaaaaggattaaacaatctagtgaaaaaccttgtttgacatgtgttgctaatgagatgaaactaaaagatgcactaggtcgtgttaagcacatggaagaaattgtcaaacaagatgaggtgttttcttgctcaaattgtagaaaacaaaaaggtcttttggatgcttgcaaaaattgtgctaatcttactcaagaggtttcttacttgaaaagttctttgcaaagattttctgatggtaaaaagaaactcaacatgattcttgatcaatctagggttagcacacacaatcgtgctttaggttttaatccttatgcttatcatactagacatcctcctgttgttttaggtgctggtgctagaggtggtgaaattttgcttaaacctgagcctaagaacactgtgtttaaatctgctggcatcatgactagtttaagtgcattatcttcaaaaaccaatgttatgcatgcaaaaccttctattagtgcttgtgttgctaagccatatgtttctataattgcttctaatcatcatgataaatatacttgttcgttttgtggaaaagatggtcatcttgttggattctgttttagacttgctagaaaacagaaaaaggaacgggaaattgcttttgcgaaaaagagatggcaaaaactgcgttttgtcccgagacaggcagtcagaccggtgctttacccccagtcagaccggcggtaagccttcggtcagaccacaggtacctcagcggtcagaccggcctcgggtagatttttctaacgggaaatgggttgaattttctactggttatgctcctgttggttctggtcatgtgtctcagtatttttattatctaaccccagtactgaggcttcaacttctgcttgtgtgtaggcacttttggcgaggaaggagaacgtgtggattgtggattcctgttgttcgcgacacatgaccggtgataaaaattggttctcctccctcaagaaggcatcaaggaaggattcaatcatctttggcgatgcttctactagtatgatcactactactggatctgtcaaagtaagtgacaagtttacattgaatgatgtcgctttggttgagaatttgaagtacaatttgct

SEQ ID NO: 7449 - DNA, 10471 bp, Oryza sativa
tggttgagatgaggagataggtggagaagtagctgtatttgagataaatttaaatacttctaaatttaaatcctagaagtagctatattttaagataaagagggagtactatgctagactaaactgctctttcatggatacatatataatgatatacatatcctgtggtgtggagtgcagactctagtccatctccatgatagtgcaaaatctgcttttatcttttcttgttgggagcgttgccggtgcttgtgcctgtcgcaatgccatcttctgctccgtgtcatttcacctgtatgtcggcgtcgctgccggtcagaaaggaagtgtagtgctgctggccggtggtggacttgccagatcttgtttctgattgtattgttgtgcaagatgccggtgtttgttggttgctgctccagcgctgtttctgttgctgctgcagggatcgcaacatggctgcacaaatgcacaatgtccttttgttcacatcttgatgtcaactggctttgttttccagtgacatacattagtcagtaagcaactgaactggtcccaaaaaaaacatgaagttttctgtagagacagcgaaactcatctgtgttcagatcaggttggtacagtgagtgaagaggtcttcatgggaaaggcagatagatatatctattgatctttcttctcggttgcaatgtcaatgtctctcctcacaggcttaattgctttgcagttcgtcactaataggactcttttttcttctttagaggtttttgctatcacgatgcatgagttttgtcacgaaaggagagaaatgttgatgtcactcagatgtgatccgtccaactaacacatacagaggtcatgcactgtgccaattggttttctgttttgcacggcacctgcttttattattgccaactgtggctggatccaaagaggacctcactcctctcaagggaagagacctcgtttacagggtagtttacaacttgtgttaacactgataaggacaggtaagaagtaaacagaatgctgaattctctgaagacatatacaattagtggcagagattgtgatggaaagccaataagattgtacatacacatcccaaatatttagtactagtagcaatcataatggttagtacagcttattacaacatcaaccacacaacaacaaattcagccttataattagtaggaagttcagataaccagcagagagagagagcaggaaagatgaaatgagcgaaacagtgaaaagatgactcacaaagatggccaaaaaggcaaacacaaagcagcacatttggggaagccgatatcatactgtcttcaccaacacgctcacgccttagaaaaagtgaaaagcttttgcatacgaactgaactttggtacgaaatttccagacatatttacagctagctagacgaccccgacattttagagtacaaaacattttgctggcaattttgcatgcaacgagattttcagtcgatcgttcgaagaatctcgtaccaaaaatctgttcgtacgcagcaattcaaatagaaaagtgagacccaaaaaaaaatcaaaaaaatggaagagaattaagaaatcaagaaagcaaaagggttcaatgtgactcgtgcaggtgggcggcccacggcgcggggctcgccgtcgtaaggttggcggccgcggtgatgccgaagaagaggtccgtgaatgcgctgaccacgtacttgtgggcgcgccggtcgttgagcgcgaggtaccaaaagagcagctcgtggagccgcgccctgtcgccgcggcggcgcgcgtccagccgcagcgccgccgaccatagcctccatcgacctgaggaagtcggcgtgcgggtccggcgagtacgtctgcaccgccaccccggccgcgcccacgccgacggcggcgccgtgcgccgacgagtcgacgatggagttggacctgccgggcgaggagaggaagaaccggcgcgacgcgatggccgacgacagcccggagtcggacagcgccgaggcgttctcagcgacgacggcgccgccgccgccgacaccatcgtcgtcgtcttcaccgccgacgccgcccgagttcttgcaccggagcgaggaggacgaggagcacggcgaggtctccgcggtgcagccgccgccgccgccagccgaggtcgacgtcgacgcgtcgtcagactgcgccatgggcgccggcgccgcccccccgacgccggccgccgcagccgggagaagcagcccagcatctcgcctatagctagctagctagctaagctaagctactccccactaggcagctaagcttcagctaggtagctactactcctagtcctagctaagctaaggacgaacacgatgacgttgtgggctgtgcactgtgaggagtttataggagaggaggcgtttgcagctgttcagtggctcacctgttgctggacaaaaccgagttaagtactccaagctgactaagcatgcattatttgttcggattaattactcctaaagtcctacctatacttaacaacattagcaacacgtggatgatcagtatcatcaggagatagtgcctttttcgtttataaataaaaaaaagtaaatgagcagcagaaaatatcatactaccatgcattctgtctcagacactaattaattatcacatcattgtattattcctccaagttagtaatccaagtgtgattaggtccaaaccagccccatctatttcttatgcttatacttatcaaccaaaatttaaatttttaactttaaatataaagttgattttgagatttttttcatcgaagtttatttttcagcctttacttttagatcgttaagaacacgtatataaaagttttattcacaaattacttctcgtttgcaaatacgcgtttggcttattcctactgcatgatactcctactacatgtaaaaagcacagtgttttgtacttggtcagatcgatcagctacgcatgtacagaaacttagcctgcaaatgtattgagagtttgtacgcgttcaactaccgcatttgcttcgcagtacatctctgcttagctacttgtgtgactggtcctaactgcgctgtaacaattcgccacgcattttgtccgtttgtcgccgtaagtacgtacgtacgtacgcaattccagctagctcgtacgtacacatgcccccgcaccgaaaatcgctaatcagctattagccgcgcgcgattgctttctgagcccacgaatctttgtatgtatacgtgtacgtataactttatgtgcatacgtataaagtttgtgagcatataagtgaaattttatacaagtatgtgtgtgaacttttttacatccaaaatatatacacacgcgtacaaggtttctatataaaatatttatatatgtaccatccacgggtgtgggcgcgcggctgaccgcacgttagtgccccctcctctatatatgtacatatatacatgtattatattgagcatcagggtactttctccgtttttcaaaatgtagattgtttggtcgtgtttttttcctcctaataacaagtcgttaaattttagtaagtttgataaagtttatagaaaaatacagcaacaatctttaaccgcgaggtgtatatgtgtgtgtgtgtgtgtgtgtctatatatatatatatatatatatatatatatatatatatatatatatagagagagagagagagtctggaatccaaacgtgactagcacaatactccctctattttttaataaataacgtcgttgactttcgaacacatgtttgatcattcgttttattcaaaaattttatgtaaatatataagatataaattatgcttaaagtactttgactgataaaacaactcacaacaaaataaattataattaagtaatttttttaataagatgaatggccaaacgtatgaagtgaatgacgtcatgtattaaaaaacgaagttagtatatacgtactcatgtctgtgccatacggtgcgcgcgtgcaataatcgtgcatgacgagagagtacgtgtactatacgtacgtgacctggttggtacttggtactacgacgtggctagctagctgtgtgcatggatgggttcacatgaccaattgctaccagcatatcgatatgcaacgacacattcaagtcgatcgatctgacgggtcaattgaagcgtactcatgtatagtatacacatgtatgcccgtactgcaggtagtagttagccctgtataaatgtcgaccagaacgaattgattattagtacattgtaccgtattatctgcctgatgtatccccggcctgtggccccacatcgtcagatttaatacgtatgctactcagctgccaccgctgaattttctttgatttttttacagcatcagtcttaattaagctactcccatttacagataaaatatttatgtctgcatactattcactgtataaaagtcaaaagtaataatagaaaacagattacacaacttcagaagcattgaagacaaaaacaacaaattcgactttaaacagggcgcgtaattcgtagttaaatttatttttctctaattatacgtatcgaatttgaactttatatccccgcaaaaaaaagaatttgaactttatataataaagtgatgcgttacctattgatcgatctttcttaccaaattaatgtttctaaaaatttttatgacttttttagacgacatcgaagggccatcgaagggctagctggagtttctcaaaaaaaaaaaggctagctggctgatgaaagaggtttcttgtcacaatctgggagaaggtatacgtagctgtgagcagtgtacgtacgtacgtatgaggtatactcgactgtctacatcgacactacacgtgatctcctgcctttcgctcgcccatctcgatctgtatcgcgtctgtgtctctcaccggcctttcgctcgcccatctcgaaactggttgtttgattaggcaacaggaaaacacgaaaattggatgaaagagatagattcattttctaaaagattggatattttttttttaagtttcttctaaaatttacgtgcaatgagccattttataggaatttcaattttgaatgcttcaatgttttgtatcaaaggaccaagtacggaaattttatataagatttaaatcttacaaattttcccataaatcctttgattcaaatggatctaagtaaagtatagaggatccagctggctcggtttacaaatataaacgagactatgtctaggggtgtgtttagttcctgaaaaaagttggaagtttgaagaaagttaggagtttgaaaaaaaaagttaaaaatttacgtgtgtagaaaagtttttaatgtgatatgatgtgatggaaagttaaaaatagggggaaagtaaagacagcctaggattctagctacatgcactggatgagtatagacaagtaggagtaattaaataggcacttttgtaggtgcagccaggatcagcatctcccaatcccatggttgatactccctccgtcttaaaatatatatatagtaacgtagaatgagataaaacacatcctaaaacaatgcatctagacactccagatacattgttttaggataggtcttatcccatcctagattgctactccctctgtcccataatatgagggattttgagtttttacttgtattgtttaaacactcgttttattcaaaaaattttgaaattattatttatttatttttacttactttattattcaaagtattttaagcacaactttttattttttatatttgcataaatgtttgaataagacgagtggtcaaacaatacaagaaaaaactcaaaatactttatattatattataggacggagggagtatattttggaacggtaggagtagcatatgagagcatggctgtatgggcaactcatgctgtcatgcagatgcaacacaggccagggcgcctggcaaagcaatggaagcaactgaaaatcatatcatcgcgcaataagtgccaactgatttgtggatctcgtcatctcctcgcaacaagatcaagctggcctcctcaaggcagcgaattcatggttgtaagttgtagtaacatgtaaaaggccggtgtaggtgtaccagctaacgctgttaattaagcttactcttaattaatctcctaaccccgtgttcatacactgcacctgtgcttcgattttcagaaactcacaactaaaccggagaagacaagtgaactgatgaatcgaagcaccaattgggagaggtcagagttgttgctcgatctgtctcaacaacctcgaaacgcagaaaattgcagggcccccagttcgctgtttctccggacaattaatgccgcacacacacaggtgacacacaacatttgagaagggtactttttaccctatctatacatttaacgggatatatgcaatattttaaattagaaacctagccacttaaacaagtcgatttaaaattcgttcgtacgaagatttaaattcaaaactttaaattcagaactttaagatgcatatagaccttagatcactgtactaaactacatgtccttttgcacgtaagtgacacccgggcctgatctatacgtccaaccgatatatacgatctttttaaattgaaaacctagccacttaacaagccgttctaaaatccgttcatatgaagatttaaattcagatccttaagatactattcgcacgtagaccttatatcactgtaactactagattacggtgtccaatcgcacataagtgacacacagggccccaatgtgctctccaccttgccagtgcagtggtcaccgcgtcgcgcctgctgctttgccccccgcgtctcggctcagatcggcaccgcggagcagccggcggccggcgtgcacgcggacacgatccgcgtctcgtgcttgtcctcttcgcgccgccataaattccatggcggggcgcatgtccggcgacggcgagcggggcggacacgcgcgcggcgagcacgcgatgtcacgccgtggcgccatccgtcgccgcggttttaacacaagtttaaagcgttgtgatcagtggtgttagaatcaaaactcacgaactctcgctctcacgatctgtcaaccttttatcaaatgtgaacagttaactgaagaacagactagaacgagaatctctgaactttttatcgaacgtgaacagttagctgaagaacagagtagaacgagcagagttttggtgcagcgtaagcttttctggtttttctatttattctcctcgattacagactttgttacatgcataacagaaaaaaaacacctgattgatctggatccactcctgaccgtactcccacgatccaattcagtccaaccgaaccaaagaactagctagagaacagctacaggctaactgaaaagaaacggcttctgacagattctaacatagcttcagccacccatatggccatatgcaatgcaacaacggaaactagaagggatggaagcatataaaacgtacaccgaagcgtgttaattttacatcgcgctcgcgtcgcgacacgagctgtttgatacacatggatcgatgcgtggatcgtatccactcatgtcgttgggccgcggttgaggcgcgcggccgcggccatggacgcggccacgccgcccggcctcgccgccgcgccgggcttgttgcgcatctccgctccggccaccctcgccgcgtcgccgctctccacctccttgtccgccgcgagcttcgccgtcgcgttctgcatgaaccaatgttagtatagtactcctacctacctagctagcttagcttgcaagatcgatatgatcaaagagagcgcgcaccgagaggacgtcgccgagcttggtcttgtcggcgtcgcgcgccgtccagaggttggccacggcggcggactgcgcctgcgccgccaagccgccgggcatgtaggtgtccgtgccggtggcttttgcttcggccgcctgaatggccgccgcgtcgctgcgttccaccggcgtccctcctgccgccagcgccgccgcctccagcgcctcgccgattgttatcttcgcaggttcctccacccgtaccgcgccgggggcggcgccgacgactcctgcaaccacggcggcgccatcgtcctgctccacgtagtgacccaccgcctgcaaaaaaaaaaaagaaagaaaagggagatcgttcacgctgcacgcacagcggagagacgtcgatcgacgacgaagtgtgtgacctggccggcgacgaactcggtgacgatgcggccgccgccggggacgagggtgtcggagacgttgacgccctgctcggcggcggcgtccgtggcctggtcatgcccgacgacgcccatctcctcgttacgactcgccgcggactccatggcggcggcggggccgcccttgaccgtcttccccagcacgaggttctccgccgactgcatcgtcgccgcgtcccgcggggcgatgggcttggccgcgaggcttccggtcaccgggaacacgtcgccataccggatcccctgctcgccgccgccgccgccggccgccttctccgacggcctcctcggctgctcctggctcatcgtcctagtacactctcgtcgtagctagcactattgtagtgagatcgtgtgtggtctgcgctgtgaatgtgtgagagagatcttcgatttcgaggtcatatatggcgcggctcgccgggtagaacgggggacaggtgtgggagacggcggcgacgtgggcgcgttcgtgtcgcgcgcgaatgggagcggcatgcgtggcgcgtgtgagcggtgctgtttgttcgcttcttcctccgccacctctctggtctttccgggtgtcgacgaccacggtggcggtgcatgcagactaaactcactcccatgaacacgtacgctagctgtcatcggacgccgttggcggttggagactacgtcatcgtcccggcctggcccatattgattgcagtgtacgtgacaacttgcggcccatacttattaggcccgaacaggattgcgtcctctttttattgggctcgagcgagattgcggagtacgggcggtctatacttaggctgtgtccgtttctcccacaagagttggatgaaattttggatactagtggcatgctttttaagttctaaacggtgtgtttcgtgcgaaaactttctatatgaaagttactctaaaataccagattaatatatttttcaagtttgtaataattaaaactcaattaattacatgttattaccatctcgttttgcatgaaacacttaatcttaatcttcatcttcattttcaggagattcaaacaccacctaaggtgtatggagggaaagggagggatcataagtgaacttactgtcgcttttctagtgacgtgtggcccatacttattgggaagaacgtattgtacggactataaattttgggccgtaattgtgttacggtggatgagaggcccatttatatccacgcgattcactggcgaagcagaagctaccgccgccgatcaccgatggcgatcgccgccgcgcgccggcggctgtggcgcgggctgacgactgcggccgccgcctccgtaggggtggaagcggacaccagcgccttgctcgcgcgccttgtcgccgagcctgagtaccgcgtgaaggcgacgatggaggaggcgagcggcggctcctccgcggcggccgccttctgggagcccctcgccgccgccctcctccgcgcgtcgtccccgactaaggcaaacctcgtgagtgagacacccttcttctccccgcttaactgtcagttgagctgttgttttgtttagttagtatcagcgttatggcgcagagaaatttccccctttctcgtatactaggtcgggttcagatctgcgatgcatttggcggtaccatgatttagcttatagagtggagtagaactattggatcgcgagcttgcggtgcatgattatataatgcaaagagctaagctattgatagcctgatgccctgatatgattctgttggagtgagtacattggtgctgattctgttgtagtcttcatgacgattttaccgaattatacatgtttgtgcattctagtgagagatctttgtaattgcgtgctaagatagaatcaacattgattcaggtcttggaatggaagctagagaagctaatcaaggaagggatccgtgattgtgagccctactcagtgataatccgtttctgccgagagacaaagaatgcagaatttgcaatgaaagtctttgaattcgtggaggagcttggaattcagctgaacactggcattttcaatgcccttatcaatgctttcttgtcggtaggagatctccttgctgcaatgaccttatatgaggctatggaagacatagaggattgcaagcccaactccgctacatatg

SEQ ID NO: 7450 - DNA, 74715 bp, Oryza sativa
  unsure (1)..(74715): unsure at all n locations
tcaaacttatgaaataatctgctagatggttgatggattgttgttattactgtcttcccatcctgcaacatgtcaaaaggttaaagatgaattgaactagttgccagctaatgtgtaatactctcatgtcacctcagctatatcatgtagaagttgaattatcctgagagctgtagttgaatccaatccagatgttggttcatcgagaaagagtaaagatggatttattatgatctcatttccaatgcaaactcttttcctttcaccccctgaaaccccacggacgaaagatccaccaatcatcgtgtcctggcaccttcaaacatcatcagataattaattaagctaatttctaagaataggtgcatgctaccatacaggaagtggagcgtttttcaaactacctttcaaggccaagttcatatatgatgtctattgttcgttcttccttttcttgcctcgtcattgttcttgggagacgaagcagtgctgcataagtcaatgtctcctttacagtaagatgagtaaaaagaacatcatcttgagtcacaaatccaatcctgaaaaacgagtataaaaccaatcattcactatactcttggacaaactttgaattagtttgtccatacaggctcaagctcaactttggtgctctgacgatccaaaccattggtacaagcagatgttttgcatataaaaccttgtagaatgttgagggtagttagtctagtcagacagtgcgaaaattgctaacaataaggaaccaggatatctctcagttcgaattgtttgccgaattggaagcggaaaaaggagaatactacatggtttttaattggcgattctactaaagtggtgttatgtttgagtgtctaaccaacttagtagctaggttacaccaacacaatttaaaggactaagcagaagaacaggtggaggtagaggcagaagcagaggcaatcctggtgacaaagacaagcatccaaaggaattgcgggacagagaccctggtgcagtggtgttcaagacgaagtggacctctaaacaccggagacctgtaagctcagactactgtaggcctcaggtgatgcaagtgttcactgacgtgaaacgtgtgcttactaatactacctccagcatcggtcaggagatacatcgaacagcttatcggcaggaagggcatgactggaacctcacctcaccagagcacgctacgacatggcgcagacatgcgatcgagaacaacgggcaggcgactccctgaacgtcccgaccgtgctccgccgcacaagccgccggagtttccatgagacgacgacgacgacgaggcgtcgccgcgcggcgcgcccaagcagacgagaccgtgagagacacaggtgaccaggcgacagccatagccgcgggcaagagccgaccaaaggcatcacggcccatgcgccgggacgcacgattgggccacccaattcggcccaaaaagaacatgtcggctgctcggcgtcggcaaggcccaattctggcgccgcccattagacagaataataatgacaggtgcgcggtacgtgccagaatcggcacgtcagatgtgcagttcccctgcggccaaggcagagggaagctggaagaagaagacagtagacagtacaactgtagcagcgatgaacaggtagccagatttagcgagataaccgtgagccttgccttgctaatctctcctttattatagccagccacacagcctatgcatgcagtatggtactatgctgtgctctgtagctgcaagcaacagctgatcgatctcatctcattcttatcactttcgttccccagctagtgacccatcgaccaatgagaaatttacaattagtggctccatcagttgggctaataacccaaagaaaaaaaccaaaatttaaattttaaaaattaattttgaagttaattttaagatattttcaacatattttctttttcagcattagcttttaaatcactaagaatatatataaaaaaattatctacaaattaacttttattttctaataaaccgttttaacttattgggaatatgagcaaacggtgaggttttagggctcgcaaataactaattgtaaataatttagttaattgattaattaataatcctggccccggaggaattaattggtgatgccacatcgtgtacgaacaagtgcatgctacggagtaactaattaataattaattaagacgctgcatgcatctattgcacgcgatcagagaggtcagaggatgaaccttcctttgtgttgtgttacctgcggttgagggacttgcagtatggctcgtcgttgtaggagacgcagccttcgacgtcgccggggccggcgaccctcccgccgaggatgctgagcagcgtcgtcttgccgctccccgacgggcccatcagcgccagcacctcgccgggcgccgccgacccggatatcccgctcaggatctccctcggcgtacccttcaccgccaccttgtacttcacctccgcaaactgcacgaacgaaacgagtctcatctcatgtagcattagctcactgaacctctcgcatgccggcggcgtacgtccatggagcttgggataatcgatgcgtttggtcgatttaccttgagatatatcggcaacgtcggctcggtcatcagcttcttgcgcggcgtcccggcctcgatgtccatcgctgcatacgcacagcggcacagagaatgagaatatatatattagggaagtgatttcatctctcaaggagatcggatatccctcgtttcgtctatattatctaaatatctataaaaaaattaaaaaaattagtaacataaattaatataaaatatatcactccacgaaaatacaaatttaaattcaatttttataagttgtaataaaaatgacaaatataactacgaaaggtacgataaccatatgtgcatgcagttaggatcagtaggagtgattggatgcatactgttgtcgtcgtcgctgaagggatggagctcggcggaggacatggtgtcctggggaggaggggtgaagccggtgaaggtgaaggagaagccgaggctggcgctggaggcgcggctgagggcggcgccgctggagacgaggtcctccatttcgagcttcagctgcgcgctgcgggacttgcggatgtggctgttgttgttgttgctgctgctgtagccgtggctgttcccaccggcgccggcgccgccggacgccgagcgcttcccgaagctggacttgcgcgacaggctcgtcgtcgtcgtcacgtcggccgtgctcagcaccgtctccgccgacgccgtcctgctcagcgactgcgccgacgacggcggcggcggcggcgccagctggtccgacttggtccgctcaatcatcccccctcccgtgtccatcatcggcttctccattatcgactccatgaacgaacacgaacaaactacctagctaacaccgtcacgttcctagcaagcacatttagagcagtagcttttacacgagacgagccgttatatacacagacacagagtgatgggaaggcaacacacgcagctaaggcatttggcaagcgagcgatggaggtcacgcgtgtgaggtggattgtggcgagggcgacgtgggggggaggcagcggaggggcagggggcgcgccagcgaagcgcgatgcgggacgcggggcattaatggagcgggaaagcgcgggtgtggctgggcgcgctcaggcagccagcttccacacatgccggcctcacgacgacgtatcgcgcagggcacccgcgcgagcccccgcctgcggctagcttagcccgcgacagggacgtccccggccacctcgccttcctcgctctctcgctcgcggaggcctcaggcgcgcgcgcgtcccttgcagatcgatccagcgcgcgtgcgtgtgcgttcggtttaggcgtacgtgcgcgcgggcggcagcggcggcaccgatccttttaagtcagcttattggcttatataatttataagccggtggatttaatgtcctaagtttagtggtttagttatacatctaccttacataagccaaaaaaaacttctccaacctagcttttggcttaatagtgttagagtggcttatggcttccaaaaagccaaacggaaaagctgcttgtttgtttaggtttagacttttcgacttataagttggcttataagcctaaacaaagagggccttagcccctccgcacaaattgaggcgctgggtgtgaaacacaaaatgatgacctatttagcaaatgctaacgtaaaataagtgtttagttcacgccaaaattgaaagtttggttgaaattggaacgatgtgacagaaaagttgaaagtttatgtgtgtaggaaagttttaatgtgatggaaaagtgaaaaaaaaagtttggaactaaactcgtcctaagtaaagttcctttaggcgatacatccatatctttacttgatgccatattatttactccatccgtcccaaaataagcacaactatgagtttccgtgtccaactttgatcgttcatcttaattaatttttttttaaaaaaaaataaaaaacataatttacacataaagtactattcatgttttataatcttacaacaacaaaaatactaataaaaaaattaaataagatgtacgatcaaaattggatactgaaactaatggctgtacttattttggaactgggaagtacaattcattgcagggttgctctatctcccgatcgatgctttaatttttctcgatccaaatcactgtcggactgccggtggtcgtttatccacattccatgttagcataaccacgatcaagcatggtcggatggtcctgttcatcggtttacctatgccttctatcaaacaagcagtaattttgcgcgaccaataacagctaactcatcaccacctaattaaaaacagtatagtggccatatgcctagataggatctaggaagaagacttgtgtgcgtcatgatgtagtgatttaatttttcttactaatgttgtgtttagttccacgttaaaattggaagtttgactaaaattagaagaaaaaatattgaaaatttatgtatgtagaaaaaatttgatgtgatggaaaagttgaaagtttgaagaaatagttaggaactaaataaggtctaagcaagatcttcaatatttggaacgcacattcacatcatgatcatgaactatctttgaggtggccattattgtttccaaacacttgtgagggctgagaaaaacaagcatctaattaaattaatgaaggataaagagattttttattaaaataataatatgaacgcgaaaacatgcttagaatgtactaacggcttaggagtgaaatataaaattttcgagccctaggcaatgtacagcccctatatacgatcttctagccataacacaggaaaattcggagcaggcaaaagtcgtcgatcgcagctgcgcaggagtcaggatggacatgcttggcatgatgcctctttctgttttccgtgctcacactgtcgtcacacagtgcaacgattaccatatatcattcgtgaagagaaacacgagtacacgagcggtcgagcatcctaatctcctttttaattttttttttatttttgaaaacaagcatcctaatcttgacgaggatgaaagtatcagcaacggccccaatgctattgttgacaagagatgtgatgtggctgtggnnnnnnnnnnnnnnnnnnnnctgcatgtagatgtactccactccagtaggcagtacgcctgcacagtcttttcctgactgttacggacgcggaaatgtttgtccggagaggagaatggtctctgctaaccggaagaccggaaccaccgaccaatcgggaaacggcgtggcgttgccagtactgattggtactactgggtagtatctttgacctcttggttaatgcactctaatgctccatttattacgaaatattgacgagatatttaaaaaaaacatactctcttcattctaaaatataactacacctataattatttcaaaatataacaatttatataccaacattttcttttcaaccaatcacaacccttcactattaatttttctcgccaaccaccacttcttaatcaataataatatatttatatttaattttatctatttttttaaataattatgtgcaactctaaaacttttatattctaacggatatagtaattaacgaaagttagctcgaaccttaagcgataaacatgcagccttcccattttatccgtgaggatttctttccggttcattcttgtttcctacccgcagtttagattggccttttatctcctgttacggttatttttttgggatacatggcgtcataattctagcaatccccttcctttttatcctcgtgttgcctgcgcgttaactttcatgaaatttgtttccaatttaaatttgtagcctgagattgcaatcttacaacataacaatttttaaaattcacattgcatcttttgaaatttatcgtgtaaatatggaacatataatgtcaaatacatattaaaaaattaaatattttttatgaaaaatatgacactaaacatattttttttttattttccaattggcgagcccgctcgtgtatttattactttgtcttgttcttgcatgctaccgcaatgcaatgcttgctttctccgtgtgttcttgcatgtataaacagttcggtctgtctatgcctattgtcaatggttaatatggatatactgtttatctttcatttcaatttaaatacatgcaacgggcaggtatgtagagttctagcgtgaggtcaatcacacgtgggtgcggtgcgtctcctcctcgcttcttagggcacctacatgggtttcaaacgaattaagaaatataagtttgaaaaactattttaaaaaactaaccaaaggaaaacaaattctaatcaaagtatttgtgtgtataatattcgtgcgtataaaccttttatatataaatgtatacattgaaatatataaatgtatatatatacattgaaactttatagcacatataaactttgtatgcaaaaacttttaatatagcaacattatgtataaaacatttgatccaaatctgaatcaagcaaataaactttcaatgtataaaattttttatatacaaaaggaaaaaaagtgtggtgtgaaaaaggaaggaggtggtgcacaggtgcatgatcatccacgcgaaagccgtttcgggtagacattaaccaaaagcgagtgaacagtgagtttttatatcactttgagtacagctttttcagaaaaaaaaactattaggagatgcctaactttgaattaaggtgtggccaaaatacccacgacgaaacactacatgcctttaccttcaaattgatattgccatagtcaagcattacatataggaaaaggaaataataaaattcaacaggttacattcgtataagtgcacggaagaaatagtaggttctttctttcgccacgtataagctttttcacgaaacatatcgtttagtagtttaaaaaatatgctcgcaataagttatcagcaagtagctgaaaagaattgaacctaagagttgtttctgtacgcaaatgattaggtcatacataccagctccaagaagtcaagaagaggcataggcgaaggacacacaagatattttggagcaggcaaagtcgcatgaattatctgaaaaagcaaaatcggacaacagctgcgaacacagctcttatctgttttctctactccacacggtgcaaacaattactgataactcgtgcaaaatcatcaacacatgcatatcctaattatcttgactaggaccatcatctctaaaaatataagaccccggccccgtgcgaaatgtaaaataggtctctagctagattcatgccaccaaacatactttcactgtttcctcaagcctcatcgaatcttgcatgtcttctgggcttagcgagattaaaaaaaaagaaaataaagcaagattgaagtgaaaccttgaattgagtaagacaactgatattgaattgaggagggaaaaaaatcaccagtttgtgttctgcattcactagacgaaccgaagaaagagtgggctaaattgtgctttctattggttaacatatgggctattttttttttctctctgaagcatggtacttaagcaagtgcattagaattcagggcctcaatttgtagggtgtcctatacagctgatcacctgcccttgctaagctgatcgaaagtattagcagctgagatgggtgttaggtggtgtttacatccagggacataactttagtccttgtctttagacactaatttagagtattaaatatagactacttacaaaactaattacataaataaaagctaattcacgagacaaattttttaagcctaattaatctataattagagaatgtttactgtagcatcacataggctaatcatggattaattagactcattagattcgtctcgcaaattagtccaagattatggatgggttttattaatagtctacgtttaatatttataattaattttcaaacatccgatgtgatagggacttgaaagttttagtcccatctaaacatggccttactgttaacaagagggccctcactgctgttgagtgttgacaagatgtggagtggctggtgcatgtacgtcttcagagtctctttcgaaaattactgacaaggaaatgtttgtctcagaggagaatggtctctctgtgaaccaaagacgggaagcaccgaccaatcgggaaacggcattagccattgacccccttggtttaacgcactctgctgcaccatgtatgacgagacgtacacgtaagggaacgtgcggtaggtagtagtagcaggcaagaaaatatcaggaaaaattcttccttgtgcagtcttgcatgcttgcagggggggtgtgcccgttccctgaagggagtagcactatcgataaatttttcctcagacgtataaatataatataattacagtgttattaaattatatcataatataatttatattaattttttaaaaatctcatggtacacgctatttttcacgaggtaaagttcacaagacgtaatctcctcccgagcacgtgctatgatttttttctaacaatttaaaattatgtgaaagttgcatacaagtttagttttttttaagtagttatatacaagttatatcataactacatagaagttataatataattacattttaattataatgtatttatattaatcgagaaatacttttatagcaaataaatctttcgtggacatgtggatgcagaatctgctcgctgccgccctgttcgtgccatagcgcaacccagctccgctcttgggccggaacgggattccggcctacgtgatccccgttactgttgggccggaacggcattacggcatccgtgcgggccctgttatggttgggccgtaccggggattccgatctccgtgcggccccgggaggggggcgtggtggaggacgaaggcgacggtggcaaaatcggcgacggcgacggcggcggcggcggcgatggcgaaggggagggacgcgcggtgggagtagatactgtagtcgtgcgtgctccggaccagcagcaggtagcggcgcggggaaggaagctactggtgggggacaacccagatccctcgcccgcgactcttctactcgcgctcgcacgccctcgtcggccgcgccgccgccgcggtgatggagtcgccgccggagtcctcctcctcctccccggtcctcctcaacatcggttcgctccccttctccctttcgcaaaaactcgctccccatccccaccgctcgcgtgaatttagaggctgatggtgatggtggtggctatggcgcagggggcaagaggtacgcgaccaccgtcgagacgctcacgcagcgggagcccagctccatgctcgccgccatgttcagcgggaggcacacgctcccccggcacccggacacggtacgccgcgtactcaccagtggagctctcttctcgggagctgtagcctcagaggatgaatggtgggtgcagggcatggtgttcgtggacagggacgggaagcacttcaggcatgtcctcaactggctcagggacggcgccgtcccagacatgtcggagtctgagtaccagcagctcctgcgagaagcggagtactaccagttgctcgtaattggaattctcgatcgtttcttcgattcatcaggttgcagcttcccaattaaccagccgttgtgaaaacatgatggtttgttttccagggcttggctgattgcataaatgatagattgggttggaaaaatgatgagaatttctcggaggccgaattgacacgcaaagatgtgatcaagtgcatccaagctccgagagtcagatttcgtggtgtaaatctatctggccttgatctatccaaacttgtaaggtctttattgttgttctctattggagttgctcattttttgttatggttattaccactccattctagttgctcttagcaactctgatttcgtgtgtgttcaacagaaatcaataaagcattttattttttttctttagtttcttgtaattttgtgacttttacggtctacaggatttatcagaggtggacttcagctatgcatgcataaagaatgccaatttttcctctgcttatcttcgtaaagcaaagttcagggtatgccattcacacctaagttcttcgttgtttaactgcttttgatgaagtagtagcccttaggaactatgctagttatcataatattttaaggcattttagttctgtcacaaaaaaatatctaagtctttgttttttgtatgactgtcaaatgttgtatcagtaataccttaccttgtatgttcatgacagctgacagaagctacttgttcttcattccaaagtgcaaatttacatgagtaagatggtccaaccagtttcttttagcttatagataggctctaagatgaaacacggtctctccttttttacttttgtgttttttttttgtgttggatgcataagcaagcagctaaccatctatttcctcctttttgtgttatttttgtttcgctgtgttattgtaattgcttgatttggaataacaggtgtgagcttattggagcaaatcttgaaggatctgttctagataaagcaaaccttcaaagtgcaaacctacagggtatgtaatccctttctttacctgtcttccgttttatgttatatgtttccaaaaaatactattatgctcaggattatcctgtttcttcattttcttggcttttgacatccttttcaccagggaagatcatcgtccctgtagtattagacaatgtagctatgcctattttgctttcactctctcctattcagggtgtgcttatattcttgtaaaaactaagtaggaaatgattgagttgctaggcttattttgcagatgcatgcttaaagcaatgttgcttcattgaaacggatcttcgttctgctcatctacaggtttgaaagtttattgtacatggtgtgtttcatgaatgttcccagattctcgcgctgctattctgctaacatattgcattcctggtcagtatacaagaaaaagtgaaaatcatgatgaacattagcataaagcaaagcatttctgtttttttttagaagttagttttctgctgctagaggtgatcgaatatctagtttccatccttgcaatattttgtatcatccaaacttccaaagtttggctgcaaaattttgtccttgcccaaagtattatctgcaacacatagacatatattttgtccgtacaggcttgtatcgtctcttcctgaacatttgaatataaggcataaaggctccctattccaaatggttttcagtaacttaaaatacgttgatatttgggttcttattactcatttcctcagtgtcttattgtcagtccaactggattttcagggtgctaatcttatgggcgccaacttgagtggagctaatcttgaaggggccaatctcaaggtaacaaaaatggccccattcaacctgcactttcatcctgcctgtcatatgtaacttaaggaaagctacttgagggggttaaccacagagctcttacacaaagacagaaaaaatgattctaatgtatccaactcttcttttactgccaagcttgaaataaagtgtctgaagtttgcactaggaaataactctagaagaaaatcaccaggagatgttccaaaggcatgaactgatgctgagatgtgcatgtcatgttttgcttacaaaatattaacaaatagggatttgcgaaagagatggtaatcatcttaattgatgataatgcttgcatataaggttttcttttttgtaaacatgtgatgtttgacatgagtgaaaaggtttcgacctgtagtaagtgtgataacagtgcaaacccgttatacttagaaccatgaaaccatgactgtttgatatgaaatcatggttaatcgtgtactgaagtgtacattaacgaaaggtcattggcattaacaccaatccctcttttcttgtgccttaactgacaacccagttccttgtcctcgctttgttattcaaacttctttatccgtactctaagctagtctgatttgcagggagctaagttggccggtacaaacttggaatgtgcaaatcttcagcgagcctacttgcgagaagttgatttgcgcgaaactgtatgttgtcctgcttgctgcttgcttcttcttttttttcctctctctcttttcagtctaactaaatagtgaacagtgaaagaatctaaacttacttcttaaactatgttttactttgacttacagcatttaactggtgctaagcttggaggtgcaaatctgcttggagctatcagataataccaagggaagaagcttatatcttctacatttacaattaaactgaaactggtgctttggtacctcgaacattatcttgcctgcaccaacggtttgttcatgagtaaatagtttcttgctaccgattctgcagatagtcatacagctttagtcggcggttgtacatatacccttgtcacattcctctgattcgaaaattcggtgatgaactgttggatacagctagttgcttagtatcatcatggatagaagctgttctagtaggaaaatttcctgcatactttgggatattgttgtgaacaatgactgaaaattttagtgggaaatatatcttcgttaatgtgcatacaattttcttttcatcatatttactcttcctttaagctttcagtaaaaccgggctcaaaagcgaggaaaatcatattttactcttgttcatgaacctatggaacttttgatgatgtagaaattaccacttgtataggctgcagagatcgatcatagatacaattaactgcaaatcaaatttgtttcggttataatttgcgtgcacagaacacttgcgtttccacacgtattccgaaaggaaacgttggcaataggtagcaatatgtacaaggtgaaggtatcgaacgtgtaagctacgtgcaggcttccgaaacttgcacgtcgtcgttcaggggggctcacgcatgcaggatcacttcagtgtgtcagacgcgcatggcgatcaatggtcggagaagccgatgagaccatgtccgccgtccgccgccgacggatccatcatcagcctgtacttggcgtagaagccggcggcggccaccaacgccagcacgacggcgaggaccaccctccacggcgtcttcctccggccggtcaccaaggcggtgccacccgccgccgccccgtcgttggccgcgccatcgtcatcttcttcttccttgtcctccttctcttgatctgctggtgcagcggtttgctgcgcctgcgcggcgccatgatcggcgggtgcggcggcggcggcggccttgggctcctcttccgccggcgacagcttgggcatggtgatgtggaggacgcggtccctggagtcgaacctggcgcggacgtcgccggcgttgcagtcatcggggacctggaaatccttgtggaagcggctccaccggttgccggagacctgccgctcgccgcttatccgcagcttcccgtggttgtcgatctgcactctcagctgctccttcttgaaccctgcaattgcacccgccatccaaaatgacacatatcaaaccttgcattgcatgaactgagcaataaaaaacaatttgtattcggtctaaaagttggtgttgaaaaacagaatgcgacgaaaaacctctaaaatcaaactgcagttcccaaaattgaaatttaattttgttgcggctcataagcgaagaggtgggaaggaataatgctcttgcctgcggcagataggttgatttgaaggaccttcttgccggcctcctcgaccagctggtgcggcggaacgaagtcggtgtagttgcgcggcgaggtggcggcagcagcggcggcggccatggctgcaggtggtcgatcactgaccggtgatcaggtgctcaggctatgatcactatcaggtgtcgattgatcagttgcaggtgtggtcgagttgatttgagaggaagccggtgttcgtgcacatatatagtgtgtggattcagggttgtttggagtgcgatgcaggaggaaggattgcttcattggacggcgtctgcagggggccggccgcgggaatgaagctaccttgcttaattaatttggttgcgctccctcggtgatataccttgtctagccttcgccaacgcatacagatttcccccacaaggaatctgaaccgtgctgttgttacttgttcttgttctcacagtataagtatttcctgcgattttctgtggtttgttctgggcggcactgtcgggatgtcggcagtcggcacggtaaaagaaaaaaagaaagaagaaaaaaatgtgcgtgaaacaccgccttgtcaagccatctcccgttctccattgggccgggcccggcccactggccgagtgaaactgtacagtagacttgcagttccaggttattgaggtcagacgggtcgttgaaccggcgaggacctcaatgaatgaaccaacggtccaaacggtcaaaccaattaactatcgaaccgagggccgccggttcaacgactggtccgatctcaataactatattctgagctgctacagactcacatgcacctgtccagcggttcggtgccgatttttttatcggtcttaagcggttttctcaaaatctatgtgtctagccggtttttaccggttcacttgcgtagacggtcttttaactggatcagaccgacgaaagctttggttccgatccaaccgctgctccggtccggtcctatggttccagccgagccgagccgagccgacgagaagctctagaagagtggcgttggggacgtggacggcgagagcaggtgacgcgttcccgcgcgacgcgggccgaggtggcgagctgcatgcgcctcatgcacgcacaccaacgcaccaaccagcgagttcactctcccatactactagtaccactctactagactccgttcgctgacacgccccgtccactcttgtccacgctgcgccgcgcagtgtcgcgcacaccccaaaaccccaaccaaccaaacaacccgacccgcggccatggatgcggcggcgggcggcggcggcgagccttcgccggcgccgggagtgggcggccggaagcacctctcctccatcgccaaccacgtgctccgccaatgctccctgtgcgtactttctctaatcctaaatcctaatcaaaccctgttgatggttgatttctccatcgtgtagaaactgtgttgttgttgttgttgttgttgttgttgttgttgtgtgtgtagaaactgttgctatcaattcgaaagaaactggcagtgttttccttgtagcagactcatgtgctttgatcttgtacgaacagaacatattggtatgaagcttcactacttgaaatgaagccggattacatgtttgggcattttatttgaccgcacaaactgcttccaaattaaacctctagcgcgtcagttattcattagtaactataccctgtatttgctaaacgtctctagttctctgatccatatgtccaaaacaatctgaatactataatttctaaccatgtcactgtaaccatgtcctgataccattagtaatatattatagcaattattctattcggtgcatgattcatacgtaatccttatagctcgtcgggagtcaggactcaggactagaaatggcaagagtaactaatacggggtcatggcttaattacaggacattggacagaagtgttgatgaattagttgcagactttgagctcggtttgaagactgctgcggtggataactattcaagaagacttgtcgagttctgtatccttcaggcgctgcaagttgttacatctgttgatctaggagacaagatccatgatggatcgcttagtcggttcacatttgatatgatgctggcttgggagacacccactccttcagatcaacaagttaccatggtttgtgatttttttatatttgtgtgaaattgtgtgtttgtgttcttctgaaatctgatctaaactgaccaatatggtgacattacaggagagcatagctaaagaaagagaggataagaaggagccgctcggagcaaatgaagctgtcatgggcgatgagacctcactgttctattcagatatcatgcctcttctcgtatgttaacacatagctgattaaattcctttccgtaaaatttcttcaagctattcatcggtaatgatgtttcaggtgaatgaagaaccaacagttggagaagatgcatatgtgtggtttggatctgtatttcctttggcgtgcgatgttatcaatgctcgattcacctttgaagccctgactgctacaaccgctaataggcttcattatcctgcttacgacaaattcctgaaagaaatggacaagtatgcaaccacttcacagttagatcttttttgcaaacataagcaacattgcatttcctctgttttttaatggataactccattgacttttgatgtgatatttgactattcgtcttattcaaaacagtagtgcaaatatgcaaaaaaatttaagtcaaccttaaaagtttttaatgataaaacaaatcataacaaaataaacgatactgatataatatttttgaataagacaaatagtcaaatggaatgccaaaagtcaacactttcatacctccctgctagatgtcgttcttcttctttttttttaacaaactggtagaactgcaaattatactgataaagcatgagaaaatgatacaaaatatagaacactgaccaccagtccaccacatcctgatggatgccatgtgaaattgacttttttttaggtcttccgaattcttgcagaaggtgtcaactccaaccggaactgaacttgctgaagatgaattcatcttgcacatcgagggaacagcaggaacacaaagggtggtgcggcacattggaaccactagttggccaggtcatcaatctgatcaagagttatattatttctggtttcttcaggtcttagcattttacgttgatgctttggtaacattttcttatgaatgctacattggttgtatactatacaggcaggctgactctgacaaacaaggcattgtattttgaggcttctgggaaaatttcatacgaacctgctttcaaagtcgaacttacaggcagtgaaataggaaaacaagttaaaactacttcaactggtccttttggtgcaccattgtttgacaaaggcatcgaatttgaactgtgagttccctcttgcatttcttatttttgtgttcatatggacaacctacacggatcaattctttttgttattaaaattatcactttgccccttttgcaaagaatatcgacagtaaccattcatctatgcagaccagaacctttggttttggagtttcctgagatgaccagctcaacaaggcgcaatatgtggcttaccctgataagggaagtaatattccttcaccgattcatatcaatgtacagcatagactcccccattcacaaatgggaggtgcattcgagaatcatattgggggtgataaggcttcatgctgcaagagagatgctaaggatgtcgccaccgcctccttctagcttcctagtattctcgctttacgatgagcttcctaaaggtgattttgtgcttgaacaactagcaaataatctgaaagagacgtcaacgataactccgctcagtgcatcccatgtgttcaagggtttgagcaagtcgcatcgggtagctttaagtgcggagatagcaaaagagcatgacaaggactcaaatagccatgaacagcccttggcatcacttgaaaacactatcggtcaagtaagagacgaggctcgggaagtcaccgtcgctaacgttgctatcgaaggaatgaaggaggaaggtatcactgatagccttcttgtactggtggtatgtacatttcttttatattctctttggtattttatctgctcaaatcatttttatttaagccggattgatttaatcaaacttccattcaacggttctaagttctaactgttttttatgcaggggttagtaagccccatgagcaaattgtttccagtgatccaaaagataatctcatgggagaaaccacttgtgactatcagtgtccttgccatgatggtgttaaccatatacaggttagatttatacaccgcatttaatttcaacatacattttactcttggaaacgatcagggaacatgagatgcaaggtccctttttttttcaacatgatgcagagagtgggtcggttttgcgttagcggcatccttgatactggcagcaggattcatggtttgggctagacaaagaaaaatcggtgcactatgctcagaggtgatcatcgacacttcatcggacaagacgacgatggaaagcctagtggaagcacagcaaagcctgaaaagagtgcacgagtacatcaagacagcaaatgtcgtgatcctccgagtatcgtcgatcgcgttagcgaggtcaccaaaggtatcaatatcatcagagttcatcacacacgttctccgatcaccgaatcgttccaccgttgcgattcatttccatgtcatgttaacgcgttccttcatcatcatggtgtggaactctggataattttctgagtttgcagcatacagaaacggtgatatggatgctgacagggttggcgctggcgctggccgtgatcccgttcaaatacgtcctgatcggggtgatggccggcggcttcatgtcgaacacgaggatcgcgagagccatgtcgaacccgcagggaagccggcggtggagggagtggtgggagagcatacctgccgtcccagttcgggcggttgacgggggtggtctgtgaagtgttcgacgaaatgccggcagaaaaatcctcggtattgttcagctataagcttaagtgttcatgtatgttttttgctcagagatgtgccatactgccatcatctttatcacctgtcagctggtgtataccagaaaagaaaaatggcagagcacttaacacggaacactttgttggatgtactaacggttaaataactgtcaatgtgtgttgataaataaaggaatacgtcatatattcaatattcaatattgtggtgccgagtttttgtcagtgacatatggatttagaagaacgtattggcagcggaaatactgctactaatgaaatagataaagtttctgtgtttgttccgaactttcactctgaaacttccgaaccaaaatcaccatctgaattgtcaacttcccagcacgcgattaggccatctgtaatctgttatctccagaacaacatgagagtgaatgggtgatcatgcttatatctgaaattcagaggcaaattgaaaaaactaaaatattgaaacatggataaatgtggttttcgagtgctattattagccccgtcgattagggaacatatttgatataacaaaccttttggtgcacacattatgcacaccaactattttttttaaaaaaaatcttcgcgtatatatcatacacactaactaatatattttttaaaaaatatataaaaaaggtgtacgatagtattacacttatatataaagtcgtaactacaattcatttcattgtattttagctgtaacaaaataaataaaaaaataactatttcaagagtataaatgtattaatttttgtttttttatatatagagtgagtttgaagataagatttacacatagatgtaatactagttgtataaaatatcttagaaatttttagtgatagtttttagttaatgtgcacggtggatacacgaaaagattttgtgcgtacgatattccagtcagattaacagctcaacactagcattgcaattgggacacagtgctaggagcctccgcgcctttccgaagccgaccgccgctccatccgccgagctccttacattcccgggcgcttgtttcgtagcgagtcttgacccagacagacgacgccgggaatgcgccggccattgagagcgccgccgtggataccagccgtttgacgtgagatgaagacgtggggctttgccgtcgccgtgttgccggcttttgccgccatgccgtggcgctgtgcttttgctgttcgttcaacgtgttaaagcgcggccattgttgcagggcgaggtgccgacgttttcttcaaggactgacttagcaattctcttcattctttgggtttaattattccatagttcatcactagaacagcttgacaaatgtgtactgtatgtagcaaccaaaatcttcatgtttgtcgtcttcagagttcagacaaaatggcgtccggtttttgttttgcaatcgattcaaccaaaccttgtcgaaacgatgaaacgatcttaccatgtcaaggaagacaaggaaaaaaccagcaaaaacgtttgctatctgccattaagaacttgacagctagatgagtcctcagatgaatcatgatggcattatcagcggtatcgagtcgtttggctgaacacacaccgtgccaacttggttaacccttttgtttggtagcgcaaacaacagttaaaaaaaaagtactacttcaatttacagattttttttcccagtctatccatccaattaaccaacttaacgaccattgcatgtagtcatgttcagattcggacaacgcacatcgagaaaacgtttgctttgcatcagatatgctaaaattgcccccacacacgcctaacttgttggagatatttacccgtcgagctgtcccaatccaaacgaactctcatagtatatgatggatgagatggatgcatagatggattggggaaaaaagttgagttgcgcatgaacaatccatgaacttggcgaaggaaaaggccacatccatccactaatcccctcatccaccattccacccacacgccgagcgcgaggcggaggcggccgcgtctataaaaccagaggcgcgcctcgccgcgccgcgccgcgttctcttcctccccggagtagaaaccgcccgccatttggatccccccaattcccctcctcgcccaaaaccctagccgcacccccgccgcgcgccctccgcctccgcctccgccgcggcgtgcgggctccgtcgtccgtcggctcctcgccactggcgtcgcgaggcgtcgtcaccggaggtagcgggagctcaggggacacgatctcgaaggcgcgcgccaggacgaacagctcgagcgcgccgcggggggccttcggttctgagataaatcaccccgtccgcatcatcgacgcctccctccccgcgcttggcgccagctcgttctagggggggaagatctcggcgacgagcagcttgggcgcgttcgcctcgatggacgagttcaaaggcccaggggagaaggagaaggaggaggaggccggggacaaggccgcggcggaggaggcgggggacggattccaggtggtgcgcggtaagaagaagaagcggcccaatggtggttcggcttcgggtgctgggtcggggacgatgatggccaaggacaaggcggcggcggcggcggccgcggagccgtggacgaaggcgaaggtgtctttccacgatcccaacattccgcggccgcaggatgtgtacgcaatcagagtgaacaactacaacgtgccgttcgaccatgtctggctagagcgcaccgaagatggcagccgccctatccaccctctggttagtgttctatttcgtcttttagtacctagtttttgcttttgagtcttttcctttttctgttgcttggtgtgtttagaatgaggagctaggaagcccttgatcaaatttcaagccatgacatgaccaaacattgttttacctttttttttgtggtgtttttatttgtcaatcaaatattgatgtttcttggctaaagatcgagccttgtatgggtaagaaatgttttggggatggcctacatctactttggagtatgatcttaagacaagaatgcttgggtattgttgaaaaactataagatggcatgtgcagagagaagcggggaaagacaaagatttcttgaatttttttttcggataatcaatgtgttatttttattattatgttgaaactatcaaaaagtaagcatttacatgttgactcaggcctaattggttaacagaattagtaggaatgctgtattttgtttttcgtaatcatatagagttattcaagatttgttggttttcttatgtccttattaatcaatagtggaaggattgacttttttgcatattcaattatccatgcatgggatctgatgtaatatactctcgccttgcaggaaaaactgccaatggagcagtttattgacagaaatgttcctgaaagtgaacctgtaaagccagctgatttggaggataccccatttacgctagttgaagataagaatggtttagcagacttagctaaaaagttgaagagtgtaaatgaatttgctgtaagcatttgtaattaagttttatttaactttcaaatgaatatatatcatactttgtttccacttgcattgtattatttattaactttcaactgctagagtattttgtcttatgtagatatccccctgaaaaaaattgtaagcatgcttccctggcatgagttcctaatactggattttaaaatatgcaaacaaatcttgtcagtaattatctataaaatgtagtgaaacatagctgtagttgttgggaagtagcttttctttattgggtgggcagtaccttttatgatctggtacattgattttgacacatattgtgtactgagtttattttggttagagcagtaggactctactatttctagaactgttagaccattagctccttaaatgttttcattttacctatcatcataaggctccagtcattaacccaattagcgctgataccctgtaaggattaaaccattttatgtccaatatattgtagccttttgacttaggattcaaatgaaattgatatatgctttattctgaatgacatactgttgcctgtattgtttccctttctttgccttgtctgacaacaccattcactttctgcactaacggcattgcataactttactggattcttgaaaaagaacatattccatactttctttctgttgccttctcggtcttttacatttcattcatgttatgggcatctgttatggaataaaacaacttctgaggccttgcagtgttaggaacttaagctttatttcggttcgtctgttgttttcaggttgacttggagcacaatcaatataggtcatttcagggtttgacctgcttgatgcagatttcaacaagaacagaggattttgttgtagacacccttaaacttcgcatatacattggtctctacttgaaagaacattttaaagatccaaccaagagaaaggtttcttctgcgttctccaattgtttatcattttattgaggggaaattgtttatcattgtgaactcaaatttctgtttacttggtttcttcttgtgcaaaaaggtaatgcatggggctgatcgtgatattatgtggctccaacgggatttccacatatatgtttgcaatctttttgacacaggacaggtattttgattaataggctaataatactaaatactaaaactgtgattcttgattgcacctttaatttacctctttcttcattctccttcaaaatcctcattttcatgtcttataaactgaaccttggattttcctttctaactccaaacaggcttcaagggttttacagatggagcgaaacagcctagagcacctattgcgtcacttttgtggagtcacagcaaataaagagtactgctcatttacaccaacacaattttcaagtatccatggtgacctacctaattatctacaatgagtatttatgaccaaaacataccccttttgtagatatcaaaacgctgattggaggtcaaggccactttctgatgaaatgataaagtgtttaacctatagaccctatctttcatttattttggtttagtcttgcctcgtttttgtcctacatgttttactatttcatccagttttacccacttgcaaataactcctgtacaggtatgctagagaagatacacactatctgttgtatatgtatgacttgatgaggttgagactgcaaaaggagtcgacatctgacaatgatcttcttctagaggtaaaaccttagttcactagtttttccttttgttctgatctgatttttaagtctgtatgagtgaacattattttggtatatcctttttttccccttgaatgaagtatcgctttagaacaaactgcatgtagatcttacaaagtaaccattgtgcgatcctgttcacataaatttacaatctgtttgttagtcatgattcctgaatatatgtgattttcattagtactgacaaagagtatcaaaatagacattctgatcaccagttttcggttatttcaggtgcaaaagcgcagtaatgaaatttgtttacagttgtatgaaaaggaactgctgacagatacatcttatctccacatatacgggtctgtagctctgtatgatgttctctcaattagttcatttcattctatcattcagaaatgcacttttgctaacctcgaagttattttgttcacatttataatttgcgtgaatcccattaacacgtgtattattacaggttgcaagaacatgacctggatgcaaaacagctggctgttgtatatgtaagagaacatcttgttatttgtttacttcattatgatcattctgtctcgaactcgaatagagctaacatgtgtaacatggcattgttcctagaaatgtatttgtagttgctattactattggctgttggcgacagtttctcattttggctatgttcataactttattgacttaaagtttctgaaagcccatatgtccatgccatgtttccaaataacaacttatattttttctaccaattcgggttatttaatttatgtgtgtaataaatatctcacatatctttttgcaggctctacatcaatggagagattatatagctcgtgaagtagatgagagcactggttatgtgttaccaaataaggctttaattgagataggtactgctgatttatttttgtttttacggcacaggacttgatgtattagtttggctaactaactctttcatttccaccccctattgaattcaaaagcaaagaagatgcctacagatactgcagagttaaaaagaatggtgaaatcaaaatatccatttgttgatgaaaatctggaccaagtcgtaggcatcatatggaatgcaactgaatcttcttatgcctttgaaagcagagctgaacaactaaagaaggaacgtctggagcaggtatgtttaggttgatcttctgtgtatttcatatcttatttgtttgcttttgaggatggtggggagaggatcacagaatgcgatttcttatgtgccaattattagcattgacgtttaagcacctttggttgtatccagctaacggacagggttcagactatatcatcacctgagatgaagacatctatgaacttatcaggccagattagatcaatggataaggaaatactgagcgataacatacatcagcaggtaagagataatttcagtgtctgtagtttttgttcgcccctgtatttatgtagttgcattttgcaggtggcacaggctacttttcaagaactgaagagacctatggctttgggagcagtagggaattcaacatccgggggacagagagatttctttggagggttttcaaataaggtataagcgagtgcttgatctgaacaatgaaaacatttaagtgttcatttaaatgcatgcatgtcattttccttttgaattgttgatgagttattggtatagtacattcttggtcatatactgtaaaatgtttaaataatccttttggtttagttctgaatgttttgtctttacaatagttttttgaaaggaaaatgtttgaagaaccttcaatttttgcaatagttatgtcatatgccaccattttacctttttccttcatgatttaagctatgctttcctggaaatgtttttagatttcccagttagcttcatgtaggaattgtagacttatgtttgttatcatgcaattgcaacttatcaataatttacggaattgcagtctgagaagatggagaaggctaaatcctatccagccttttactacccccagcttccacaatatagccctgaagttgggtacggctttcaatcaataaaccgaactatggcgggaacagcacagtctcctactggcaataaggagagggatctccagaaccctagaagacgtcaatctttcccaccttccggtaacataagtgatacacaccagtaattgctctgatgtatgccttcaaattcatccttctgtgcagaaaatagctgtagagaaatggaaactgggctgtttttatccgtgccccctaatatgagaaactatgcctccctcagatttttttggctagactaacagaaatatgagaatagcccatatcattgacattagatgcagagcatgggaaatgccaatgtggattggcttgtgtgtaacaactgacaaacatgtgctgtgcaattgtgaatactggagttgtacaagtggtatactgtaatactgttatagcatagcatcagaatacaaagacagaaatgaacacatagcatcgatgtctcttttctttatttttttctttggacagcatgccttgaattatttgccataatgtctccgtcccgctggcttcatcacaccttctttgctgggtttagtttcagttcatcgtttggattagctgtttatgaatagagatgctgtttctgtctatgttcactctcagggatgaacatagggcctgcactgtctatgttcaaactcagagaggaacattgggcctgcactgcagcggtgaaatggatccgtgtgttcgcgccaccagaatgagcttggggcgcaatggaacatgtgatgtcagttaaagttgcaggtaaggcagtcaccggtcaaatcacggcactcgccaaccaggccggagcatatcggctctgccgtttgtttgctcctatctgtacgtagcacgagctgttttccattggcaacgcctgatcgatcaaggcgttctactcccctcagcacatgacgccaacgggttgcatctgctgacgacaaatcgctacgcagactccagattttacagctgtgttctgcatcaaccatggggaattggcgacccaaagtgccaaaccatcacacgcaagttgccatgatcgatgcgtgaaccggaaattgatcctctaacttgtccccataatttatgagcctacgtatgagtaacccatagcatagtatcagagaacagtaagtcagataagccttttcgatctgcgaccatcaaaatcgaacaaacggcagcacattttagccgaaacgaatcagagatctgccccagatttgcaacctacacacttgacaatctcaacttggctgcctgcaatctgccattccccttccactgcaacatggagatagccccacccaccaacgcagccaccctacggaaaagcacaccgtaacgccgcccaccaacccccctccgaatctcctccgatcccgacgcctatagatgaataaatctcctccctcttctcactagacaaagcccaaaccaaggccaaaaccctcctcccctcctctcctctccattccgccgccatggccgccgccgccgccgccgccaccacccccaactccctcctcctccgccgcccggcggcacccaagccggcctccgcggcggcctcgccgctccgtctccccacgcgggcagccaggatctcctgcgcggccgtggccacgcccgcgcagtcctcctcctcccccgccgccgccgccgccgaccgcggggtctacaacttcgccgcgggcccggccacgctgccgctctccgtgctccagagggcgcaggcggagctcgtcgactaccgcggctccggcatgagcatcatggagatgagccaccgcgggaaggagttcgacgccgcgatcaagaaggcggaggccgacctccgcgcgctcctcgccgtgcccgacacccacgaggtgctcttcctccagggcggcgccacctcccagttcgccgccgcgccgctcaacctctgcgcctccccctccgaccccgccgacttcgtcgtctccgggtcgtggagcgacaaggcgttcaaggaggccaagaagttctccgccgcgtccgtcgcctggtccggcaaggacggcaagtacacctccctcccgcccttcgacgccatcgagcagaaccccgaggcaaggttcctccacatctgctccaacgagaccatccatggcgtcgagttcaaggactacccggagcccaagaacaagtcgggcatcctcgtcgccgacatgtcctccaacttctgctccaagcccgtcgacgtctcccgcttcggcctcatctacgccggcgcgcagaagaacgtcggcccctccggcgtcaccatcgccatcgtccgcaaggacctcgtcggcagcgcgcagcccatcaccccggtgatgctcgactacaagacgcacgcggacaacgcctccctgtacaacaccccgccgtgcttcgccatctacatctgcggcctcgtgttcgaggacctgctcgcgcagggcggcctcgccgaggtcgagaagaagaacgcccacaaggccggcatcctctacgacgccattgatgccagcggcggatactacatctgccccgtggagaaatccgtgcgatcgctgatgaatgtgccgttcaccctcgccaagggtggggattttgagaagcagttcatcgccgaggcggccaaggagggaatggtgcagctcaaggggcacaggtcggtcggcggcgtgcgcgcctccatctacaacgccatgccgctcgccggtgtggagaagctcgtcgcgttcatgaaggatttccaagccaggaacccttaatttgactcatggtggttatggtattttgatgctgtcttcagtaggaatggtctctgttcttcatcatagcataattaggctccttgcaagagctgctttgcgcgtaagagattttcgatccatctgttgtatcggtaccagtaactatttcgcgatgctgctgctactgcttttcatgtgttcatgggatctcattcccattttgtgccattgaatgttagtatgggaataaaggtagattcttagctatctgagaggagtatatgctgatgctgatgcataataacaaggttgcttggtcttcttgtgtgatcatttctgcttagtttttcttgtgtaatcattttctcctttgagaaatatttgccgatgactgttcattcggatcatgtaagattgttctaccagaaaatctttagattgggggtgaaatgttaaattaccggtaactttcgtgatgctgcttctgttcctgtttgatctcattcccgtgtcgttcatgctgtctcttgattcagtgcttatgtaacaatgtacaatttttagctcggttacagttctgtcaaaacaaacaagtttggttggttctgatgttttatcatttccttatagagacttatcgacaatcattcattcggtttatgtaagattcttccagcagaaaattcttcagattgggatgcaatatccaggttgttgttagtattcatggtctggaggttggtgagcaagttcttgagtttggtggcgaagagtatttttacttgttgctgtgtctcagtctggagtggactggactcactcagagatgagtgcgacagcttcttgttgcaagccaacaaattctaaacaaaaatgtcatttaacttcgaaatttcaaaccgcacgtttggtaaatctgccttaaagccaggagtaccaaaggtgactacgatcaaatcacaaagaaagtgtatttgactttgttctgtcaatacttaagcagagcagcaacaatcctttttgaatacctcgatatgtcaaacttgtactgtactagtttgtcatccttgttcatttgattatgttttctagttgtgtttctacaataaagctgtaagctgtttagttccagtcccatgttgatcggttgatgcatctttctttatagagacgtgaggaatcccaaatgcattggttgcctttctgaatcttcggcgttttcaagtgagaggatcactggggtatactagtaccacttggtaatcatatgacgtcatcgatgattaatcccccgtttggactcttcgtttggtattgctaatctattcggccgagtggatatttctgtggcacctttctgaatttctaatataattttggatcttttgttaattcttttacgtgttttgagccagaataagttcaggaattttgtgagtcaccaattacccctggaatagctgccatcagaaagcaaatgctctgcttgcttagtatcactgtcagaagtatgtagtatttagatggatattaggataggattaatctgtattgggtccttttaacaagagaaggttatactccaataataagaagcaaaaggtctaagaaatacttactatcgaaatatagtaatctagtattcaattagacaatgttcagattcataaaataattagacaatgttcagatttataaaattgtttagattcgtaatactatatataatgcctaggaccgcagaagtaagaagagcacctgctagctagctgttcatgctgatttctgaatcttcagaaatcaattaatccagtcgtgatagaaaatttttaattcggcccaaaatgaatggcacattgaatcgtaggcccaaatatcaaaggaataagttcacctgaggtcccttaacttgttaacgaatccaattttcgtccttcaaccggaaaaccagatacgacaggtccctcaactatcaaaaccggtgcagatgaggtccctcagcggttttgatggcggttttagctgacgtggcgcctatgtggctaatttgactcggtattcgtcccacgtggcattgacgtggcgcttacatggcaattctatccccgaaaaataataaaaactatgggcccacatgtcagttaaaaaaagtgggcccccacaagtcagtgctctctctctctctctcacactcttctcatctggacccttgccgtcgacttcacttcgaggcgttcgggctgccgccgctcgtcccgtccctcgacccggccgtcaacatgagcagccttgccgctggcgcatgcttcgcctccgccggcgccggctacgacaatgccacctctgatctttttgttagccttccattagagcaaaacgatagctagcttagctacattttcatggtgttcttaggtgacatcacacatgacatccatggagtaattttgtgaggtcgcgtcgtgcatcggtgctgccgatgtggaaggagctggactacttcaaggagtacgcggcgaggcttcaaagcttccggggggacgacgacgcggcggcggcggcaacgctgtcggaggcgctctacatcgtcagcatgggcaccaacgacttcctcgagaactactacgccatggcgcgcgcccaagcggcggagtactccacggcggcggcgtacggcgactacctcctcggcatcggcgcatcgccgagtcgtactcgttcgtccgcgagctgcacgcgctcggtgcccgcaaggtcgaccttaacggcctcccgcccatgggctgcctcccgctggagcgcgccacggggagcggcggcgcgtgtaccgacgagaaaaacaccgtcgtcgagcgcttcaacgtcggcctccaggacatgatcgcgaggctcaacgacgagctcggcgacggcgagatgatcgtgtacggcgacgtgtacaggccggtggccgccggcggcgtacggggtggagaacgtaggcaacagcaccgtgcccacgcgggtcaaccggcggcggctcacctgtgccatctgcttcgacatgttcgcccccggtaggatgaggtcggcggggtgctcccacagtcccactacaactgcatcgcttcggtgcccggacccgtcctgctcagtcgccggcggaggcgagcgcggcgaccgttcctgaggagggcgcgggggcggaagacggtgctggagaacggccaccggaggccgaggcaagggggaagcggcggcggcggcgggaacatgcggaggcggcggaggcaggcacggcaggtgacgaggagagggcagcggcagccggcggtaggcccatgggggcgggagtggaggaggccgcgcctcgacgctgtccgcatctccgccggtgagaggagagaggaaaggggagagatgtgaagataggtgagatggggagagaggaggaggaagaggaggggattgagataagaagagtgagtgagagagagctgacatgtgggacccacttggggcccaccagttttttttaactgacatgtgggcccatggttttttattattttcagtgatagaattgccacataagcgccacgtcaaatgccatgtaggtgccacgtcagccaaaaccaccatcaaaccgcggagggatctcatctgcaccggttttaatagttgagggacccgttgtatctggtttttcggttgaaggatgaaaatcagattcgttgacaagttaagggacctcagataagcttatgccaatatcaaaagataaggcccaaagtaccctaccctctaggcccaaatcttccgccataatgctccggcccactaaacgagacgcgggcttaccgcgacgcggtgtgcgtacatcgtaagcagcgggctcctccgcttaaaagctaagctccccaatataaaccgcagtcagggcgaaaaaaagaaagaaagaaaaaaaacaaacgcgaaccgactgcgagtagtaagtaaggctaagcatccgtctccccccttctcgattgttctcgatctgcggcggcggcggcggcgatggccgacggcgggaagcccccgacgccggagaagaagtcgtgggccgacgtagaggaggaggaggaggccaaggcgaaggcggccgcggcggcggaggcggcctcctcgtcttcgtcgaacgagccggcggtggacgcgcaggcgaagcagattgaggcgctgtctctctccgtgccggaggagcatggcggcagcggcggcggcggggacgaccagggcccgcctctcctcgacgactcggatgagtcccaaatccaagccgtaagttccgcgtcggcgctagtgctgggtggccaatctcggtggagtcgggagctgctttctagggtagtttggttgaccggccgattgatttcgaggtgttcctgctcaggtgacctcgggcggcacggtgtacgagtcggcggcggccttcgaggatctgaagctgacgccggagctgctcaaggggctccacgacgagatggggttcagccggccgagtaagatccaggcggtgaccctccccatgatcctcacgccgccatacaaggacctgatcgcgcaggcgcacaacggctccgggaagaccacctgcttcgtcctcggcatgctcagccgcgtcgaccctaaccggaaggtcacgcaggccatctgcatctgccccaccagggagcttgcccagcaggttgattgagcacacatacttctattatgtgctagtatgtggatttttttcttttcttgttatggatgtgcacactgtaatgtactctgtttgttttattgtgatttgcagaataaatcggtgcttatgagaatggggaagtttactggcattacctgtgcatgtgcgatcccaccggctcagaaagattatgtgccgatcgctaaaatgccaaagattactgaccaggtggtgatcggcacttctgggacacttatgaagtggattaatcataagaagatcttgacaaatgatatcaagatacttgtgtttgatgaggcagaccatatgcttgccgaggtatggatgagttctattgctgttcctctatccaaaacttgtgtatgcccattgcccaatgttgttttctattatttattttgttattattaggagaacgcctcgtgtttagttattagggacatttgggttagatattaatcttatggaaagagataattgattattgcaatttctaagctgtataggaattgggaacaatgaagcaaaaactgccataagctcgatttgttgtaagatttttttttttgacttaacaagaataatggtggcttcatgatgattgattttcttactcgaagtggcataccaaagattatctatggcctgtatacacagtacgtggtgtttccattgatattacagatcgggtctggttgggatgtaaaaaggcttaatgtttttttcaactactatatttgccactggtttgtgcagcattgcattatattcattattaagaaaaatgaaaaaaataataatgtattggtccattgttgctacagtatggttctgattcgaacggaaaattgcttcatgtttttcagtagatcaaatgatattagcctttcctaatagaaaaatattttggtatttgcatatgtattatctagattagaagagattcattcatatggttatgttttacatttggtaagacataatccctcacatgactaaacatttgtttaaaattgatgttgctcgtatgtttcatacttcatatctgcttatgcactcgatgagtttatgtattatgagttgaatagctttattttcacgcaatctaacttcacattataaatttcataaagtccaattccttataatggtgaatgcattctcgcaggatggcttcaggagtgattctgaaaggattatgagggatatacaaagaagcgctggtggctgtcaggtaacatttttctggtcacttttaacttcctttgcttgagtaggtccgtcacatgaaacagcttgaatgctccttatagaaggcgatctggatacagtttgaaatcagatatgaggttaatatgtccattctgtgttaagaggatgttttaggagaagcattttcctatagtctgcaagtatacatgtaaatatgcaattgcttattcaagaactccaaccaatgcttatgatgtaattggagaactcctttgcttgcttgcaagtagtggaaagagggtctaattttaaattttttggccattgatgatttttttttttgaccaagggcagccattgatgattttatctggtttgttcagcaattttgcaagatcattcagatgatcccaaatataccttttgagttttaaactagtcttttccatgtcatgtgatcatgtgtggagttgattgtccaatgtgtggagttgttatttattatttgaactgatggctgtcaggtgcttctcttttctgcgacattcaatgagagagttaaagattttgttacaagggtcattaaggatgggaatcaaatatttgtgaagaaggaagagcttactttggaaaaagtcaagcaatataaagttcaagtccctgatgaaagggcaaaaatagcagtcataaaggacaagatttttgagtttggacaaaaagttggacaggttatcatttttgttagaacaaagcaaagtactaaggatgtccacaatgctttgacattagaggactatgtatgctcctcgattcaaggatcccttgaccaatcagagagggaaaagataatacaggaattcaaaaatgggtacaccaaggttcttatatcaactgatgttcttgctcgaggtttcgaccaagcacaggtactatttgtgtttgttgactttatacttgagcaagtgtaaatcttttctaacattcttcctttgaaaggttaacctcgtcatcaattatgacatgccaatcaagtttggcacaagagatgaacctgattatgaagtgtacctgcacagaattggcagagctggtcgctttggccgaaaaggtgaaattatttctttggttctcttttgtccaaaaaggaaaaaaaaatgtcgtggttataattcaatgtttagtaagtcttcgattaataaataatgagaaatagtcaatatcagaggtggcctttataaggtatgttgaattgctgatcaacaatttcggctgatggatccaagttctaagaggtcttagctgagcaaacctgtcttgtggtgctgacaaatcttgcctatgtctagtcgaatacttaacataatgtatgtgtcttagactgtaagttgagcctgagcttttcagctgttttctgtggataagatagaatgtaagtggcttggtcaattataccaggtcatctttctatgatgggcaatgatgtgtcttctggtgcttataatcaaatttttctggacttatttcatggtttatgtgtttaacattgatagggcttgtagaccaagtgatgctaggccaaccaaacacctattcaaattcagcccttctatattttagtacatattctgtagcttatattcttaactttgtcattgctggtgcaggagctgttttcaacttgctatgcggcgaaacagataacactgtgatgagaaagattgagacctacttccagcacaatgttcctgaggtgtgtaactgcaagatgcatatgccagtatcttgtgctcctaagcattagcttattgtgttctgttcatttgtaggttcgtaattggcaaagcgaggaagattttgaaagagctctgaaggatgccggcttggttgagtaacaccattggaaatatggcatcagatgcgctcttcacttgtgacgaacaggcgcgtgatatttaccagctgaaacagcttctaaagcaaagcaatcgagcttcttgagctcatccttggttattatgtcgagagctgtgaattctgttaaagggactcatccaaacaattttgatgctatgagcttatatgaagcaaaggtgttccttcgctatttcgtgggaacttgttgccaggactagatctacacttgcattatactctgttacttcgtgtacttaactgggaacctgttttggtttttatggctttgtcgtcgagatgcggtcaccggtgtacgttacgcccttgtgaaaaaactggaaacctctttctgggtcagtgtacttgtacacttgcgccattgtttagttgcatgtacgatgtttctttctgcgtcagctgtaagtgtacacttgatttattgtttagttccatgtaccatgttctttttcctgttctctgtacacttggccacgctgatacatgagatgcaccactatctcttcctgcatgctatcgctttcagcgtgtttcttgtttcaaagaacaattcgtgtataaattggtcgcctttttcactgtcgtaataatgaaaaaaaaatagagaagaagttacaggttgtcgtgctcgatgacctgcgccgccctccactcctcgccggggttgacgaccaccggcaccagcatggacgccgtcccggtgcacaggaagtagtccttgccgaacttcctgtacatctcccccgggctgcacaggtacatgtcctcgtaccccatcctcaccaccctgaaccccagcccgctattctgcaaacgcatcaacaaattcaaagatcaaattcagttcaatttcaaccaagcctttgatgatctttttttcaattctcagaagaaacaaagttcttgacgatccatgaagatttcttggtgctatgatttttcttcaaaaaggaaaaaggctttgtctttttatgatactctccatttcaaaaattaacaactaatgcctccttcaaatgtttgacgtttgaaccaaccaacatcgaacaaaaaaagaatagagggaatatgttatgtcaaatacggattgagatcctctgactttacgtcagaggaacgtggtgactggtatgtggaccccaccgctctcgggcctacctactagtgaccacatcagggataactttacgtcagaagatccctcaacatcaaatacaatactagtctgttatattttgggaaagaagaattatacgaacatatgaacatttcttggtggtgattttggttgtttacctgatcaatggtggtgaatttggagggcgccgtgctgtagatgcgcttcttcctctcctccggcggggccgcgtacaccctgctcaccttcttcttgaggatggtgtagaggttgtcctccacggtccacaccccctgccggggctcctcgccgccgccgccgccgaaccatccgccgtcctcccgcttcatggcctccgccggggtgaggagcgcgaagccggcggccggcggcgggtgggagcagtaggggcatccccggagcccctccaccgccgtgccccgccgcttgtcgaacttgatgtggctcagcatcgcgctcgtcagcgacaccggcttcttgccgttgttcttcaccatcaccgccgtcgccatgctcagcgggtacagcgtcaccacgtacgtcacctccagcgtcccgctccccttggtgcaccccagctcaacctgcaaatcttagacaaattttaccccagatttgaagtggatttgtttgcctcggaacgcaaacaagattcttcaggtttgcaaacatttgcaatgccaacatgtaacatattaaggtacatagatttttttttttacctacatgtaatcgcaccatgtttggcacagctttggattaagatttcttagagctggatatttctagctccacaaatccattaaccaatatatgtttatgttgatataatattattttttttgactgaaaaaggtagagagactctaccttataaccattgtattaatggtagtcaaggtgatatataaagaggtacaaaagaaccggataaagagggaggaagaagagaaaataagaaggagaaaagaagaagaagaagaagaagaagaagaagaagaaatacagaaaacaggagaaagcatggaagaactagaaaagctagctacgctagtaagtctatccatctgcatattggaggtcgacattgtggcttaatgtgattttcccataattgtagacattctctgatttgatgtgtcacatttgccgtggtaagatctcgctgctggaatgttctatggttgcgtgctttccataagttgtgtgtgcaggcgccaaagcatattggccatccagatttgagatgtgagggcgtaattgtcaggacctgatcaacgaagtggagaacgtctgtgctttgagttgcctgttcatagatgttgagtttcttccaaaccttagaagctagtcggcagcgcaatatgatatggtctgctgtctcaatggtagggcagacagcacaatgtggatcagatgcccagcatttctgtaccctattgtcatttgtgttcagtcttcctcgaaaggccagccaaagaaaaattttacatgtgttcggtattgctttgatccatatgaaaggagctgggcgccatagaatgccatgatatgttataagcctgtagtatgctgctgttgttaatccaaccgggcttagtgtacagcttcttacgtcttgttcagtatgctgtagttgctgagaagctagaatcgtcatgagcgaatccagctcagtttgggcttggcgagagagcacagggtgaagatccagtacccaattatcattaaccagctgagaggaggcggtgcagttgatgtcgcgggcaaacgaggccagggttggaaaggtgaagcaatgatgaattatattgtttatattttagataaaatataaaattttaactactataaagtttaacttacaaacttgagttatgtcaaacaggacctaagctaaattggttttgcatgtacattcattcttgcgtgttcttgttttgaattttgtaaatttcccaaaattcgttcacaaagaaattcgcatttgcaaacatttgggaatcgcgatgtgaaccagcaacataggaaattgaatattcaagactcgaatgcagtcgtttccttctcattcctcaaatatcaatcgaatatgatcttgcacgttcatgttttgaatttttttttattgtagagtccgtaaaattcgttcaaaaatcattatgaaacgattttagaatgggaagtgtacctgcactgcatcgtaggagtcggagtcggcgtccacgacggaccactcggagccgacgaggagcgactcggcggcgccggaggaggacacctcgctgagcgcgagcccgacgccgcccttgacctcgccgccggcgccggcgccggcgacggtgtggagcacctccctgcacccgtcgtccttccagtacaccttgggccggtacgaggtgaccagcccgtcggcgagccggagctgcagcgagctgccgttccgcacgctgagctcggcggtgggcgcgccggtggccgggtcggcggcgaaccggaggcccttccgtccgaacgactcctccagcgactgcggcgtcggggccgccgccgccgtcgcggcggcggaggccttgacggcggacggcctcgtggggaggtggagggggagcagcgaggaggtggccatgggtgggttggagtggagtggagaggcgggggcttgggctttcactgcagcctcatatccgcgaggcttcaggatagatagttttttttctcattgtctgcttgtttgcgttgctcccgcgcgttttttggcgctttttttgcacaggagatattggaggggtggtgcgcacgcgtacctgcagtctgcagtgctgcggggaagtatccaactatgcaactcctataaatggacgtccgagattcattcacgtcaccatgagttaaaaaatttaactcccagtaaattttaactcatgagtgaatctgcgagttaaattttaactctcggacgtccatttctcgatccaacggtgtaagatgagagttgcatagttgcactgaattagatgactacacctgatacttccccgcagtactgcagggtttagccagcgatttcattttcataaaacaaagtttactatctcgattagtctaattgtaaatgtaaatacgagcattcgtattaaatctagaacttgattacttgaatgtgtttaggtgaactagtgaatgagttcaagtaaactagttacaccgtaatgaatctaaccaattgaactacggatcacttcgtgattgaccaacaaatttcaattgtttttgtggtcgatttacaactagacattcgagctggacatgctcgaaactcgccgagattgtgaacacactgcagcgacgaagtaggctggtggtcatgaacggtaagaattcacaagtactatttgctgggtggttcaaaataaaaaagcttagaaaatgatggtgaatcatatcgggaagattagacttaaaataatatgttagtaacattttagcacaaaggtcaggatggccgagtggtctaaggcgccagactcaagttctggtcctctaacgagggcgtgggttcaaatcccacttctgacaatattttcgatcatttttttgaaacttttgctttaactttattatagcctggacactaatctttttcaaacagcacgatatatcgtgtctttcacaaacaaaaatagtttctcagttttttttttaaacttttgctttaactttactatagcctgaacacttatcttttccgaagagcacgatgtatcgtgtttttcacaaagaaaaacagttttaatttgttatagcctggccaccaatcttccccgaacagcatgatgtacagtatcaagttttcagtaagacagcttgcgaatgttaaagcatccgaaacctgtgcgtcctgcagccagttaaatgcaacgctatggacgacgtgtttgtttacttgcacagcatggttagcgcgcgtcggtgcacaagcaaagtctggttcgcacgcgcgagcgcataggcgaatggtgtttggttgccaacacgactactacattcatcccataaaaaaataaaataatatcagatgtgacacattccagtattacaactctgtacatatctatattcagattcgtttgtactaaaaaaaatgtcacattcagttctagattcatttttttaggaggagggtatatctcactacgttggatctagtcatttgtgacggatccaaatcctcatctttaacaggtatactcttcgttattgataagtggtcagtgatgactaaacttattaggatctcacttgtgacagacctaaatcttcatctgaaataggcatacttctcgtcattgatgattcaaccttaacaggaccttacttgtgaccggcctaaatcttcgtctgtaacatactaacatgtatacttttcatcactgataagtaaagcaaacgcaaaacagccgtccgagttaggtaagagggaaacgcgagaaactactctatgtaccaaaatataagaacctattcgatgtttcttatatcttggcaaacatcttatatttaggcatggagagagtagctgtagctccgatcctcgaccagactgacaccatgcaacacttgagcgggaggcgagaccggcacgcactgcaaccatgcaacatctcagaaaaacggtctcacgaatcacgatccctctcaccttccaaccctgaccgcacttgagcagcatatcgtctactcctagttggcccatgggcaccacatgccgatgaaaccacagttcctttctcatcgtaccaagtagcaacaatcacagtggtcaccgtattatactagtactcctttttcagcaacaggtagtagtagtagtactgcagtctgtacctacacttgatcggttcatcaagcagaagcgatagcagcactgcactgcagtctgcagttaaagtgcttggtagtaccatccatccgcttagctatagttaacaaataaagggccctgaaatgataatactactagcactactcatcaagcaaccaaatggaatgatgcaagcaatgccccagctttagaacagccgcgaaaagcagtgagtcagcttcgcaatagctgcttagtggagcacttagaggcgagaccctgcatcatcagatgtatataaagcaagattcttttaagtaaaataaatagcaccaatctaacccacttccagaaccactcaacaacgggattatagtactccaccccccactgaataagcgcgaaacgcaacgcaccaaagccagacatggtctttgcaacttgttgtctttgccgctaggtttttttctggcattttcgacgatactataaacggagtcttagagcgagctaaaaaaaagcaaaccgaaaacgggaatacggcaaaagaaaactaggcaaaactaactagccaactgctccccagtagcagccaagcagcaggatcttgggcccgtgctgccagtttcacagataagagttttccagaccatcagttccttgggaccacatgcctgttgagttcttcaggaccgtcttgttcttcatggctagctagggaacatggggtatgtgatccagttaactagctttgacggtgccgttggcaagggcaggcttctcagtcgctgctgtttgggcgaccttcgctgcataggtaacgactggagctgtgccgttctctgcaggaaccttcagttctccattgacgccatttggtagctttggcttcgcagtagcagcatcctgctgcttctctccagtgacagaacttggagccctactgtcccagacctaaaatgatagaaccgaccattagagttaccaaagaggcataagagaaaccaaggtgcacagattgacaaaagacaaggctcaggcttatatatacctgcttttggatctgctgttgtttcaccctcttttcctgcatcaacttctgacggttctcatagaaagcaaagtcatccaagatggaggtcttactgacatgctccttgaatatcttaagcatttgaatgccttggtcaaggtttacctgaaatttaaacaagcaggtcaaataagataaccgcatggtgtggctttttggaagtcaagaactaatttggacaaatataaggtacctcttgtgtgtcacggctatttgtcactggcttgttctcattgttctctaggatgatgtgcttgagaatattgttgggcacatctttgacaatgtgccacttgagagataaggaaccattccacttatcttgttgccagtactccaaggtcttctcaaaatcaacagcgccagtcatttcagcaacaccaacaaactgcccactagtattaaccttaagttcacagcaacaaagacaaaattaggaaaaagaaaccatgattaacattcacaaatgaatacaagacacaaataacttaccgagaaaaacaagaatattgggcatttggagctcttagcctgagcttcctgataagcagcatcaagcttcttgtttccattagtggtacttgcccacacattgtactttatgctcttatggatatcatcctcactgtatgatttaatgacaaagaactttgcatcatcatattggacagggaagtcatctcggttgaactgtgttctatcaggtacatcagtagcattcatgctgtcacttgtaggaaggctctgccctttcacagcaatagtgacagtatggccaaacaatttctggttcttgaaacggcctgatctaggacctctgttcaactcaattgttccatcctgactctcattgccaaaaccatagtacccgttaccacggcctcttggcttgtacctgttatccatactaagaccccaccgaccatatagcctggaatcataaccattactaccatagccattacttccataaccatttgtgctgtacgaaagaccagttttgtatgagtttccatactggctgtaagaccgggtgctcgggtacatcctattcggatatgtaggagcagctgatcctgttgtagttgtaggtcttctgttattcatgccctgcattacagagaagccaaataattcagttcacaatcaaagccgtagcggatcaggacagtgcattcatacggagaaaaaaagaacatgttttcgtaagactcaccatctgctgaggtgtggagcccttgttttgagtccttgcagaagagccattactgaatgttgaagacgacatgtgattggttgtagttgttctctgctgtccatttgtataagcagaaccatcataccatgcaaagtgtgctcctgtgctgtcatacccatatgtagagtccaggtaaccagcagaaggaactccacctagcaagggtgccctataagttccatcaggggtcagtgatgaattttgctggcttgatccaaggggtacagttccactgttactgtgaacagtaccattaggagcaccatttgtggttgttttagctggatctgccttagctgttggcttgtcaggattggcagaaggctgcaggtcgccttgagtggtagaaggaactggtgtaggaggctgataatacgaagttggatactgatagtgctggccaaacatttggccatcaaccgttggaactggggaactagcaggggagtatgcaccataaggagcatacccatatccataaatatctccatatactgcctgtgaaattccaaaggccaatcagaatagttgatagcacagcacgcaagattctcatgacaggatatttagtggcagacaaataacagtgaacacaaaagattcacagagaagcaatagtgcacagagcataagcaataagaagaagaaccacagataaccaaaccatagccaaataagtgagtgcatagcattccacttattacatccaacaagatttgacaggacagctcccaacagacaataatagcaaatatttggaccatttctacattaagtatatgacacatggtgcaatttatggtcagcaatatcacatggaaaggaaaaggtaatattatctaagattaacttactggggtaatctccactccatctggatttacatatctaggataatcatcccactcgctcacagatccgtcgtaacctggtaattttgcaaaccagcacaattctgtaagcataggagaaaccatgaaagaagctaatgtcctataaatagccacagggcttatcacagcgctaacaaataggaatgaacaagaaaaaaaaagacatgtcagccattcaaaatagctgtactcaatgatcaccataagaatttttccatggttcctcacctccatagtagtatgctggcaggtagaacatgttgggatccataaaatcctgaagcactggcgtgatggaccgctcaggaggaatcgccacgctaagaggctggctggctgcaggcccctgctggattaacagtcaaaaatcaccagaaccacacgtattagaatcacatatcaccgacagaaaaccaagagcatacacgcaaacatcaaggatccatcatttccactgttttatccaataccttcttagcgccggcgggctcggtggccgcatccaccgccttgggctgcgaatccaaagacaacttctgcagcagatccgtggtttcttccaacagcaaaacaatgaattaaggagaaaacagattcattcagatcccaaaatccaatccttcgaactaagccctactaaacatcatgataattatttgtgtatgaataaataaataaacaattattcgatttcacaatcaacagaaggctaaaaacagtaaacacagcccgatctggagaagtcaaccctagcacgaccacgctgagacccccgggcggtagacggccgccgtacagcctcaaagcaacacccagcccaaccaaccctcaagccaaaaccaaatccccaaacccaaaccccaaaaacctagaaataaaataatcaaaagtcacaacccaaaggatacgatccgcgacgggggcagcggtggcggcggcggcaggagccggggcaggaggagcagcagcagcagcgggcgccggcgcgacgaccgggacctgaggcggcgcgacggcggccatggctttggctcacgagatagatcccaagcagagaacacccggaggcggcggcggcggctgtagatccggcgagacgagcgagcgagcgagcgcgcgcgcacccggccccttctcctcccttcctagagatagctaggcgcggcggcgcgggtagagaggaggatgaggcggcggcggcggcggtggcggcgggatgggtggagaggcggagccggagcagcgaggcggctagcaaaccggcagtacggtgtgaaaggggaaaagaggagggttttgggtgagggtcgggggctcatataggataggggaggggggagaaatggagcggaccactggaccacgtctcactggacgccacccgcattggattccactcctctccagtttccccctgattttttttctccctttttagtgataccgattaaaaacttttttttcttgggttttttttcttttttttttaacgtggatggagaatgggtggttagttatttggcttatggcctaatggcttgtcatatgcattctgttcacttcgtaggtttgcatttgctcttaaaaaagaataagactacgaagcaagtaagcgtatctcaactggttagctagatttcttgtggtggaaatagctcgctcagattcaaatgttcgtgataacttcgtcaaattcaagttatgtcggttcagttttcgggagatgctaattagtcttttagtggtgacttcttgaatctcaagatatgctacgtgtatgcgtttagaatagtgagtgtgtgtacgttgtgagtgtctgtgttttgtactgtgtttcataaaaagttttgtatttgcttactggctaagtaaaatggtttgacatgttataatcacgttaattgcatggcttaatgcccttgataaattttgaaatgtttaagttgttttaaaattattctatatatttttatcattttttcaatcttggtttatcacttaaagtagaaacataaaaccctgactcaaattattttatattatcttatttatgtctctacggtttatcaactgaagccaaccagcttgaatatatgatttttttatccaataaactcatagtgcatactgcacaaggagatggcgatttacttgtcatcaattttttagatagggaagaaatcaatacatggatgttttagagaggggaaaagtcaatacatgcctatgtagtaaactgctaagcaccgtgcctaacaacaaccgcgtgagtccaatgactccaccccaccaccgattgcttgtctccatttgcacccgctccagaaacccctacccctttccaagcccctatacaacacacacaaaaagaaaaaggaaagaaaaacaaaacaaaacaaaaaaaattataaaaaaaaacgcgttcagcttggaggaggaaccacggcgcactggacgcgtccagtgatcccacgcggccacgctatgcacgcgacgcccacatccaccacactaccacagccacagccgcagccttcctttctttttcttctcttttttttctttccttcgcggcggccacagccagcagcgaacagctttttttttcctttttccttttttttcttctcccctcgcatataaaacaaaccaggataagatctcgcacgtgccgtgcctgctcctccctcctcctgtgcagccatcaaacgcggggtcgtacgaactgagatgcgaaaaaacgcgaggaaatcacgccaaaaaccgtagcaaatcccgtccccgaaatggatccgtgtgccgtgagattctcccacacaaattccatacttcccctccacggccgcacccccaagtccgtgagatctataccctgaaatcccactgtttcttcgcaaagatcgcgtaattttgttgttgttgttgttgtagatgccgcgtgtgtatcgtcctgatctgggcgtgctacggccgtgcaaccctatactggcttgtggcctcgtcgccggggaagtagggcggtggacgtcgtcgtcgtcgtcggagaggacgacgtggaggaagccggaggtggggtggatgaagctcaacttcgacgggtcgcgcaacgacgcgaccggggcggcgagcatcggcggcgcgttccgcgaccacgagggcgcgttcgtggccggctacgcggagcggatgatcgtcggcggcgcgtcgagcttcaccgcggagctcgccgcgctgcggcgagggctcgagctggcggcgaggtacgggtggcggcgcgtctgggcggagggggactcgagggcggtggtcgacgtggtgcacgggcgcgccggggtgcggtcggaggaggaccggaggcagtgcggggagatcgccgcgctgctcccggcgctcgacggcgtcgccgtgtcgcacctgtgccgcgacgagaacaaggtggcgcacgggttcgccaagctcggccacaaggcgcggcgccgccgggtgtggcacgtcgtgccacccaacgaggtactcgtgttcctgcaacgtgatgctgatagagggtaaaagtacaaggaccgaacaacacaacgttagtcgttgatcgatgtgatctttctctgtaaaaaagaaagttaactgagaattaaacaccatctaaccgaatctgaacacgaggttatcggtaacattagtcattaatcgatatgatctctatctattgattgataatgatctctctctgaaaaaaaaaattaacctaaatgagattttaacataatataaaataacaaatctgaaacatgaggttgtcctaggtggtaatgttagttgttgatcgatgtgacctctctaacattgctactctattaaaaaaagcctatctaaatgaaaatttaacaccacctaggacaataaatatgaacatgagatttcttagagtggtatcaaattctcatttagattggtttattgtgatatggaagaattacttcagctttgggggatttataatgagatacaattccttgtcattacttcgctctgataaaatcacttttatataaatgcggtagctcatattttgttgatttgcgctggacagcttaaaataatgaatgacgaagaatttgtaggcacagtacagtagtgcgtgcgtagtcggattcagtgtcatcttgcccttttttttcttgggtaatgggatattatctgacgtaacgatggattatgcagcataatttcgttttctaattacgcacggctgaggcctggatgcacacgtgtcacacctagcgaggaggagtctgcgtcagatgtcatcctggacaaggaccttatgatagatttatggatcatgtgcatgattggtttaactgtttccatcgtaccctacgtataagattcttgaaattgcccaatttgtgtacccctacagattttttcatagggtcaaccagagttgttggtcaagtactactggagtagtagccggcaacggcagtgaaaatgacgtgccaagaatgaggccaggatgggacatgcagctcactcactaatgcaagggcattcagagtgcatctagctaggagtcaaaacgaatcgggttcgatctgatctcactattttataatcggaattgggtcgaacacggatagcgccgaatacggatacaaactcgaatagtatcgggtaaaaatacggaacgaatacgtaccaaagtagatacgtatattatcggttacgaatatttatttggatatcaagtcgaaataacaatcttatatatcatataaacaataaccatttaataattacatatatccataatacgattatattagaccattaggaccttaggtaataaatatggtacaatatatcatagtaaaatcaatacatagtaccagaaagtacctcacaaaaacataatacggataatatccgtataattatccaggtaacacccagattttttaacggataattcatttccgtcgggtactacgttcccgaacatctcatatccgtaaaaaaaagacccgtatttgaacccgatatatgtgaaaagtcccgggtacccgaatttgtctcgaaataatatgtccgagcgggcggacgagaaatacccgctctgttttcacccctacatatagttgtcattcagtccaagccttccacatcatggatatcacgccatgcctgcttcaaggtgccaaatgaagaatgcggaaccaaataaagacccgcacagagcagggcaatctttgcgcgttgttgctgccgtcgaagcttcacacgtggcagatgaggagaagggaggaagaggagatggcggcgatcgagctgttgccaccgagacgttgtctatgagcttccgctgcctgaggtcgatccaaagctggccaaccgcctccctcggtccgtaacggccaaggttgacccagagcagacgagcccgatcagctccgtcgaggttgatccagagccgccttcctcgatccgcgccaccgatgccatttcaccgatgagagctcaacagcggccggagggatgggggaggggaggggaccaagggaggtgaggatgtcgctggcttcgttaggctcaccgctgtagaatcaaggaggccgactagagggggggtgaataggcggttttaaaacttaatggcacttaaacaaaactaacctaagttgctaggcaaggtaaggtgcaaggttaactaagcaactaagttaagttttgcaaacctaggtgtcggtgacatgggaccgggggtatcttgactagaggtttggggcagccgcggtcacccacgtggcctgaccccctcgggggggtcgggcccgagggtgatgtggccgcccctccctttgtctccccgaggggtcgggccgctcccgtttcggctccgagggctagggcgccccgaccccctgtgggtttggcgccacgtgtgtgggttaggtgagcacagcggcgctcacctaaccgcgtttattgcgggttggacgagcgtcccacaccgcatttaatgcagcgcagcacactcgttcggtccgtgacaggtcacagtgtgtgaccggtcacagaccggtcagatcgcgggttaggtggcaacaggcggccttttgcacgcctcgccccgtcccgtcggaatgatgagagcctctaggcactcgtccctagacggagccggcgtgctaactcctggagttagcacgtcagtcccggctagattcataccaggcttcatcgcaaccattacaaggaagtcattttatgaagaagggctgacgcgtggcatgctaaactgacgcgtggtagacaagaatgaccggtttgtgactggtctgacgccggtcacgtcatcggcagacaaccgtgctcccacgttgcgcctgcttccggcggagtggaggtaggtatggcccatcccatcggagggtcattcggacagcagccatggcaaatctccgcccattaatgagggagtagcagggaaatccccggtgtcaggcgagtgatgacgctaggcctcactcaaagacaagctgtgatttagcttccaggcgaaggcgcaagccagttttttttgggagatagggtgagtccccacccaaaagaagagtaggtagaagtggtgtatgtgggatccccttgagatataaaaggaggaccttgcccacttaagaaaaaagggaaaaaaaggaggaaggagggaggagggagctggtaaaaggaagagcggagctcgtagaggagaggaggagtgagagggtctctagagtttgaactctcttgctctccagctctttgtaactccttcatacacagatccaccagaacacaggagtagggtattacgcttctcagcggcccgaacctgtctacatcgcccgtgtcttgcgcatttgctctctcgcgaaacattccacagatcgagggcttagaacctcacctagcgcccccggccgaaccggcaaaggggggcccgcgcggtctcccggtgaggagccccacgctccgtcatctggcgcgccaggtagggggcgcgtgtgtttttctaagctctcgtcctctttcgtgtgcgccaagcttctcccgctcagcccaatggccgaacgggcagtggcgcacaacctctctccgagcgctagcggtgacgacggggagcagaacccacgccgtcgagctcgtactccaccgcccccctctcgccgaagtcttaggcgggaggaggcgctcgagggggtcgaaagatccgcgacttcgccgcccacgagcgatgaagaaggacggcgagacggggagcgtcgcctcctcgtctacggcgatggcagcacgccccagggcgcgctccaagctgcgggcgcgctcttgcgtcacccgcccgtcgtccccgatccagagactccagcccgatgttggctggatgacgtggccgacttggtcatgacggcgcagcagcgcctaggcgccggtgggcggtcctccgccaccaaggcctctggcgctgctaccgccggctccgtgtcgtcgaggcggagggcgcggcgagcggcggccgttacctgccgttcgtcagccattccctcgtcaacgcctccgacccaagaagatgtgcgtagggggtcggatgcccgcctcagtatcgagcgccggcgcaatggtcgtcgtgctgcccacgcaacggaaggcgtttcctcgtccggagcgccacttcggttcgggcgcgggggccagccccccgtgcccccggttggtggtgtcggctgtcgagcctttgtggcgagtcttcggaacgtccgttggcccccaaggttccggcccaccatcaccgaaaaatatgacggaagcgtcaaccccgccgagtttctccaggtctacacgaccgggatcgaggccgccgggggtgacgacagggtcatggcgaacttcttccccatggccctgaagggacaggcgcggggttggctaatgaacttgccgcccgcgtcggtccactcttgggaggatttgtgctagcagttcaccatgaacttccaaggcacatatccgcgcccaggtgaagaagcggacttgcatgcggtacagcgaagggacgatgagtctcttcgctcgtacattcagcggttctgtcaagtccgcaacaccataccatgcatccccgcacacgcggtaatctacgcgttcaggggggcgtgcggcacaaccgcatgctcgaaaagatcgcctccaaggagccccagaccactgcggagctttttcagctcgcggaccgtgtggctcgcaaggaggaggcctggacctggaactccaccggttccggtgtggcagcttcggccgcccccggatccgccgctcggtcagggcggcgggacaggaggaggaagaagaggtcggcccattccgacgacgagggacacgtcctcgccatcgagggcgcttcgcgggccacccaaaagaggaggcctgcgagcgacaaaaaaaaggaggccggcggtcccagcagggagcgcccgaccggcaagtggtgcaccgtgcacaacacctccctccacgacctcgcggactgccacgcggtcaaaagtttggctgagcggacaaggaagtgggaggaggagaggaggcaggagcgccgtgagggcaaggccccggcggctccctccggcaaccggcgaagtgaggccaagcagaaggcccccgccgaggacatcgacgatggcgacgatgacctagagttccaggagcctggggccaccatcgccaccgtcgatgggggagcatgcgctcacgcttctcgtcggagcctcaaggccatgaagcgagagcttctggccgcggcccctacccatgaggcgacgcggcgggcgcggtggtcggaggttgccctcaccttcgaccagaccgaccacccgccgtgcgttgcccggggaggacagatcgcgatggtggtttcccccaccgtttgcaatgtgaagttggggcgtgtcctcatagacggggctgcagccctcaacatcctttcccccgcagcctttgacgccatcaaggccccggggatggtgcttcggccgtcccagccgattataggtgtgacgccggggcacacttggccgctaggtcatatcgacctcccggtcaccttcggtggatccgccaacttccgcacggagcgggtgaacttcgatgtggcagacctcagtctgccctacaacgcggtcctggggaggcccgcgttggtgaagttcatggcggcggtccactacgcctacctccagatgaagatgccgggcccctgtggccccatctctgtccatggcgacctcaaagtcgcgcttgcttgtatggagcagcgcgcggaccacctcgccgccgcgtccaagcccgagggtggcaacgagaggctcagcacctccgtcccagccgccccgaggcagcggatgatcatgtgcgacgaggtcccggtcaaggaggttgccctgggcgacggctcgtccaagaccacacgaatcggtggtcttctggacggcaaataggaagacgcgctcgtctccttcctgcgggcaaacgccgacgtcttcgcctggagaccggcggacatgcccggggtccccagggaggtgattgagcaccgtctcgccgtgcggccgggcgcaaggccggtccggcagaaagtgcgacggcaggccccggaacgtcaagccttcatccgcgaggaggtggcgcgacttctggaggccggattcatccgtgaggtcatccatccggagtggctggcgaacccggtcgtcgttcccaaggcgaacggcaagcttcggatgtgcatcgactacaccgaccttaacaaggcatgtcctaaggacccttaccccctgccacgcatagatcagattgtcgactccaccgcggggtgcgaccttttgtgttttctagatgcatattctggttatcatcagattcgcatggctagggaggatgaggaaaaaactgcattcattacccccataggaacttattgttatacgacaatgcctttcgggttaaagaatgcaggtcctacttttcagcgtactactcgaatttctttgggtagccaaataggacgtaatgttgaggcctatgttgatgacttggttgttaagacgcgcaaccaagagaccttactctcggatctagcggaaactttcgaaagtctccgctccgcccgcataaagctgaaccccgataagtgcgtgttcggcgtgcctgcgggcaagcttctcgggttcttggtctctgcccgaggcatcgaggccaaccccgagaagatacgagctatagagcggatgcgcccccccagcaagcttagggatgtgcaatgcgtcaccggctgcatggccgccctaagtcggttcatatcgaggctgggagagaaggcgctacccctatttaagctcctcaaatgctccgggccgtttatctggacggaggaggctgagcgggccttcactcagttgaaggcgtacctcagttctcccccagtcctggtcgccccggagccagatgagccgttgctactctacctggcggcaaccccgcaagtggtcagcgcggcgttggttgtggagcgcgacgaggacaaccctcaccccgcgcatccccaccctgtgtcgactcgacccgggagagagcagggaggagaggcccccgagccgaacggcggccaaaggcccccgacggccggagctggccctccgcctgcttgtccgacggcgctaggcgcccccgacccccaggatggccccggggccactgcgggaaggccgctcctgtcgccctccgaccccgaggtcgtcggcacagaagccgagtgcgccccgtgcggcctctcggacgaagagcgccctggagatgcggcccctagcgaagaggatcggccccgccgaaaggtgtagcggcccgtctacttcgttagcgaggccctccgggacgctaagaccagataccctcaggcccagaagatgctttacactattctgatggcttcgaggaagttgcgccattattttcaggcgcatcgggtcacggtggttacgtcttaccccctcggccaaatcttgcataaccgagagggtactggacgggtggtgaaatgggcaatcgaactctctgagttcgatttgcactttgaaccacgccacgcgatcaagagccaggccctcgccgactttgtggcagagtggaccccggcccctgagcccgtctccgcccccgaggccagctcgggcccctcgcagctgcctcacaccgtcaactgggtgatgcagttcgacggctccttgtctcttcaaggcgccggtgcgggggtcacgttgacctcgccgagcggagacgtcctcagatacctggtccgcctcgattttcgggcgaccaacaacatggcggagtacgagggactccttgcgggactcagggtggcagctggactggggatccgccgcctcctggtgttaggcgactcccagctggtcgttaaccaggtctataaggagtaccggtgctctgacccgcagatggacgcttacgtgcgccaagtgcggcatatggagcgccattttgacgggatagagcttcggcacgtgcccaggcgggataacgcggtcgccgacgagctctcaaggatcgcttcctcgcgagcccagaccccaccgggcgcctttgaagaaaggcttgcccagccgtcggcgcgacccgacccgctaggggagacggacacgcctgaacggcccccgaggcccgtcggagtccaggcctcgggacccgaggggagcgttcccggctcccctagattgattgcttggatcactgagatccaggcgtacctcgcagataagactctacccgaggaccgcgaagggagtgaacgcgtccggcgcatctccaagcgctacgtgctggtggaagggaccctctatcggcgcgcggctaacggagtcctcctgaaatgcattcctcgggaacaaggcgtcgagcttcttgccgatatccatgaaggcgagtgcggagcccactccgcctcacgcaccttggttggcaaggcctttcgccagggtttctattggccgacggctctcaacgatgcggttgacctggtccggcggtgcagggcgtgccagttccacgccaagcaaatccatcagccggcccaggccctgcagaccatacctctttcatggccgtttgctgtctgggggctcgatatcctgggtccgtttaggcgagccccgggcgggttcgagtatctgtatgtcgctgttgacaagttcactaagtggcccgaggcttacccggtcatcaagatcgataagcactccgcgcttaaattcatcaggggcattactgctcggtttggggtgcctaatcgtatcattacggataaaggcacccagttcactagtgaactcttcggtgactactgcgaagatatgggcatcaagctctgcttcgcctctcccgcccaccccagaagcaatggccaagtggagcgcgctaacacagaaatcctcaagggcctcaaaaccaaaaccttcaacatcctcaagaagcacggcgactcgtggatcgaggagttgccagcggtgctctgggcgaaccgaaccacgccaagccgagcaaccggggaaacgcctttcttcctcgtctacggcgcgtaggcggttctcccatccgagctcaccctgaggtcccctcgggccaccatgtactgcgaggctgatcaagatcagcttcgcagagatgacctcgactacttggaagagcgaaggcggcgcgcggccctccgagccgcgcgctaccatcagcgccacgtccgggcccgatcactctgcgtcgacgacctcgtcctacgccgcatccaaacgcgtgctgaacttagcaagctctcaccaatgtgggagggtccgtatcgagtgatcggtgtcccccggccgggctccgttcggctggccacgggcgacggcgcagagctgcctaacccgtggaacatcgaacaccttcatcgcttctacccctagtgggggtcgggtgtcaggtctcgggctcgggccaaccccgcgccccccaggcgtgcagggttggccgggggctaccacatgcataagcttatattttttctcttccgtatttcaataaaggcattttcgatttcctaaggactgtgtctgagccatcgtttccttttgaagaatcttggcttgaattagcatgctcgtgcccgaccccgccctcggtggcccgggccggctaaaatcgccaaacggggcccagaaccgagccgtgccccggggcgttgtgaactccgggggggaatcggcaaaggcccacaatcgggtcatccataaccctcggtcaccacgttcccggccaggccagtctcgacacgcggatctccccaggcactagccccgacccgcgccgcttgaggttgggacctgggcacgagccctcgttcaagccaagacacagaaggaccgcgacacaaaccatcctcgtctcatacacacaacaaacagagttgacacaaaaatttcctctttatttgattgcagattgaattagtttatacaagaagggggcccgaaggcctcagaagaagaaagaaaaagctatttaagattggcgggggcctgggggctcacgccgacgcgcccgggtcgccggcctcgtcgtcgctgtcgtccgcaccaccgtcaccgccctcctcgtcagagtcgagggcaaacgcgagccgaggggctgtaccctcgaagctgtggacgatgtggtcggcggcgtcccggacctgtgcgcgcgcgccatcctcggttccaggagggaactcgtccagcgctgcccacggggagaagtcagggtccctggcctggtagcttgccagtacgagctccaccgccccccgggcgaggtccctcgaggatgacttgatcgtctcctcgagctcctcggggagccgctggagggtcccggccatctctgagaggcgctgggcgaggcccccctggttggcggcgtatttcgcggtccgcccgccccagaggcccgcctgccgcccggcacggtctagacgggagacggcgtcccgaagcatgccgggccctacctcgcccatcaagcggagggcttcgacctccccggcggacgagtccagcgcgccctgcagctcggcgatggtgtgttcggcggttgcgaggcgggcggctaggtcgccgtcgcccgtggccgccccgccgctgcgcgctcttgcgtccagctccttcgcccgcgcctcgaattcagcggcccgctgatccagtgcggccctctcggcgcgggcgccttccagattgaggcgcgccttctcctcccgcagctgcgccgcggcctcggcctcctcgagagctcgctcccgctcagtgagctcgtcctcgcggaggcggagtgcggactcctcttcggcgcaggcggcctcgtgcgccgccagcgttgcctcccggatggcgacggcggcctcgcgacccgccagttccctctccttcgtgtccagggcgcaggcgcgcttctccagcaccgtggcgcgagcctcaagggcctcttcgcgctgccgggacgcgtcgagcttcttctctagctccactgcccggctcccgtattggaggcagaggtcgtcccgcgccgcgttgaacacggcggtggcaatgagggcagtctcccgctcctcctccacctccctggcgatctccgccaggaccctacgacgggcctcgagctctgaggcgtgccggcggtgtgccttgcggcccgcctccaccatggcttccaccgagcgccgcccctcttcgacgcgcgcccacgccgcatcgacctccgcccgctctgcctgcaggacctccatctgggcgcttaacccgtccaacaccgtggtgttcgcagcggccaaggcctgcaggaggggctctgcgctcagtgaagcagcggaaggcagaggggagagccgcctcggtgtgggcgccgcgcggctcggcccgccgatcgacgtgccgaactcgggggcgtcccccgaagcgggctcgtcccgaacgtcgcccgaggggtcgggcccgagcggcgcgcccgcggcctcgtcgtgggtggcctcggaagtcgttgtcgcctcgggtggagtcgggtcgggggcttggcaggccgcccggcgtgcgtgcgccgcctccgtctcccggacggactcctcggcccggcggagtctggcctcttcccaaacggcttcctcagcctggcgagcccggacggcctcctaggcagcttcttcggcttcccggaggcggtctgcggcttctcgccggtcagcttcccgcctccgggcctccgcggtcgccgtctcctcggcctcagaccggccggacttggaatggcgagaagggcgcgacgggatctcgctgaggcagaagaaaaaccagaagacgaaaaacgggtgagtgaaaacttgccttgggagatgggagaatgaatacggccgcagtgggcgcggggacgaacctgcgaggaggtcggctaaacgaccaccttgggggggagatgaggtttccccggcatggttcggtcccccctatcttgcggagccgcttcttttttcgctccccctcgggccgcgacgtcggcacagcaccctccgggcgcctgctgctggcacggaccgccctgccccctcggggaggagatggggagggggtatcctcctgtttcctcttcccccgggcgtcggcagggcggctgccccccgggcccccgacacggggcccagaagcacgaccccctcccggggtagattgttcccccctgcggctcccgcccgcgccatcgtggcctcgaggagcccgctcccctgacgccccgaccgcctgcatgatggtcaggatgttggcgcgctctggatcgctgcagagggggaggacaccttgggggatgagggatgcctccacggagctgagattcagcacccgttggatcaccaccttgatgtcttcagggacccagtcccatttgaccccctggtgggtcctcatgtagtcctcggacccggtgtactcccaagcgccccgggcgcgccgctggagcggcgcgatccggcgacgaaggtaatcgccgtacaccatggcccccgtgagcccctgggatcgcagaccagccaggcggtcaagaacggcgtcgtagccgtctcccagatctaccggcgcccgccagctggaggcctgcgccgggggctggctcggaagtcggaggcgcgcttcgtcggcgagaggggtgtagaaccagtcgctcttccagtcgtcccacttcttgcgaaggacgcagggaatgtagcggttcagcaccggcccccgcggctggaagtagcagccaccgactaccgacggtggcgacactggctgtacggtgaagaaccaccggaacagccggagagatgggcgcaccccgatgaacatctcgcacaggtgcacgaagatggccaacgtcattaccgcgttgggggtgaggtgcgccatctggagatcataaagctccagaacatccatgaagaaagaagagaatggcgggaccagccctgccattgcaaaggaaaggaagaagacggaccgccccgggtagtgtggcgccgggcgtccctcgcccagcgcgaccacctcccggccggtggcagattccggcataaatcggcgcggtagcccggcctgcctctcgctcacgatgcgggaaggcggcagcacgctaccctcgagcggtgcggagccccgtgccatgacgccggcggaggaggagcttgagagcgagcgagtatggcaagggtagggcgcaggaaacggagagtcagagcacaagtggcgaaggcaagggggagagtggcgagaggaaggaaacaaatcccgtccttggcgtctttgtacccttgccaacgctatgcccggctcctcgcttcccgcgcccactacctcgccccctcgtctctcgcgcccgcgcctccactaaccacactcgcccgtttgcggcgcacgcggtagatgtgcggccgtggcgttttagatggggcagatcgtgcgcgcattaaccgcgctcgccaaccgcgaaaaacgccatcatcatgtccccaggcgaaacaaaccggctcgtcccgattcgcgcgctgctcgagtagtgtagcggtcttgaagaggccgctcattattgtcgatcggtttcacccttgccgatgcgcgcgatttgcaaccgttgggtttctgcccgcctgtagggaccatccccacctgtcaccaggcctaaggagtggcgtcacgcccgagcactttcctcgaggagggcaatcgccctggcataacgccgggggctactgtcggtgacatgggaccgggggtatcttgactagaggtttggggcagccgcggtcacccacttggcctgaccccctcgggggggtcgggcccgagggtgatgtggccgcccctccctttgtctccccgaggggtcgggccgctcccgtttcggccccgagggctggggcgccccgaccccctgtgggtttggcgccacgtgtgtgggttaggtgagcacagcggcgctcacctaaccgcgtttattgcgggttggacgagcgtcccacgccgcatttaatgcagcgcagcacactcgttcggtccgtgacaggtcacagtgtgtgaccggtcacagaccggtcagatcgcgggttaggtggcaacaggcggccttttgcacgcctcgccccgtcccgtcggaatgatgagagcctctaggcactcgtccctagacggagccggcgtgctaactcctggagttagcacgtcagtcccggctagattcataccaggcttcatcgcaaccattacaaggaagtcattttatgaagaagggctgacgcgtggcatgctaaactgacgcgtggtagacaagaatgaccggtttgtgactggtctgacgccggtcacgtcatcggcagacaaccgtgctcccacgttgcgcctgcttccggcggagtggaggtaggtatggcccatcccatcggagggtcattcggacagcagccatggcaaatctccgcccattaatgagggagtagcagggaaatccccggtgtcaggcgagtgatgacgctaggcctcactcaaagacaagctgtgatttagcttccaggcgaaggcgcaagccagttttttttgggagatagggtgagtccccacccaaaagaagagtaggtagaagtggtgtatgtgggatccccttgagatataaaaggaggaccttgcccacttaagaaaaaaggggaaaaaaaggaggaaggagggaggagggagctggtaaaaggaagagcggagctcgtagaggagaggaggagtgagagggtctctagagtttgaactctcttgctctccagctctttgtaactccttcatacacagatccaccagaacataggagtagggtattacgcttctcagcggcccgaacctgtctacatcgcccgtgtcttgcgcatttgctctctcgcgaaacatttcacagatcgagggcttagaacctcacctagcgcccccggtcgaaccggcaaaggggggcccgcgcggtctcccggtgaggagccccacgctccgtcactaggtgatatgggctcaaatatgtctctatgaatgtaaatagcacaaatgtaaatgcaacaaataaatgagacaagagacaaggaatttttcatcgaggttcggaaactcgccggtttcctaatccccgttgaggtgagcccaactccacccgcccaaccacgaagccaccgcacgcccccttcgtcaaggggtgggcaaggcgggagccggcccacggagaggactacccaagcctcgatcactcggggtagttcttccttcactccaaaggtggtgaactccaaaccactcacaaacggtgccgggcctcctccacaatctcctcggagaggtcaccgggcaacacctacacaagccgtttaagaggcggcaacctccaagagtaacaagtctaggatgcttgccgaggatgatcaagtgccacactaactataacaatgaagcaatgcacttggattggcttaactcactctctatcacctcactagataaactaagtgcacaagggtgtgagagctcttgcaagggttcaagataatgtaatggagtgccaaaaccttacccttgctgctggggagtgggtatatatacccccaaccaccaaaactagccattggaaccgaaatccccaactttgtgctctgccggtcagaccgccattgtgaggccggtcagaccggactactttgtaacggctagaaaactagccgttacagggcaatcatggagcccactcaacctggccggtctgaccgcagtgtagtggccggtcagaccgtccacggctcggtcagaccgccgtcggctcggtctgaccggttgcggctctggcggctctgtatcgccaccaaaaaccagaccagtgcaacagaccagtggggccggtcagaccggccttaccacgccggtcagaccggcctaaggcccacggtcagaccgcaggtcacttttcagctcaaccgaccgttagtaaaacggcgatatctcttgactcgggtctcggaatttggcgtttttggactctatggaaagcttattcaaagggccatccaacccatgaaaaatccatccaagaaacacaacttaatcaaggataaagggctcacactccaaaggatatccaccggacatacccacaagatgtcactcactcctattggacatgcccacttctctcttggtttaggacttgagaaaactcatcacacttggttagacaagcccaaaaaatgcacctacatgcatatgaactaatatggcacaagattatccacaagctcgcttcatagacccctcttgatagtacggcgcctatctagcaaatccggtctacaccaaacacaaagaccgggaaaagactaagaaaacactcttagctacattatatctttgccttgcgccatccatcttgggggtcaagcttgagtcgagatcaacacttgtgaccatccggttgaaccatgtttatgctgaggtcttgtccatcctttgtcaagactttattctcatcacaagcttgacttcattcttgccaacatgacgatgtccttggctcggtgaccactaacccatggtgtcattcattagcctcatcgtagtgggacctattccttttcacacctcaaaggagaacattagtctcaacaaatcggttgtcatccttcacttgatgactaaccggttgcatatgaaagatatggatatatttgttgagtattcattaacatcacaagtgtcatatactcgtatgcaagctcaagtgcaaagattcgatataaataataggtgaacaatatggatctagaacatgcacaataaatgtataggatttgctccccctaaatatatgcatacaaataaatatacaagagatacaagtgtatgcataattagagaatgaccaatgggggtttatcctatacatatagagaaggcatatgtagtaatgatgtagaccaacataaaacatataccttcatgatctccatgttctcaatgtaaatgagactaaataagataacattcgagtaaacattagtctcacacttatatatcaataacatggaaatcatatatatgaacctatcaaaaagtaggagataagaagtggtacatatcgttttatctccatgcatctcatccttgtcattattaaggtccatcacaaaagaatgcatgtcttccacatctcattatcgggaaataacctagtagacaacttatgcaaaagagaggttaatcccataaacatcggtttatcatctatcaccaaagcaacaattacacaaattgtttaatccaagatctttcaatcttttctctctttggtgatggataataacccgatataaacaatatagagagatgagatgaaaaatgatttcaaatcaagatagaaatcttataataaacaaaatatagaataagctccccctcaagatgtgcatacatatggatatgaaggaacgcatatgcacataatcaataaagatcaaatagaaagctcacactatattttggatccacaagagagaccaagttagaatatgtgaagtttaatacatacctctcatcattttttacttttatatccaaatgagactagtcaaagaaaggctcataaaaatgattagtctcatatagttagatttgtcattaatcaccaaaaccaaattaaggcacttgaacttacaaccgccagatccagatcccccgaggttggcagccatgagggagttgagtccgagccagatccaccctaagctcgctatcacatccggcggcgaggacatgagctcgtcgacagttgggtgcggcagcgatttggtgcggaggtggtgacgcaacagcaccccgaccctgacggctggatctggctgccccgctgctgctccacccggtgtcattgccgcttgggccgccccgtcggtcgtcaccgtttaggccgctccacccagcgccttggcttcgtccgccggtgaggaaaggagtagaggaaagagagatggggtgggagatgaaaaatggaagaaatggtacttgtggaacctactacaagcaacttacaccgttgagtatgtagctttaacacattcttggtttaggtggcatgtgaggttcgacaaatctagaggacactactattgtcctaagacttcccacttgatttacttgaattctaaaatatttagttataaaatcgaaaaattaaattaaaaatcagaagtattcaagattctcgtcagccgattactcaccaattgcattttagaatctcgagcttggctacagcagtactactccctatcaggacacccgtaatggttatctatagactctctacaagagatacatgtcagcatattttcctacttggaagagattaaatgaagagagagaacaaatatatctactaatctgaagatagtctatagagaaaaacgaggcaatagattaatggtttactattaatctagtctattactgagatgtacatgttttatagatagcacattactttactattactggtgctctcagtagccagttgcttgtcttggcttggcttgccgtgccttgctgaaattccccagctcgcttccccaagtcgaagctgaattgcacacatctcaatcaataatgctcccccagatctaggtgaatcatcaaatttttaattactcacatcatcatacatataaataattcttgcatcattagccgccatagaaatgacagtaatagtagcatccagaaatttgctcatttagtagtacttgaccagtgacacactgacacctagtggctacttgtccgaagaaattttaactccaagctcgagaaatccacacccaaaaagatctcaatttttgtagtctgatgatttgatgaccagatgaaaccaggtttctgaacaagctgagctaggaatcctgcagctgggtggcagtagccgtgtccatggcgcgcgcggcggcgacgtcgacgtcgacgccggtgtcggtgtcgggcatggtggtgaccctgacgacgagcggcgtgcggacgcggtggtagccgtcggaccagacgatctcgccgaagtcgtaccggccgcgcgacagcttcgccggcgcgacggtcacgtagtaggaggccgtgtcgcggtacggggagaaggacagcgccggcggccacacggcggcgcgcgcgccgtgcgggctgacgacggcggcgcggtacacggcgtccctccggggccccatgttcgtcaccgtccgcttcacggtcaccgtcgcgttgagccgcgggagcacgatggccgggtagttgaggtcgtactccggcggcgccgcgccgccgccctcgccgccgcagctcgtgtcgagcgacggcgaggggagcaccatctggcgtatctggtacctggtgtagccgaggccgcagaggaagaggacgtggtcgcgcacgccggcgtcgtagacgaggcccgggtccagcgcgcgcagcgggtcgacgtggccggcgccgacgtcgaacgcgtccgccgccttcagcgtcccgccggccagcatcacgtcggacgtgtcgtcgtacatgtatgccgtggtcatcagcgccgacttgatggctgccggcgaccacgtcgggtgcacggccctgacgacggcgacgatgccggagacgtgcgggcacgacatggacgtgcccgagtcgaagttccacgtcacggagcgcttgtccagcgggatcaccgtcggcgacgacatgggtggccacgccgccaggatgttcacgccgggagcggtgacatcaggctgcacccgacgaatcacaaaccaaaacacacgaataaatggttttgcaatatatccgattttctcctaaatatttatcaaatgcaaatatagtttagttatattgtaacttatatgtaattacaatataatttatatgtaatttttacatagttttgaaaaataaaatcatagtgtgcgtatggatgaggacatttgtcatgaaacgtctgcttcacgaaaatagcatgtttccgtattaatgtttttaaaagttatatataatttgtattatagttacatgtaagtataatagagttacactgtaatttgtactctctccgttttaggttataagtcgttttgactttagtcaaagttaaattgcttcaagtttttccctaaaaaaaattgcttcaagtttatctaaatttatagaaaaaattagtaacattttcaacccataaaaaattttattatgaaaataaatttaattattgatttaatgaaactaatttaatattataaatattaatatatttgtctttaaacttagttaaatttaaaacagtttaactttgatagtcaaaatgacttataacaagggagcaggaaatttatcgacaaatgtataaataatccccgcaataaaatcatgccattttcaccatttaatccacgctctcgagaatgaaaaatgtggtggcgtaccttaaggatgtgaggggagatggagctggggcccctggaggagaagtaggcgacggccggcgccggcgacttgccgacgagcgtcgtgctcggggagaagcgcgcggtcggcgggcggctgctgccgcggatgtagtcgaggatccgggtgccctggcggaggtcgacgtggacggtggggaggaagttgtcctgcgtcgacctgcgggagatggtctcggcgaagatcaggccggcgccgccggcggcgtacaccgccagcgccgcgacgccgctggacgccgtcgtggtggagaagcacagaacgatcctgccggacgccgccgcccggctcccgttggttagctggtcgaatgagcaagaccttggcatacagcaattggaaccgtgtgattcaaggatgcagatttgcagaaactacacctatgtatttgctagctttacttagtacttataagacgttttgactttagtcaaagtcaaattattttaagtttgactaagtttttagacaaatatgataatttttataatactaaattagtttcatcaaatcaataattgaatatattttcataataaatttgtcttgggttaaaaatattactatttttttacaaacttagtcaatcttaaagcattttagctttgaccaaagtcaaaacgtcttataacttgaaacggaggaagtatttgatttgtgtttttttttgttattactattgataagtgttcgtaatgggtgttaaacttgcacattttgtttcagaatatttatgtatttctgttcgaatagagcagttttcttgcaaatggttagattctactcaaatatagtaaagttcagttagtggtgatcacaattaagaacaacatggcagctacaaaaccactaaccagttattaaccttgcggatcatagttctcatgtctcacaagttcctctaacagagttctaaaattccatgcatattttgcgaaccatataaaggagtagtcatcactaatatagttttccaataatttttattattattttactatctaacaacgttttcaagataattcaggcttattcatattgatcatgacctgggtataaaatctcagtctcaagcctagaaaagccatattatctctcactgttctgccaattacaataatcattacttaatccaattaaactgcacgtgtgtgagagagagattacccatcggagaagacactgccgctttctactaatctcatcttcatgtcattcacattgaagctctctccctatgcaaaaaaccagtcatttcatacattattacttgatttcacacaaagcaaaccacgttatatataaaagtactaaaacacataatgtaagatacaattctgtgcagattacagataactagtagcttgctagcttatgtttatacacacacataattatattttgtatacaactgtaccaaacatctcgactgttataatctagacccaccacgatttctcaatacatttatctttttctctgatttaatttatgaggaaatttataaccccaaagtaaacgtggtgttttttccgagctatcttaatactccctctgtttataatataaatcactataaatttttcttagtcaaacttatctaggtttaactaattttataaaaaatataacaatattttcaacacaaaacggacacactatcaaaatatatttaatgctacaatcgatggtacaaatttaatattatagatgttgctattttcttataaactaaatcaaatataaaaaaattgactacgaaaaaaatatgaaactgagggagtagcttaaatataatagagagataagattatcaaaaaaaaaatagagggataagactgataacatcatggctgctgcactcgaagataaatatttccataccaccataaaacacatgacagtgaactaccgtagacgtgcaccattaagagccgtgatgtcatatcgtgcgtccactacaaacagtagacgccatattagagaagcagcgagagcgaggttaattaccacgagggagacattgttgccgagcgtgatcaccgtcgggaacctcctgtcgatggtgctggcggcgacggtgatcacccacggcgacacgttctgcaccatggcggcgtcgggcccgtcgttcccggccgagaacaccgccggcacgccgagctgcatcgcgtggaacgccccgatctcggtgctcgtcatgaacagcggcatgagcggcggcgtcgagccgagggacgccgagatcacgtggacgccgtcgcgcagcgcgtcgtcgaacgccgccaggatgtcggcgtcgctgcaccggcccgtcaggtccttgaaccagcacaccttgtacacggcgagccgcgaccacggcgcgcccccgcgcgccacgccgcggcccaggccgccgacgtagctggcgtcgggcgacacggcgcccaccgccgtcgacgccgtgtgcgtgccgtgcccgacgcggtcccgcggcgaccggtactcggcgccgccgctggtgttgagcggaccgacctcgctctcgaagccggcgaggtagtagcgcgcgccgatgagcttccggttgcacgccgtggccgggtcgaacttctcgccctccacacacgtgccgcgccatgacgacgggatgtcgcctaggtggccatcatccctgaagctctgggattcaggccacacacctgaaaaaacacatgaaaaagaacagattcatcgtgtaagggcatgttcaatcaaagccaatcctagaggacactcatgtctcaatggatcataccctagatgagcttctcaaaatctgaaacaacttaagagcaagtttaatagtatagcccactattagctccaatttatctatagtcaattcatacaatagttgcttactatattattaatatatggtcccacatgtcatacacacattgtacattgtgtcttagagtccgtgctgcagctggctacagatctgtagcccgctgctctgctctctcatcttttatctcactaaaatatatttacagccgactaatagtctgctattgtatctcagccgacaaagtcccatgtttacttttacttacctaccctagtttctctttcccgccccctcttctctttttcttcgcactcgcctctccctccttttattttcgccgccgcactcgcctatcccgtcgccggcggccgcgagaacgacgaggagggccgcctccctgcctctctctcgtcgccgctcgtccaccgctgcctctctctctccctctcgccgccgccgctcgcctctccctctcgccaccgccgccgcgaggacgacgaggagggccgcctctcccgtcgccggcgtccactgccgccactatctctccctttctcccgtcgccgcccgtcgccgtcctccccggcatcctccgcctcacgccgtcgccggtcggcgcgcgccgtgcgagcatgcgtccgtacatccccaagcaaaccttcgctttctgccactccctcctctcctcgcgtctcctcctcccgtccgccgccgccgcccccacggcgccggccctacccgtgcaggcgctactcaccaccggcggcctcctgccgcgccaccccgacctttacctggtcgcgctcaactcgctcctccgcgt

SEQ ID NO: 7451 - DNA, 22710 bp, Oryza sativa
cgctgcgtgccgtgcggcttcgacgtgcacccgctctgcaccatgttcccggcgaaggtgcggagcccgctgcacccggagcacgagctcgccatggtgccggcacccgcggccgcggcggcgacgctggggcggcagtgccgcacctgctccggctgcggcgaggtctgtggcggctggttctaccggtgcgacgcttgcggagtgtgcctccacgccgagtgcctcaatggcgcccgcgccaagcagagtgccggggtgggaagccagggcaccggcgtcggtggcgcaggcagcagccagagcggcggcggcggcggccagagcaccggcgtgaagcggagccggagttcccttgttgggaagttgcttctcaaggctgcggttcgcgtcgccgtcgatgcggcgacgaacggactggcatcggcggtgctcgatagcggcagcgccgacgacacgtcttccttcgatcaataatgtggttgtgcgtcctattgatcaatcgatatcagtacattatgtatgagtatcacctatctcccttgttttctcaagttcatcagaggtcccttacttgtcaacgtatccgattttcgtccttcaaccggaaaaccagatacaacaggtccttcaactatcaaaaccggtgcagatgaggtctctcggcggttttggctgatgtggcacatatgtggctagtttgattcggtattcatctgacgtgccattgatgtggtgcttacttggcaattcgatctgaaaaaataataaaacccgtgagacccacatgtcagtttcacacacacagtaataaaaatggtgggaattgtgggaatttgttgctatatttactttctccttatttcaatatctcatgcttagaatgatgatgttaagtttctatgcattttgcgataatttcattcatatcttgtatacacatgcttataaagtgtcttgctggggtaaataagtactcactccttcataatttgacatatacaagaatcgtgttatcaagaagccccagaaggtagtgaggtctacaacagcgacgagtttttctagtctagtctagacttgagcttttgcctgtgtcatttagtaggttggttttctccttgaatttcaaataaggatattttagtttggatcttttaatctttaagagttgtaatagctagtcttttgtaaaacatgtttgcaataatcgaaagctgttatgtatatcaatctgtgcgtgatcgaaatcctggacgatcatgagtggatatttgggacaccaagaatcaattgggtgttatcataattaccaataacatgaaaaattatatgagaattatcagggttacgggttaggtataccctttacccttcgatatacgccgcatatcagtatggcatacccacgcgcatacggatattctctgcatacattaaggaaatccttcatggaatttacggatggaaagagttctactcggacaagactgggtcgtcaatgtatcgtgtaaggtctgatgtctccgagttctacttggaaaccgcttgacctgcgatataaaagggaccccccggggaggacctgaggcatcgaatctcagagccaacacaaccctcacagcctacgaagtcggagcctgcaggagccaaatcgccggggatctagtcaaaccaactcgactacgatctcgctggatccatcgagttccattgttccctttgtaacctgtgttttccatcatataatcccacatcaactggattagggctattatctatcaaggggcatgaaccagtataatcttcgtcttttgtctgcttgatgtcgtattacgtagatccttataccaacgtaccccaataccctctatatccggtctacgggtatcacccgtcgacagtggcacgccaggtaggggggcttggtgctcaaggttctactactatgtcatccagcttcgtcgacaacaacgtcaacaccaacctcaactaagtattccctgcttcaacaatgctggtgtggactcaagtcggcaaaatcgtcttcccggtttacaccacaatgccgatctcagcctgtccatcaatgaccggaaacgagaacgcagtggctacaaaccaagacgactccatgtcgaaagatcctcccgccgaggcggagaacggaacatcgacgacatccgagctcgagaaggattctaatgcggccaaaccttgtcgttccgacaagaaccgcgagcctacgaagatgacttccgaagcgacaaggtcctggtgtcctatccacaaaaccaggaaacacaccttgcaagcctgctgggttttcctcaacgtccgcgctgaaattcgcgcttgcaaagagcgtggaattcagcgtatttctccaactcgtgatgtctattgtcctattcacaagacaaagaatcacaacctctcaagctgcaaggtctttctcagcgccatgaaagcgccatctcctaaggttcaacagtcacacattcccatcagggataaagacaaggaacaaggagcgacgtcaacttcagatcgatttgttggggtaatcgatatcgatcctcacgaaccatcagtcttgcaccttctcgaagactatggatcatcgacaacgagcgcgccgcgggaggtattggctatcgatgatatcggcacgtcaacgcgcaccaatgcagaagcggagaatcaattggccactccggcccagcacatcagagctgtcaacgctatactgagggaaaccccctacgatcctattctgaacgacgatctcgcgcgttggacagaacgactacgggaatcagtgaccaacctcagcaacgcgttcgaagaggccgctgccgcagcgcacccggagtagccaccaactggcgatgccaatggtgaagaccctgaacggagggaatcgcctcatcgagccacccctccacctcgcggcactggcgatctccgagatcacctcaacggccgccgggaggcacgacgcacacgagacaatgagaatcgttataagggctatggccgattcaattccaaccccgaccacaacccctgcacaatttatcgaataattattttatatgtacttttcagcaatgttttctactttaccctagtctcatccatctttgttgatttgcatcataagttgttcatcttcgctgcaagagtgtgatatccttcgtaggttgtcccgtaaaccttccgattcgcccacgagacgggtggttatctataaatagatctaaatcaacctagaggctggtgtaatatctaaattggttgcgctagccggtttaatcttttctaaacccatattagtttggatttttctagatcgaggtgtttggtgactctgttaacaccacaaatcattaggtgagtccgtgttgaccgaaaaaggcgtcaacaaagtcggtttgactttttctaagtcaaacttggttagctttgaccgagtttatagaaaaatatagctatattttaaacataaaacaaataaactatgaaaatatattcaatgttagatttaataaaactaatttggtgctattaacgttactatattttttttaaaattggtcaaactttcaagaaatttaacttaaaaaggccaaaacaacttataatatgaaacaaagggagtatatatgaatctcgcgtgtggcaccgcggtgagacccgggcgatgctattcctataaaatcaagggcgttgctctggcgaggtggcgacgctattccagtgagttagtgagcactaggggtggaaagagagtgaatagtttccatccgcttgagagaaaaattgaatacgaataaagttcggaatggataatccggatatggatactaatatagatattttctttggatatgaatacaaaaatggtactatagttttcgacgaatatgtaattccggtgaatagtgttattcggatatccactaaaagcatgaaaatttcttcttatctatagaccttcaacctacctctttagactttaatggtagcccatctcaacttttaaatatttcacaaactatagtacaatattatgttataatttcaattatacatgcatttttatataaaatgagctaattatgtgtgatggtatttgtttctattagaaattgaagtggttatcttgtttcgagaaataaatatttgtgttcgtattcgtgtcagatcatattcggataaattgtatttattttcatatcgtccaagctattcgtattcgtatcaggctgaaaatacgataatgattagagtcttttacccctatgccattaagaaagttggaggttacgtgtgtgtcacaaaaaagttttgagttacctgtatgccatgaagacaaactttcttttacatgtgcgccactttggatggaatcagtactaacggagacaaacggaggtttgaaagatctattttgcccttgctaatggaaggaatcagcggcggaggcggcgtgccggcaacggcgacgaccagcggcggcggcggcggcggctagaggtgtgccgccggagccggatagacgaggcgaggcgatggcggcagatagacgaggcgcgccgccggatagacgaggcgaggcggcgggggcggcgtgccggcgacggcgacgaccggcggcggcaacgaccggcggcggcggctaggctagggcacgggagagtagtagtagagatgaaaatgcttcaggggcaatttagtcattttcatacatgggtcccacatgtcagagctcattctctaacataaggtggatggaatggcacacgggtaaacggaagtttgtgtcatggcatacaggtgactcaaaactttttcgtggcacacacgtaacctccaactttcttaatggcataggggtaaaagactctaatgattattgtatgagcactattgcctgtatccgctcggttttcatccctaactagcgcaagagctcaacccaccatgtgtccatgttgttgccgtcaccagattcatgcgttgagaatcgagagttccctttgaggctatgaaagggacgggctagaacagcttattggttttaacccatttctcacccaaaccgtataaaattccatgggctgtgatcgaaccgtgaagtcctagatgtaatatgtataagcagttacacgaaataagattattacattaatccacttcaatgcaagtgtaaattatagcatataacattgttttcttcctaaggtctacctccgtttctttgtttgacgatggttagtaaccgacgtcaaatattaatggatggagggagtacattctaaccaatttgttcgaaagataaaaggatatttgctcacacatgctgtttaagaagtggcatattcactcatcctcaaagtgctgtttatcactgtccttattgggatcaaataccacctcctcctattcgttgtcgtcgtcgtcttcttcttcttcttcttcttcttcactgtcgtcgtcgtcttcacattcctcttcttcctcttcctcttcctcgtattcctcttcttcctcctcttcatcatattcctcctccgttagtttttctttgttgtccttcccatggattgttcctggccctcctgtaaccgtcgatcctaacttcaatttttgcagtattgatgacttcctgcttcctgctttctgtcctgctcctcttataactgctgttgttgcgccaagcaatttatgcgaaattgtagcaaattgatttgcagctgctgtttttgatattctagtcttttttgttggaactgcaactgcctctgttccttgtattccaaccccttctgaagctgcaagttcaacattagttcctccttgaaattgttggggtactcccatttccacattgctcgtgttgccttgctcccatttgtggctattgtaaatttctacatgtgcttcttcatgtaatcttggattatcttctcccgttacttgagaacaactctcgtggatgctgaagttgcagagcttgcaacggtagcaaatgagagaacctgactgacgacatatgtcgcaaatgaatggacgtctgagcttggtctttattaatgggtgagcttggtgtgacgcgtctataatcggcatcctagtttggacacgcaaaagatgtaaaacttgggaattctctccatcgagaaatatacaatatccataaattctgatattcaaaatctgaactttggtcaacaattcattgaacaatgtatatggttagtgcaattcatatatataagtggtgccatttgatttatatgctaagagtacttctggcgttgattaatttcgtggttagaaaatttactctaatagaaattctgtcataattcagtgtttgagatcctgggaaatcaaaccacaccttataatttaaaatttataggaacaatagttctttatcacaaaacgtaaaatattttttttaaaaaaagagtaaaacaagacagatctatatgttcagataaaaaaggggaaagatttatacgcacggagagaaagttaagaattttatagtggagtatacattctacggttttgctttggaggacatgtcctgtacacacaaacttttcatatacaccatgtgcaccaactaacaaattttataagaagttctataaaagattgtacatatactttaaatagtattacatttatatgtaaaaatctcaatctcaaattcattatattttagtcgtaacaaaaaaaaaacttaaaaatctgtcagaattttgtctttctttttctccatatatataataatttgaagatcggactttgaggacgtatccgatgaaaacgagctaagtgttgaaaaatcgtgaaaatcatacctaaagttttgtaaattcatgaaaatttattagagctagatgtagatatgaaatacattctcactaaatctcaaatcaaaactcaacttcgttagaaacaaaaaagacaaatttcgggtgaacagtgtcttgttactatttacctaaaatttgtatttttttgttacttctaaatgaaattgagtttgaacttgagatttgttgataatatatttcatatgtatacatatatctagtattttttttcatgagtttttggtacgatttttacgagtttccaacacttagctcgttttgactggatatgtccctaacataaatataatactactaatagtacatatataatttttttaagaattttttatgatattttttagttgatgtgtacacgagaggtcttgtatgcatataagttcacgttccaggtatctgtgtacacataactaaaaggctagttaaagaggaggacgatgtggacggttttattatacggttttaaataatgatatggttactttaattcggtagtacgtttatactctctccatttaaaactatatggtatattaggtttctacgcagtctccgacatacactttaaccactaagtttctaaatagagtattaacatctataaatttaatatcatatgaaaatattttcaaatataaatctggtgatactacatataacacactaaacacatactccctcggtttcataattcttaacattttgaataatgacacggtcttcagatatatgtttgactatatttttatattataatatataataaatattttttattttattatagtactttgtaagataaatctatatgttgttctagtgcctttgaactaaatatttttaaagtcagtgacagttaaagctaaaaaaaattaacctaattttatataaacgtcaggaattataggcccagaggagtctaatttttgtttgttggttataaaaaaattaatataaactttgcggaagaaaaagacacctcatatattcaaatggagctgggatcctctcctgtaatgcatgtgtaataagtatgtgcagtaagtgccactgatacgagggcctggaataggtgggacccacatatcagtgacacgtaatgcagtgcagtacagcagtggatttgcatcattcaaatggagtgggtgccagctaggaggattaattagacagccgaacggaattaagtgaaagttgtagttttgtcattggtctccatatctcactgcacgtgcgtaggtgtcttgaatataataaaagagaccgctcaaaaaaagaatataataaaagaaggtaaaatctaaatcaagaaataaaagaaatagcaccctgatgaatgcttctgtgagcagccgttagagtagtttatagtattttcttaaataaatgaaatggaccatatttgcaaattaaacatagaaaatgtttacctttccttcccaaattaagacgaatccgaccaagatcctctccggactctagttcaatctcggaactgaagagcacacgatgcgtcgatgtgtacggtgtacctcgctatgaggagccttttatagatgtagtatttcgcgaaaagaaaatttttagatgtcacatcggacgtttgacgacatgttaaaagagatttttggacacgaatgaaaaaactaatttcataactcgtttggaaaccgcgagacgaatcttttgagcctaattaatccgttattagcaaatacgggttactctagcacttatggctaatcatggactaattagactcaaaagattcgtctcacgattttcccctaactctgcaattagtttttttaatttatctatatttaatactacatgtatgtgtccaaaaatttaatgtgatatttttggaaaaaagttttgggaactaaatagagccgtatatgtatattccgttgagcaagtctgattttatattcagttgaacaagtctgattttttttttctttcttgcgttggataagtctgcgatgtacagtcaagaaaacaattggagaaacccatcgctctccaatatgcaaatagctaaagaagtttgaaaataaaataaaatctatcactaccatagaaacgtactccagcttgcttcagatatactatacggaacaactcatcatagatatgtaagttaattgaggttatatgtgatggatcgtaactattatcatcacaattaccatcaccgatggcctcacattcagtagtattgtatgaaccatggcaagggtcccattttcacctgttatggaggtgtgatcatccgatttggttcctgtgctgtgcagtgtgactgcaacaactagggctgtctgtcattggcctgggcctcgagattgggcggctcgttgtgtttggccggactgtatccgatgtcggactcaccgcatccgtccaccatgttactgtaattttcctcttcgtattgatctcaaatgttactgtaatattcctcttcgtattgatctcaaatgttactgtaatgagataatcgtgccatatcaatttcggaaatttcccaaaaaaacactttcagaagtttctgaaaatcatttttggaaaaaatctgaaaatcacagtactttcaaatccaagaatgagaaacacttcaaaaaagattttgatcactaaactcatccctaaatattaaggcaacatccccttaatagtacgactttactaccaactcaagagcaaatagaaaagctataccaatacaaatacctttacgccatcttctctctttgccttgatcaatactaatatggatttgaaaacgaatcacatccccttgaactttgacatttcatcttgtgcttcttcttcatcaagggttgatcctcacactactacaaaaacgattttcctgtacgagacccttgtgaggttacagacggatcataactgaccgcatatgcaaaaatcgacctccattttcgcatacggctccttaaaagacccgcacacaaaaatcaattttcgcaggcgggccacttaaaaggtccgcacaaaaaaataatctattttctcaggcgagccacttaagaggcccgtctgcaagtctaatccctctcaacccattcaaaacttatctcttcttctcctccccctctctctcccttatcttctcctcacttcatctcctcctctcattttcccttatccgttctcttctcctcacagcaacgcgatggcgggcgcgacggcgacgtgctcggggagcggtggcggcggcggtggcgggctcaggagcggtggcggtgggttcgggagaagcgatgggcagcgggtgacgcggtctactgtgaaggccgtggctccctcgccctcccccacgaagcttcggcggcggcctcgagggatgacgacgacaaggaggcggccgggagtggcgccgccggccccacgcgcacaccgactggatccgcaccgccccagccgacaatgacgacgaggagacggcggccaggagcggtgccgtcagccctgcgtgcacacgcgttagtcggatccacgccgccccgctgacgacgacaaggaggcgacgacggccgctatctccgcgcgcacgcgccgccaccgccggattctaggatttccttttttgaatttttattttttttggaatattatttttctgtgcgggcgacataatccgaccgcacgtgaaaatctaattatcccgtgcggtccacttaacccgaccacacgggaagatggatttttctgtgcggttgggccgcccgcacgtgaaaatatttattttcacagacacctcggtgcagacgggcaagacctccgcatggaaaaatccttttcgtagtagtgtcaacaacttgtgacatcatatggccttgattgattcgtcggtattcaacaaagcacttgctccttcaccactgcatcatgtccttcggcgccaagcctccacttgcccttctcccatgcatggtccatcgtgtatccaagtgttgccaacccttcattgcatcttgccatcttccgtcatttgtagctttgcatcacaatgaaaccacaatgtattacatctttctctacatcatcttcattggactaatcccttgcttatacactcaataaaagcattagacccttaatcatttgccatcaattaaccaaaactcactaagggcatagatgctcattaaatctcccactttttggtaattgataacaacacgattaaagcttacaaaagattgataataatgcttttgaaccaaaagttagtttgagctcccccaaaatgtgtgcatacaaatatatggagtgaatttctgtgatgagtgataccgaaaggaaaacaagacacataactcaaattcttgccaccgattcaaaatgtatcaaatgaaattcttaatgccaattgcaaaaacttgattttatgccaattgattctggtaccgattgagaaatcacgagtaaccaaatttttgaatcaaattcaaataccaataaataatgtcaattgcatctggcctagcaatcaaataataagcatgaaatctatcacaccatgcacactccaattgacaaacattttcaaatatactctccccctttctcatttactctttggcatgtccaaagcatgtctttcgataatttctcacaattatctcaccctttgatcaatcttttcttcacccccttccttcagtatactccccccccttgaaatctaagcaacaaaaagggcatacgcagggaaagaaaagcagagggatcctcgtcgattacctttctctcaattttatatttcatcacttgtgattacgaattaaacactaatttgacacaagtgaatcaataagcattgagatacaaattttgcacataaaaagctcacattcgaagggtttaaagcataaaccaaaaagtatccctttgaatgtgacattcttcttttcttctaatttaatgtatccctcccccttagtcctctcccactttgtcatttaagcatggcaaggagagggcatgatatataatgaaggggatcattgagatttgaacatgccaaaccacttcttcacaaactagagtgagaattaagagttaaaaataaaaacaaccgtcccaaaattattcacaaagcatttcgtaaatgagtttagaatatatgaattccatagtttgtactaaggcaaaaaaatccatatagaatgaagtctttgagcactttgattcacttagaatactaactttatgactactactcacgtattgagtaaacaagcattttttttcataacattatgcaaactaggctaattagcaagaagtgaaagttggcctagatgcacaaagactaggcaagtgatccaatcattccaattgaaatagcaagctatggatcatccggttaccttccttgttaatttttgacacgcccatcgaaagaaatacattacaaatgttcttcttggtgtttgtgaccttgtcaaaagattgacttagcactaaaagcaaatatccacagggataaaccagagaccaaatagggtgaaaaagtgaagagaagaaattttggtaagcacttatggttatttaatgggcttgagaagcagtcaacatggagttttttttagaagaaaaataacacggagaatacgggtacgaatagcacaataaggggcagccgccaactatagtttggcattaactttcacctcttcatcaatttcatgacattaaaagcatgggagtgaactcttgccaagaaatacaggccatcgcttaatatgtgatggaagaaattgaagaacttgcgattttttttaaaaaaatataaataaagatgtattttggttggagtcttaatttcatatttttttataaatgttacgtcataaatatatagctacttgtttaaattaatattgtgatatctcgtcaaggaacaaaagaatatcaagtgtccctgttaatgggagcaacttttcgaggtttgttattagactctaaagtttatgggaggaaaaacaaagtaattgaaatacgacactattcatgcatttgattcgtaggaataagaaaaggaaaaaatgtaggaaacttttctattcctacgattatagaggaaaaacgtagaaaatttaacatccactataacctcttggaaaacttcccttgagtctatctctttcatctgtttcctgcgtttttcctgcagtacaatcaaacggttatttctgtgtttttcttctgttttgtaattctctattttgcacttgttgcagtccaatcaaacggttattcctgtgttttttttgtgttttgcaattctctattttgcacttgtattcctatcaaaatccggtatttttcatattcctctattttttttaatcctactatttaaagaggccctaaatgtgttcctcttgttcctatctattacctttgcctttctagtgtcaattcctttgaccttggcaggtctcgttcgtactggctctcatgtggaaagatataattcgaagttggaaccactccgcacaattgtcgcaattcaccagtaaacagattgaattaagggccgggtatatgaatgcagaatgcgatttcacgtaagcagctatagactcggtgcccagtctgagtcgtctgcaatattttataggcaaattggcaacatgttccaggagtccttccactgtctccaaacctgctgacttgtttcacttatatcgtcgtattattgcaattcttcgtactactctttaagggacgtatatctaatcccatcttcgatctaagataaaaagttattttaggatttgtgtctatcaagatcctttttgtctttgatgtaacagtgatctcagtctacaaagacttactacagtatatttttaagttttagaattagtgtagagttaattttctactcatcttatcctctcagtattagtactatcttatagagcttttctttgtgtcgtcatgtcgatactgcacgtctttgtttatatttaatctcaccctcgatgtaaggtaaggtagagaattattatttgcatctgtcaaaaattttggagattcagaccgttaagtattactctcgtactaaaatataaattagttacttagacaaaatccatatatattaggacgtgcgttgcacgggttattatattctccctccattcaaatttgattgtcatatttcagtttctgaaatattcagttttgatcgcgctccctccaattttgtctcgggtgtgatgcctggttgatcgttttccatgcatcattagtgcatccatgcaagggattggttcaggttgtgacccgttcattttccatgcatcattactgcacccacgcaaggattggttggcttttcaaatgcaaagcaacagctttgaataagtattattgttgtcatagatattagaatttcaattatatatattcaaacattagttattattttttttcaaacttatatgttcaaaagacagaataagtttatttatgataaaaaaactaattccagattatatacaaatcaatcctaatatttttgtatattagttccgattttcttaattcaaattttcaaatttttaattacagttgtacacatattggagtctcaatttaataatctctgtaatttaatttggaaatttattaataagtgctgagttatactcgatttgaagatacaaatttccatgatttaataattctgaaaatcgagattaatagactctgagacgtactcggtttgaggtcagaattagaaattattttattagcatatgtttagctttacttggtttcaagtttgaattatattcatttcgaagaaaagtttgaattatatcatagattttccatatcgttccaaaatttagaattaatcactgcctatttgttctcgtgtcgaaatattaatgttcagattcattatcttaggaggggacacatcccatcctaggttgagtttttttgacggagggagtacgtggcttagagcaggtacaatagcaaactattagccatctataaatatattttaatgaaataaatgttgagagagaagagcagcgagctatagatctgtagccagctacatcacggacttcaaaacacaatgtgtgtatgataggtgggaccatatattaatagcatagtaaacaactattgtataaattggctattacatacgctgtagatgaattggagctagtagtggactattatcttagcgatgaagagagttgagggacataaagcggactagaagttcacatggtggtctgctgccggcctaaagaaaagcccatgttaccaccagcccagcgtatccggctactgctttgctccccgtcccccccgtctcttcctcgtgagttcgcctgccgcctccatcccgcgcagcagcgccgccgccgccgccggcgacctgcttcttcagacgcatcctcgccggtgagcgcagcaccaccctccttctcgtctttccattacccacgacttctctccttgcatcaaccttaggcttgcttatcctagatctggaagctttttaatttctctttgcaactaacagcgatttgtttccgaaaataatttgggattcagctgaaatcctcaccatgtcccacgtgaggtcggcccctgcgggcaagtccggcgggggcggcggctccacgccggcgaagcgcggccgccccttcgggagcaccaccggcagcggggcggcggccgcggccgcggcggctgcgatcggcgatgcggcggcgccggccgcgctggttgggccgtccctccaagtcctcacggcactctccggtgagtgagcctctttcttcgcctgcaagtccgcaacgagcttgtgatgatgtctagggcacagctttggagacgactttgttgcgggaagggggattagggtttttggtctgctgattatgtgccttggtgttgaaattgaaattgggatgctgaatataccatgcatcgaggatttgctttattggactgctgacctaacagggaaatagaggaacaatgtttttagttttgaataaggcattgcttcgatttttgtcttatgaggagctagatgggactggtcgtcaaattggccgtcaagaacggcgtgatttatgggtagtacactggtaatcctatgacgaacattggaaacaatggggacaaacaatcgtgctgtagttgtcttcataatttcagatgcagaagggatggcttgtatagtttctttacctatattttttccctgttcatattggttcattcaatagagatgctacctcacatgtgtcatgagcttgaaatgcacatgcactccttttttctgcacacttaacatgtactgacgacatggttactaagaaggagagtttatgtttctttgtggacttttcagatcagaacaataaaagaattgttcttgcattgcaaagtgggttgaagagtgagatactatgggcattgaacgcccttacagtactctcatttaaggagaaggatgatctccggcgggatacaacacctcttgctaaagttcctgggctcttggacgctctccttcaagttgtaggtttttaatgttaacttccccccttccaatttgatctatatgttatggaatgatgcatctcttctgaagccaaaaatcatgtttcccaattcctctagcatgcattaattgatcaatttgaatcagagttcattttagaaaatgattagtcaatcaatcatcaccctattcattttttatggtggacctccgtactgttgatgccaccagtggccgcagccacctgttccagaccaggaggatcaggaaatggattgtgagactgatttatctttactttttgttcgcaaatattctttcgtttaatctgcagaagttgttaggcaatcctcctacttaaggatgggactatcgctacttgaaggcaaactagaataggtaccctaccccctgcttctctgcgaacttccgtgtacctcctgtcttcctcctgcacaatggtgcccaagcgccatggtccaggtctccaggatcttggcttcctgcctctcactcctattcccttgccaccagaatcttgcccacaatatccagacactgatgaaaatgtgatgatctcatgcaatatccaggactggcattgttgtccactgtagccatagaaacgtaaataaaggttccgatatttgcacttacacttaattggttggtggccaaagtatcgctttatttaattggactaccgtgcttctttgatatgactaaatttgctaaataactaaattttttaaacaatgcactgatcaattttcatccagaaaagaaatgatatggtgatcatgtacggatacgcttattaggactttatttctgcattctgtttgatgcatttccattttgtacagatagatgactggcgagatattgcaatgcctaaggatcatacaaaaccgccaagagtaagaacattgggtgtcaatacaacactctccggctttggtcatgagaatgttgaaaaagtctactcagacaccatcatgtatgttgttattagtctcatcaacatcttcacctcatttttaatgagttaagcagcaatacttgtatttttctgaaatacggtatctcagtccttcagatgaccaaacaaagacagctgactccactgtcacgaagaagcgatctgcaggatttttgtttgatgaagagggcctatttaatgttgatgacgaaggacgaacagaaaagcagcagtgtgctgttgcagcctccaatataattcgcaatttctctttcatgccagaaaatgagactgttatggttcaacatagacactgcttggagactgtatttcagtgcttagaagaccaaaacactggtaaagttccaaattcaattatattctattttaaaaaccataaattaatatggaaatgaccgactacctcttttggttgtgttgtgccataatttttgcttttgacaggagatggcaggggataatccagctgtaatgtattaaaataagttaaaagagaattttacatagatctaaaggatataaaaaaattaccaacaaggaaaactttatagatagcaagaagtgtgttgcaaattattctatccaattgtctagggcaattcaatttcaagttgatgttaattgtgtgctaaatcaaataagttatttatcctaggaccaagttatgataacatgtaaactaaccttctattcatttttatcatgtaccggaagattatgagctcataacaaactaactttttatgcatttttatcatgtaacagaagatgatgagctcataacaaacatgcttgagacccttgttaatctagcacctgtcctggacctgagaatcttcagctcatcaaagccatcatttattaaaataacgtgagatcaaacttatgacaagttcttttcattttgttttcatagtgatgcctgatgctttactctgctttttcaccaataatacagtgagaaacgtgcagttcaatccataatgggcatgcttgcatcatcgattagggtgtggcattgtgctgctgctgaattaattgggcggctgataatcaatccagacaatgaaccatttcttcttccagccattccacaggtaaatcatttttaacttctagcatattgtttcaattttgttgatatgctatggagatggaccgaataaagctattcggttgtggatgataaaattctgtactttacattgctaaattttcatacagatatacaagagactagttgacctcttgagtgtgccagcagtcgatgcacaggcagctgctattagtgcgctgtacaatgtagcagaagtgaatatggacttccggctgaagcttgctagcgagcgatggtgatatctccttcattctattagatatagcacactgatatgagaacttaaattcaaactcttaaatttcgtattatttgaaccagggctgtcgatagactccttaaggtcgtgaagacgccacatcccgtgcctgaagtttgtaggaaagcatcaatgatagtggagagcctagtctctgagcctcaaaacaggatgcatctccttgtccatgagaatacttttgctgagatactcacgtcggaagggaaatactccgacacatttgcaaggattctatatgagctgactgcaaggccgagcaacaaagtgacagcagggcaagctatctgggggaacataaactgatgcatcattgtattgttaaaatctactagataagatgtactttagtagcttaggtacctgttatgttgaaaatgccttgggtttctgactgtatgtaacaagcttttagctgtatttagttgcagccttgcaagcttacattttaacgccttgatcttccttttctgaagtactacacttgcttccagagtttcagagtactatctatgatattttttgttaggcttggaatggctggtatatattgtagcatgttggtgttatgaatgctgctggaattttctgccaaatcgttttgctgtgcctagaatgagcaatagtctggtgtttcagtgaggttgttttgctcggctttctctgcagcccagcccgtggacaacgtctctggcaacaagaagaggccgttccggtacaatggatgttgccatgttggtatggatgccttcattttattttataccagtactactagctgtgaagtgtttgaagaggtcgtgtgtactcgtactctcgagtgccaagttgaaattttttcttttctgccgccaaggccaaaggggcgcaacttgcaaggaatctgggatcgttggttgacatcttaatttaaatatgttactcatgaacttgggaatctgggattaagataagataagcatacacgctccactaaccaattcaacacgctcactcattagccgcttatattgtttgggtcaagctaactgatacatctcctacggaatttcacatccgtgaaacagttgatatctcaacctggtaaaaaaaaactctatatctcagcgacgcattcataatcactacaactaatcacataaaattgaaaaaaataggtaacaccagagctttgtatagggcctgttcggctgcctgtgctacggctgtggcgcagccagcaccaacagtttcgcacacgcacgacacagcctcagctttagcaaccgcagccagcttgccgaccagacccataatttgctctgtttggcttaccttgctttttcttagaacccaaggtgattttgaattttaactttcaagaatgattttggctgagtttttttactcatcttttagcacctgtaaaagggagatctggacaaagtaggtggtgaagaaaacactctaaaattaatataaaatcaaaacttaaaatttaaaatcaactgtgttgcagctctcccatgatcaaccatcaacattgtcaatactaggaaacagcctggattaaaatggtagtctgaataatcataaaaataaatcctcagcgcttgttccaacctcagcacaagttgagcctaaattaaactgctggttttgttgaacgtgaaatttactatccaataattagcaagtgctccggagtgtgactgatcccacgtataccaagtcatgctcatgcttgctgccggtacatacattttttttttcttttggcacacactgtaccaagccgggttattgtcttgtcaggctagaaaagaaaaattaatcaactaagaccgacgactcgaaacatctatatatacacatccagtacaagcatcgtcaacaccgcatgcacaactactacaaccaaacaaattaaaccaagccatatcgatcgaattatcggtcaagagatggcagcttctgtcacctgcaagctacacccagggcactcgctaacgaggcaccactacggcggcgaggagggccatgcctgtgtctgtgcactgtgcgagcgcatcatcgccggcgccggctacaggtgcggcgagtgcggcggcttcgacgcccacgaggcctgcctctcgctgccgatgcgcgtcgcgttcgtcgggcaccccgcgcacgagctcacgctctccctcctcacggccagccggtggtgcgacgcctgcagggtggcctcccacgccgggcgctgcgtgtaccgctgcgtggcgtgcgacttcgacgtgcacgcgcggtgcacgtcgctgcttgacggcgagcagcagcatggtaggaagcgtggggtggcgaggcgcgtcggcatggcggctctcaggatggggttgttcgggctgcgcgtggcggacgcggtcaccggcgggttcgggtcgccggtgatcgaagtcattgagacggcgcttaatctctagacgatcgaaacagtgcacgcatgtgtgcgactggatttttttttcctcttctttgcgttaactgcaccatctgcactgcaaacttccacctatcacaatgtgctcacgattcgatcacaagtcgattttctttttttttttaaaaaaatgtagccgctggaagatttgtgcatgcaactatgctgtactcccttcatccgacaggtcttcggtgctgtgtgtcacactctcactccagcagctagcagtcgcgttgtcgaggtgattgttacggtctttcgtgttagcctttctaagcccggtagccccgtgcggcccaaaaaaaggcccaaccacctcgtaccctaaaggcctaaacatagccagtcggacgccgcgtcgcctcccccatcgccggctgatgccgtccttttcctcgcgcgccgctggtcctttctccagccgcgacccgcgaccccttccggcaacgttgcctgcggcggggagttttaccacctcgacgtattttccttcttctccgaacggcgtcccgatgccagggaattcaggctattccataattcgtctgttatttaatttaggtcatatttgaatgaacttgaagcgaaaaacgtccgagtgtctttcggctagctcaacaaagtggtggcacaactagaaaaatctttttttttgcatgcggccaaaaatcatttttccaggcagggaaaggtctgcctgtatataaacgcctgcgaaaaacatcgattttcgcaggcagccgaaaatcctcttgatgaacaaaaaaaatcgctaccaccccccacccgtgctgctactcacctccggtcgatctagggttagggttttgggaggtcgagggagaggaaggggaggtgaggggaagcatagccgctgctgaagggctgccaacgctggtggtggggggcgccgccgccgccaccgccctctcccttccttcggctggatctaggatggagggaaccgccgctgctgccctcccccggtctccatccggtcggatctgggaggggagccgcaccgggtgccgccgccgccccgcgccatggtcatccccgcgcctcgccgccgccgccctcccccggcctccctctggccggatctgggaggggaggggagccgcaccgggtgccgccgccgccccgcgctgtggttgtccccgccaccctcccctggcctccctttggccggatctgggaggggagccacgccgggtgccgccgccgccctcccccctcccccctccggctagatcagggagggagggaggggccggaggccgccgcggccgccatgtcgcgagggagccgccgctgcctccggccgg

SEQ ID NO: 7452 - DNA, 4486 bp, Oryza sativa
aggggaggggaggggaggggaggggagtgaggagggacgcaggagaggagtgagggagaatgaggacttagaaaaaatcggccctaggtcagctctatttatattccaagtctactttcataggcggatcacataagaggtccgcctgcgaaaatggatttcgtaggcggacagcgagcttcatctcggtttgcatttttgtaggcggctatttggctctgagggtcatgtccgcctccaaaaatgaatacccaacgtcggcgaaaatgatttttatagtagtgtgggctagctggtctggatttgaagtctcaccccttttatttataatattaggtcattttctaacattcactttttttaatggatttgaggccacatttgaagttttcgagtccaccggccggctagccatgagggggagagagagagagagagagagagaatgagcgcgccatcggcagggagaggcagccctctaccctgatcttggacatcgaaactgttgagttgtgaccagcttctgccagagcgaagcggaggcccgtcgttatccttttaggatttcaccttcatatatacttcttgtaagccgtcgttcggtgttgtaaccttaccccgatagagtgaagatattttgctaactgatgctcatagttttttctctcctgctttggaaagattttccacgttaaatctcgggtcttctatgattgatctattattttttatcgtttatttgcctatcgctttctaacaggagccgccgcacactccctcgacacatcggtagccaatgctacggatgatgtgctcgcatagggcgcccctcgccgccgtaacatatgtcaatggcgtaaccaggagattttccttgggcagtactagttcacaaatgcacatcacatactacaattttctacaccgaaaatatgatatacaagtacaaaactagtgaaaatatgatattattataatgtcttaaaacatcataagtggcttacttaacaagctaaaatgacacattcactaatcaatatccctgctcctcttcatgttttaccaatcctgcaaactgcaatgacacatttacttaacaaactgctctgcgctgatcttggacgtcgaagccgccgcacgcgcactcgacgcatcggtagccggcactgctgatgatgcactcggacagggcgcccctcgccgccatgctatctaaattcgggggcgtaacctggagatttgttgggtaacatgtggtgcacactcacatgttatactgaagtgacctacaggtacaatattatcttccaaaacaaagtgagtgaaagaggtgttgaaatataataataatgtcttataacatcgataagtggcttacttaacaagctaaaatccctgctcctcttcatgctttaccaatcctacaaactacaatgacacattcactaaacaataatcacaacttacaaattgtatattcagttattcacttattcacagactcacaaatcagaaatctatttttgaagccattacctacagagacataactactgagctagtcagccaaaggaaggggagtagaggcagttgttcactacctgcaggggaaggcgccgttccgttccgccggaattgaagcaaaggctgcatggctgcgggcaagcggccgaggcgccgagcgctgcagcgggagcgggaggctgtggtcgcttggctggccaagagcaccagagcggagatggctgtggaatgtcctgcagaaggcgccacgaggacggtgggtggtgtatccacggcggcacggcgcacgggtggcggtggtgcgacttgacacacgggtgtcgcctcgtcggcgactcggcaaccgcgcgtggtacgggcatcgggcgaagttgaagggaggaagacagggagtagcgttgtaacggctcgtccacccaggattgctaatccgcgcaaacgcgccagattagtacatcgcgagcgtttcctagttcgtagcttctcacactcttttttttttcgtttttccgccttttcggtttctttcaattctatatttatttgtaaagaggtgtgtgaatgattaaaaaaaataaaaaagaaacgaagaaaacacgcctaagatcagagaaaaaagtgcgaatacgcaaaaaaagaaaaggaccggcggaaggggatagctgatcgctggcgcgtatgcgcgcattagccatcccctcgtcctccactctcaacgtttttcttttttttaagggagggggggggggggagggggaggccccacctaaattggattaaaagaagtaagagaattacagaggaactatacaaagacgaggccaaaataaaagggaaaaactaaaagctacaaaagagataaagaacagcaactagagaagagcaagagaagcattaaacagcgatagccagagcgggaggagtgctttaagcggatgtttaaagcgatgtgcccagagctgagcatcctgaatacaacttctattgagccgagaaatggaggggggctggttctgaaagacaactttgtttcgatgattccacaggcgtcatcaacagagaatgaagaaggtattactctgaagagccgaaatgctgtccatcagggtgttggagtgaagcaaattcatagatgttataagggtgctacttgaatcatatcccagaaagctgaggccaggggacagttgaggaaaaggtgatcagtgtcttccgggcagctcttgcagagttcacagctcaacgtttttcttgggtttgggttgctaattttagtttggtctattggatttggttatttgggcctaattttttgaggtgtaggggatttcttggtcaaaattggggtagtcccgagcccacaaggactaccccagctacgtccttatgatgcttcgttaggtcgattgaacctaagctaccggagtatttctttttaccctatctctccctctgttatcctctgcgcgtctccatgacaccggcgatgtatgagagacgatgaagtcgatcctcacacaaaaacactaatacagtagcacacaacaatgtgaaaatttctgaaatttcaaacaatattggaccctgttccggccctctcctgtcggtctacacagtagcgctgcacagtgtacacgcggtcctggctcgcctgtgcatatgcggtcgggaagaaggtattgatcgtacgtacgtgtgcgagacggcgattgccgctgacccctctttttttatgtttagaactcattgagtaacctcgagtcgtcgctgaatgtttctgtatgcatgtaagctagcacaaggagcaagtagcaatacagtgagtgcacctatatactatgggccgcttcaattcgatcagtgcgtagagggaattaaaactgcctacatatcaggctcgatctcaaaattgacttacttgtaaattacactattagcgccagctgtttcatacatagttcgcgacgtggaaaaattcaacacatcttaaaagttaaaaccaatttcgatcagaacgaaaaaccgtaagctactaatagtacattgttcagaaatcagagttgacatatgaaccctttttaagtgcacgaggaaccctgtgaatgaagcacatatatcaaagctagcacaaacgtcaaatcatcaatagcttatcatggcagcagcgtccggcaatcagctgaccgagagccggacgcacttcgcccatccacagcacccgcttctcaagacacagtacggcggcggcgagcggcagccgagcagccgccacgtctgccgcatctgcgggactcgcgtcgtcgccggcgccggctaccgctgcgaccactgcgacttcgacatccacgaggcctgcgccgacttcttcccggagaaaatgataactccacctcccaacttcttcgggcatccgtggtcgcacaacctcgcgctcagacaggtcacggcggcggatggatcgtggccgtgcaccctgtgccgggggcccttccagcacggccacctcgcctaccgctgcggcgcgcggaggtgcgggttcgccgcgcacccgctgtgcacgatgctgccgggagagatccgcagcccgctccaccggaagcacgcgctcacccacaccgagctcatgctcatcccgtccggcccgtgcacacccgccgagatggcccgggtctgctccgtctgccgccgagactgctccaccgtgcgcacgcggcactaccgctgcgccgcctagctgcatgttcgtgctccacatcggcggctgcgtttccggcgtcccgccgccgccggcgccggccggcgaggaccagggtagcagtggtcctgacggcgcgaggggttcgtgcggcggagctgctgctgctccagcccccgccgtcgcgaggtttctcgtcgtggtcggagcagcagctggcggcggatttcccggctgccaatggcatggtggcggtcattaacgccc

SEQ ID NO: 7453 - DNA, 17817 bp, Oryza sativa
ccgtttatatatattaagtttgtgcgtaaagagtttctatacgtaaagtttccattcgaaatgtactatcgaatatttaagtactactaaatttctgaattaaattttaaaatatattaaaaaactctaatcaaaatgaccagatagaatggcgcattagccaatcttacagtacgcaacatagtaaaacaagaaaaattgtaaaatcatgctggtctattatagctaggagctaataacgtgcggtgcagcagcagcgcgcacatcgtgcgaaagaatcgtgcttttggagttctagagtttcacgataggctaaccaaatcaggaaagtttggatctgtttctccatgcacgcggtagacaaaactggaaattttgaatccgttcgcgtcttgtatatctcgcgtgcgtccgtgcagtagacctcccccgatgacgacgacaacaatacatcctgttgttgttgtttttaataagatgaacggacaaacatattataaaaagccaacggtgtcaaatattcagtaatgttaggagactgagggagtacattgttcagaaatcagagttgacacatgaaccctttttaagtgcacgaggcctgtgaacgaagggcatacagtatatcaaagctagcataaacaaatcatagcttaccatggcagcagcatccggcaatcacttgaccgagagccggacgcactttgcccatccacagcacccgcttatcaagacacagtacggcggcggcggcgagcggcagccgatcagcagccacgtctgccgcatctgcgggactcgatcgcgtcgtcaccggcgccggctaccgctgcgaccactgcgacttcgacatccacgaggccaaggcctgcgccaacttcttcccggagaaaatgattacacccccgcccaacttcttcgggcatccgtggtcgcacattaatctcacgctcagacagatcacggcggatcatggcgaacgaccctgtgccggggtcccttccagcacggccacctcgcctaccgctgcgcgccgcagcgttgcgggtgaattcgccgcgcaccccgttgcgcacgatgctgccgggagagatccgcagcccgctccaccgggagcacgcactcacccactccgggctcatctcgtcgtcgtcccagagcggcccgtgcacacccgccgagatggcccgggtctgctccgtctgccgccaagattgctccatatgcgcacgcggcactaccgctgcggcggcggctgcatgttcgtgcttcacatcggcggctgtgtttccggcgtcccgccgacgacgacgccggagcagagtagcagtggtcgtgaggacgacgtcggagctgctgctgctccagcccccgccatcgtcgcgaggtttctcgatcgtcgtggtcgcggactcgcggagcagcagctggcggcggatttccagctgccaatggcatggtggacgtctttaacgccctgtaagcttcgctgggctcgggtgattaattactagtagctatataaacgtacatccgagcgatttgtccagttacgtataagtatatacgcgtgtgcttgttgtctgtaataatcgcacaaaacattcttggcgtttgtcgtaacgagttcgatcatgcgaacgtgccagtttgaacacgtgacatatatagctataggcctatagcagccgagctagctagttaaagtatatatgtggaccgtttggtctttagtttcagaagattagtggtgaaaacgagcggtagatatacacggtcggattatgacattatcatatactagctcatatttttctttaaactcgaagccagatacaactagtgtgtcggataagatatcactcatcttatatcttatcttatactagttccttctaatcgaatttgagaacgtatatatatttgtaactctaatttatatgtattaaatataaggaaataattaattgttgaaagagatacatcagagaaaaaaatgtacaatattacattgtaactcgtaacatagtgattaaacaatcttttatcatgtttgtaagtggatttataatatattttcatatatgttttataatatggaacatacgggcgtatacaagtcttttttgtcgtaacacaattttttttacggattcggatttgtactcagatagtactaggtgtcacatttgtttttctcgtatattcttcctgcgagcctcggatcgggtgggtgatcgggaattacccatcccattttcatccctacgaaagatatgcaactatttgtatgtgtggtgaaatgattactccaaaaattctacaagtggtttccttttggtattatctaaaaatatttcacaagtattccaaaaataaagaaaaaaagatataactataggtgtaattacattatatatagttccatcgcaaaatgttgcaacctaggatagacttttgtttatgttcatggtcctaatttacaatattttgtgacggaaaaagtaacttttgtataacttatatgtaacttgtattttacttaagaaaaatgttggggcaggagctcatcgcggcgaggcggccgtggggggaggcgttccgggcgccggccttctccaagtcgcccagcgtcggggaggccatcgccaaggcaaggtggaacacggcctacttccgggcgaactacgcgctcgtcgtcgccgcgtcgtcgctgctctggcacccggggacgctcttcgcgctccacgccctctgcaccgcctagttcttcctctacttcgcgcggcccatgtcggcagcgggacaaccgctgcagctcttcgggatggagttcgaggacggcaccatcctcgccacgctcacaggggtcaccgtcgtcgcgctgctcttcaccaacgtcggctagaacagctgctccggccttgttgctccggcagtcgcggccaccgccaccgttcgccgccgtggcgcaaaaccctaccgccctccccggggcgttttccaacctctagatctcccgcggccccacggcgccgccgggcgagccgcgaggccttcacggatggcgatgccgccgccagccgcacggccctcctttcccggtagcccgcccttccaccagcccgccgttcaagcgtgcgccagttgcttcctcttcgcacacctcgacgccgtttggtgggactcccacggccgcgacggcacagccatgtgggttcggtgaccgagcgaggagccggaggaggaggaggaggaggccccggcgggcacccccgacaccgaggctaccgccgacatctccctggccatagccaccatcagcgagggccccgcggccatcgacgacgaggaggagagtggcgctagtgcccccagcatgtcagcctccccatcaccgtgctcctcgtcgttggccacctctcacccgttgctaacttcattgtcgggcgccgtcgccactgactccttgttgggagcgaagggaggaggagacagagagaagagaagggggaagtgggacccactatattttttaagttttatttgactgatatgtgggtccatatattttgttttaattttttaatctcaagtctaatgccacgtgggacgaggacaagtcacactatccacgtaggcgccacgtcaacccaaaccgtcatgggaccttatttgtacttggttttgggagttgagcgatacgtcatatctggtattatggttcggagatgaatttcgaactcgggacgaattgagagatctcgagtgaacttattcctctcattttgggtatcttgccaacgctggcctttgtagtttagtgggccgatcgagagtatgttagcaactcgggacgacaccgttcacaaaaaacaatccataaattaaactgctgtatattacaggagatcgaaccacacgttacgacgtgtgttgtggttttatcaagcacgcacggggaaactaactggagaagaagaaacttcagaggaaatgaaacgagaacacgcatgtcaagagctgatagagcctgatacgtacacacatgacaacaagcatatatacgtgtgcatatatactgatcaaattatgtgaaaatcactcctgatcatccaaggccgtggcaaggacatcgagcaccgttgttgccagcgcgccggttgctgcgttgatcgcgatgttgagacttgtcctgaggaggaacttggcgatacgagtggcgcggctcgagcccggcgtagcagcagcagcaccagcaccagcgttgtgagaacggctggtgtcaccttggccagcgtttgccgcgccagaggggcacacgacgtgcagcttatagaggcaaaattcacagcggtagtgccacatgttcaggccttgatgacacgctgagcatgtcccccatgaaggggccatgttgagatcatgctgcgggtgaagcgggctacggatcgtctgcagcagcagcgtgcacagtgggtgagcgtcgaaaccgcactgtgcgcagcggtagacgaagcttccccggggacagctttccgtgcagaggttgcacgaccacctgttggtatcgtcgtcggggatggtgctgagcgtgagggtgtgccacgggtgggcgaagaaggagactgtctcctcgaagtaatcggcgcaggcgtcgtggatgtcgatgtcgcaggtgttgcagcggtagccgaccatgccggcgacgttggttcggcagatgtcgcagaaatggctcgaggtggtgctgtagtgcgtccggagaagcaggtgttgcggatgggcgaagtgccttcgctgcctagtcgccatgtttcagttgaaatttttcgctttgtgcttttatatgcttcgtgtatagaaacgctccagacggagagtttcacagtttagggggtgtttgggacaccccgttagtctggctttggcatgcctctgaggagttcattacacatttatactacacgcagaatctacaagcacgatggaccagttcactacccatcatatattcctagtaccagcttgagtgtgacaggccggcctgtcactggctgttcgtctttaagatatatattccctcatttcctaaatgtttgacgccgttaacttttttaaacatatttgaccgttcgttttattcaaaaacttttctgaaatgtgtaaaactatatgtatacgtaaaagtatatttaacaataaatcaaatgataataaaagaattaataattacttaaattttttgaataaaacgaacggtcaataatttaaaaaaaaatcaacggcgtcaaacattttaggatggagggagtatatgcatttgttgttcaagatatatagagacttcacgcctcggaccaagcttggaaagttggaatatggactcggtccatccaatcacagccgaattcaccatctgctactacgtttaattcagtggattctgagattctcattcctcaaacatgttaatttaattacttaaggaagataaaagtacattatctccggccgcgccctggtcgacatgcaaattaacgtattatagcactaatattgtgcaggtctctcgatatactacttaatttaccgactaatttccgaaagggcagataatcaaggcatgttcagggttcaatataactgatgcaaaagctatcacggaatttataaaaagagaaacactgttgctcgtatcgttaggaaacaccagtgttagctgctttgatcagatttgtccacggttttgcaaggcagcattaattttacatgttacattttgtttgaccataattttctaataagtattgaaccaccacaggaagatcatattatacattttatagacattgttaaaatagttgccaagttcagttggacaatgagaaaaaaaaaatactaaatccgtcccaaattagatgttttgactttttttttttgcctgcaacgtttcaccattcgtcttatttaaaaatttgtccaaatataaaaaagataagtcatacttaaaatacatttgataataaaataagtcacaaacaaaataaataataattttataatttttgaataaaacgaatggtcaaatgttaaaaaaaaatcaaaacgacaagtattatgagacacatatctagctagcatattgatttcaacactattgatgacccaattcaaattgctcaattacaataacctcgcaaagtcataactagcagcacgacaaaaaagagttggcctcaagcaaataatttagagagatggagtacattgtttcacaaggaatataaacgatgtgactatcagcaaggtctgagtacataaggcgagcacatacaatttgacatcaaaattaaacaacgagagaatgattcatgcttatataattatcaccaagtaggcagcaaaaactatatcatacatgagctgtaaaacaaaattgtacttcatccgtttcacaacgtaagtcattctagtatttcccatattcatattatattaataaatctagatagatatatatgtctagattcattaatattaatataaatgtggaaaatgatagaataatttatattgtgaaacggagggagtataggctagctcaccatatatatcgatcagttaacaaaggcacactactagaaagtcagcgcgccctttggcgcgccagctagctaacccttacgtgcatgtcaaaaattagatactccattatatattgtaaaaataaaatatccttttttttcttcaaaattagtagtatctctttatttaacttgtgttttctctcatttctacagtctacataaaccaggaacataattatcagtaccctcaaataagcaacatttttttcagccactagttgacgttaccctttgttatattttttttgaatatattaacattaaaagataaaataaagagtaaattttataaaactacagatactttaatcaatctatcctacagatttaataacgtatcacaaaattacagatttaacatcatatttttcgtaaaattatagatttaaggtatggtatcagacaatgatagatttaacatcacttttatcacaaaactacaactttcgtaacaccaatagtgctatgatataaactctaaaatctgtagttctttaataacttcaccactaaatctgtagttttgtgatatgatgtttcaaatctgtagttttgtgatatgtttggtgctaaatttatagttttgtgatacatatgtttaaatatgttgacagtttgatcaaagtatatgtaggtttgtgaaatttactctaaaataaaatatatgattttagttatgcatagacgcctgcatgccggtctataaacttagtgagtatgcttgtttgtcaagtgctgtgaaatactaatattagtagcatttgtctttgttatagtcacatctaccatctgttaaatctgttacgatcacaagtctactcaaggcctctttagatcccctggcaaaattttataccctatcatatcgaatgttaatttggacacatgtatggagtattaaatataaacgaacaaataactaattacacagattgcgtgtaaattgcgagacaaatattttaagcctgattgcatcatgatttgacaatgtggtgctacaataaacatttgctaatgacggattaattaggcctaatgaattcgtctcgcggtttacaggcggattctgtaatttgttttgttattagactacgtgtaatacttcaaatgtgtgtccgtatatccgatgtgacacgccaaaactttacacccctgaatctaaacacaacctcagtatctaatcttttggtccgtagactgatgtgactttcattcatggtctctctcagctgcacccaatgctatcagtatcagaatactaggtagtatcattttgctcaaagtaatatcgtatcatagtatcaggatactataagattttccttttttaagttcaattaatatttgtattaattacatatagccattatacataaaaaaatagtaatgatatatgtcatacaaataaagatatttatcaagagaaaccacattagttttgatatatttaactgattttttataaacttgagtatatttatttacattattttcaaaccatcttattttaaataatattttgttggatcgtaaaggatcgtagaatcggaatactacctaagattttataggatcgtgtagtaataaatagatcgagatagcacgaaaattagaatactagataggatcggtatcgtttgtgcttgacaaccttgactgcacctacttctgatcttaacgcgctcacgtatctcttataccgaatcatgggtcaattctcaatcggttaaccctgacacgtggcacttccagatacacgtatttggggcctgttcactttgatgccaaaaaaagccttaccaaattttagcattgcaatgccaaaattttagcatagttgccaaaattttgatatagttaccaaaatttggtagcaaactaaatgtagccacttttttggtaactttaccaaaatttggtaaggttgaaaatggcatcaaagtgaacagacccttagtttccaccggccaacacgcagaacgtgcgactcacctccacgcgctcatgcttgtgcccgtaaggcagctgggccgctctacatgttgactagggggaaaaagtacaccgaacgtccctcaacttgtcatcaagttacaaaatcgtcctccaacagcaaaaccagatacacaacatccctcaatttacagaaaccgttcactttagatcctctggtggttttgaccccgattttgtcctacgtggcgttgagtcaacgtgaaacccatgtgggccccacatatcagtgtggccacgtcatcaccctctctttccccttctctatctctcacacttttctcctctctccccaccgcgccgcgcctccctcccggtgctcgctctcctcctcctcctccacttccgcgtcctcgccgctaccgcggggtcccacttctcccctggcggtctcccgccttgtaggccgctctcctcctcgttaacatctgacgacgttggcagtggtggagaaggctggcgcggagggcgatgtgacggcctgcgacgtgaagtgttatgtgttattaatgtgttcttagatgtgtcatgtgttctgtgctgtgttcatgacgttcttgacatgttcttgaagttcttgatttgtgttcttgatgtgcttggcttgattcgtgcttgggtcagcttgattcgagccgagccggtatttttttttgggcttgttcatctttctaggtgccggttctaaaccgtcgacacctatttggtttcatatctgtgctgcctgcgaggtgtcggttgccaaatccggcacatatgtggggttggcaaccggcaccaaaagatctttatgtagtagtagaactcgttacgacaaaccccaagaatgttttgtgtgattatattattacagataacacgttgaaacagcactcgcgtgttatacgtacgtactccctctgtacttgtagaggaagtcgttttggacagtgacacggtctctaaaacacaactttgacttcttgtttctacaaaagtatctattgaaaagtgatatatgtatacttctagtaaagtatttttcaaggtaaacctatttatataatttttaaatttttaaactcaataactcaataacttgatttaaacattgtcataaacgaattgtagtatacgtaactgacaaatcgctcggacgaaagttcagctggctagctgtaccagtaattaatcgttcgagctcaacgaagcttgcagggcgttaatgaccgccaccatgccattggcagccgggaaatccgccgccagctgctgctccgcgaccacgacgagaaacctcgcgacggcgggggctggagcagcagcagctccgccgcacgaacccctcgcgccgtcaggaccactgctaccctggtcctcgccggccggcgccggcggcggcgggacgccggaaacgcagccgccgatgtggagcacgaacatgcagctaggcggcgcagcggtagtgccgcgtgcgcacggtggagcagtctcggcggcagacggagcagacccgggccatctcggcgggtgtgcacgggccggacgggatgagcatgagctcggtgtgggtgagcgcgtgcttccggtggagcgggctgcggatctctcccggcagcatcgtgcacagcgggtgcgcggcgaacccgcacctccgcgcgccgcagcggtaggcgaggtggccgtgctggaagggcccccggcacagggtgcacggccacgatccatccgccgccgtgacctgtctgagcgcgaggttgtgcgaccacggatgcccgaagaagttgggaggtggagttatcattttctccgggaagaagtcggcgcaggcctcgtggatgtcgaagtcgcagtggtcgcagcggtagccggcgccggcgacgacgcgagtcccgcagatgcggcagacgtggcggctgctcggctgccgctcgccgccaccgtactgtgtcttgagaagcgggtgctgtggatgggcgaagtgcgtccggctctcggtcagctgattgccggacgctgctgccatgataagctattgatgatttgacgtttgtgctagctttgatatatgtgcttcattcacagggttcctcgtgcacttaaaaagggttcatatgtcaactctgatttctgaacaatgtactattagtagcttacggtttttcgttctgatcgaaattggttttaacttttaagatgtgttgaactatgtatgaaacagctggcgctaatagtgtaatttacaagtaaagtcaattttgagatcgagcctgatatgtaggcagttttaattccctctacgcactgatcgaattgaagcggcccatagtatataggtgcactcactgtattgctacttgctccttgtgctagcttacatgcatacagaaacattcagcgacgactcgaggttactcaatgagttctaaacataaaaaaagaggggtcagcggcaatcgccgtctcgcacacgtacgtacgatcaataccttcttcccgaccgcatatgcacaggcgagccaggaccgcgtgtacactgtgcagcgctactgtgtagaccgacaggagagggccggaacagggtccaatattgtttgaaatttcagaaattttcacattgttgtgtgctactgtattagtgtttttgtgcgaggatcgacttcatcgtctctcatacgtcgccggtgtcatggaggcgcgcagaggataacagagggagagatagggtaaaaagaaatactccggtagcttaggttcaatcgacctaacgaagcatcataaggacgtagctggggtagtccttgtggactcgggactaccccaattttgaccaagaaatcccctacacctcataaaaaattaggcccaaataatcaaatccaatagaccaaactaaaattagcaacccaaacccaagaaaaacgttgagctgtgaactctgcaagagctgcccggaagacactgatcaccttttcctcaactgtcccctggcctcagctttctgggatatgattcaagtagcacccttataacatctatgaatttgcttcactccaacaccctgatggacaacatttcggctcttcagagtaataccttcttcattctctgttgctgacgcctgtggaatcatcgaaacaaagttgtctttcagaaccagccccccttcatttctcggctcaatagaagttgtattcaggatgctcagctctgggcacatcgctttaaaccttcgcttaaagcactcctcccgctctggctatcgctgtttaatgcttctcttgctcttctctagttgctgttctttagctcttttgtagcttttagttttcccccttttattttggcctcgtctttgtatagttcctctgtaattctcttacttcttttaatccaatttaggtggggcctccccccaccccccccctcccttaaaaaaaagaaaaacgttgagggcctattcggaacacaggaaaaggaaaaacacaggataggaaaaacgtaggaatatgaaaggaaatcacgttgaaaacataggattgaaaaacgcaggaatataaaagttgagagcattcggtttacaggaaaggaaataaaaagtaatcgaggagtaatctgtatactgtatttattatctaccgctatcttgcttatcccgtctgtcttgcttattatctagtggctgttttattgcttgattggcttgattctctcaaagggaatgaaacaagagattggagtggatggaattttcctccgtttttcctgtggaatcagcagcaaaggattttttcctacagttttcccataaccactttttacgatccgaacgataggataggaaaaaatcccatgtgaacagtattcctatgaaattcccgggaaaagcctccaatccgaatgagccctgagagtggaggatgaggggatggctaatgcgcgcatacgcgccagctaaatcgctggcgcgcacgccagctatccccttccgccggtccttttctttttttgcgtattcgcacttttttctctgatcttaggcgtgttttcttcgtttcttttttatttttttaatcattcacacacctctttacaaataaatatagaattgaaagaaaccaaaaaggcggaaaaacgaaaaaaaaagagtgtgagaagctacgaactaggaaacgctcgcgatttactaatctggcgcgtttgcgcggattagcaatcctgggtggacgagccgttacaacgctactccctactccctgtcttcctcccttcaacttcgcccgatgcccgtaccacgcgcggttgccgagtcgccgacgaggcgacacccgtgtgtcaagtcgcaccaccgccacccgtgcgccgtgccgccgtggatacaccacccaccgtcctcgtggcgccttctgcaggacgttccacagccatctccgctctggtgctcttggccagccaagcgaccacagcctcccgctcccgctgcagcgctcggcgcctcggccgcttgcccgcagccatgcagcctttgcttcaattccggcggaacggaacggcgccttcccctgcaggtagtgaacaactgcctctactccccttcctttggctgactagctcagtagttatgtctctgtaggtaatggcttcaaaaatagatttctgatttgtgagtctgtgaataagtgaataactgaatatacaatttgtaagttgtgattattgtttagtgaatgtgtcattgtagtttgtaggattggtaaagcatgaagaggagcagggattttagcttgttaagtaagccacttatcgatgttataagacattattattatatttctaacatattttcactaattttgttcttgtatatgatatcttaggtgtagaaaattttagtatatgatgtgaatttgtaaactatgactacccaaggaaaatctcctggctacgccactgtattgatatattatggcggcgaggggcgccctgtccgagtgcatcatcagcagtgccggctaccgatgcgtcgagtgcgcgtgcggcggcttcgacgtccaagatcagcgcagagcagtttgttaagtaaatgtgtcattgcagtttgcaggattggtaaaacatgaagaggagcagggatattgattagtgaatgtgtcattttagcttgttaagtaagccacttatgatgttttaagacattataataatatcatattttcactagttttgtacttgtatatcatattttcggtgtagaaaattgtagtatgtgatgtgcatttgtgaactagtactgcccaaggaaaatctcctggttacaccattgacatatgttacggcggcgaggggcgccctatgcaagcgcatcatccgtagcattggctaccgatgtgtcgagggagtgtgcggcggctcctgttaggaagcgataggcaaataaacgataaaaaataatagatcaatcatagaagacccgagatttaacgtggaaaatcttttcaaagcaggagagaaaaaactatgagcatcagttagcaaaatatcttcactttatcggggtaaggttacaacaccgaacgacggcttacaagaagtatatatgaaggtgaaatcctaaaaggataacgacgggcctccgcttcgctctggcagaagctggtcacaactcaacagtttcaatgtccaagatcagggtagagggctgcctctccctgccgatggcgcgctcattctctctctctctctctctctccccctcatggctagccggccggtggactcgaaaacttcaaatgtggcctcaaatccattaaaaaaagtgaatgttagaaaatgaactaatattataaataaaaggggtgagacttcaaatccagaccagccagcccacactactataaaaatcattttcgccgacgttgggtattcatttttggaggcggacatgaccctcagagccaaatagccgcctacaaaaatgcaaaccgagatgaagctcgctgtccgcctacgaaatccattttcgcaggcggacctcttatgtggtccgcctacgaaagtagacttggaatataaatagagctaacctagggccgattttttctaagtcctcattctccctcactcctctcctgcgtccctcctcactcccctcccctccccttccctcctctcaccggccgccggccggaggcagcggcggctccctcgcgacatggcggccgcggcggcctccggcccctccctccctccctgatctagccggaggggggcggggggagggcggcagcggcacccggcgtggctcccctcccagatccggccggagggaggccgggggagggcggctgcggcgaggcgcggggatgaccatggcgcggggcggcggcggcacccggtgcggctcccctcccagatccgaccggatggagaccgggggagggcggcagcggcggttccctctatcctagatccagccgaaggaagggagagggcggtggcggcggcggcgccccccaccaccagcgtcggcggcccttcagcagcggttatgcttcccctcacctccccttcctctccctcgacctcccaaaaccctaaccctagatcgaccgaaggtgagtagcagcacgggtggggggtggtagtgattttttttgttcatcaagaggattttcggccgcctgcgaaaatcgatgtttttcgcaggcatttatatacaggcggacctttccctgcctggaaaaatgatttttggccgcatgcaaaaaaaaaagatttttctagtagtgccaccactttgttgagctagccgaaaaacactctggacgtttttcgcttcaagttcattcaaatatgacctaaattaaataacagacgaattatggaatagcctgaattccctggcatcgggacgccgttcggagaagaaggaaaatacgtcgaggtggtaaaactccccgccgcaggcaacgttgccggaaggggtcgcgggtcgcggctggagaaaggaccagcggcgcgcgaggaaaaggacggcatcagccggcgatgggggaggcgacgcggcgtccgactggctatgtttaggcctttagggtacgaggtggttgggcctttttttgggccgcacggggctaccgggcttagaaaggctaacacgaaagaccgtaacaatcacctcgacaacgcgactgctagctgctggagtgagagtgtgacacacagcaccgaagacctgtcggatgaagggagtacagcatagttgcatgcacaaatcttccagcggctacatttttttttaaaaaaaaaagaaaatcgacttgtgatcgaatcgtgagcacattgtgataggtggaagtttgcagtgcagatggtgcagttaacgcaaagaagaggaaaaaaaaaatccagttgcacacatgcgtgcactgtttcgatcgtctagagattaagcgccgtctcaatgacttcgatcaccggcgacccgaacccgccggtgaccgcgtccgccacgcgcagcccgaacaaccccatcctgagagccgccatgccgacgcgcctcgccaccccacgcttcctaccatgctgctgctcgccgtcaagcagcgacgtgcaccgcgcgtgcacgtcgaagtcgcacgccacgcagcggtacacgcagcgcccggcgtgggaggccaccctgcaggcgtcgcaccaccggctggccgtgaggagggagagcgtgagctcgtgcgcggggtgcccgacgaacgcgacgcgcatcggcagcgagaggcaggcctcgtgggcgtcgaagccgccgcactcgccgcacctgtagccggagccggcgatgatgcgctcgcacagtgcacagacacaggcatggccctcctcgccgccgtagtggtgcctctttaacgagtgccctgggtgtagcttgcaggtgacagaagctgccatctcttgaccgataattcgatcgatatggcttggtttaatttgtttggttgtagtagttgtgcatgcggtgttgacgatgcttgtactggatgtgtatatatagatgtttcgagtcgtcggtcttagttgattaatttttcttttctagcctgacaagacaataacccggcttggtacagtgtgtgccaaaagaaaaaaaaaatgtatgtaccggcagcaagcatgagcatgacttggtatacgtgggatcagtcacactccggagcacttgctaattattggatagtaaatttcacgttcaacaaaaccagcagtttaatttaggctcaacttgtgctgaggttggaacaagcgctgaggatttatttttatgattattcagactaccattttaatccaggctgtttcgtaatgtctcaagagcataggggctagtcggcgcgctatgggtatcctagtattgacaatgttgatggttgatcatgggagagctgcaacacagttgattttaaattttaagttttgattttatattaattttagggtgttttcttcaccacctactttgtccagatctcccttttacaggtgctaaaagatgagtaaaaaaactcagccaaaatcattcttgaaagttaaaattcaaaatcaccttgggttctaagaaaaagcaaggtaagccaaacagagcaaattatgggtctggtcggcaagctggctgcggttgctaaagctgaggctgcgtcgtgcgtgtgcaacactgttggtgctggctgtgccacagccgtagcacaggcagccgaacaggccctatacaaagctctggtgttacctatttttttcaattttatgtgattagttgtagtgattatgaatgcgtcgctgagatatagagttttttttttaccaggttgagatatctactgtttcacggatgtgaaattccgtagatgtatctgttagcttgacccaaacaatataagcggctaatgagtgagcgtgttgaattggttagtggagcgtgtatgcttatcttatcttaatcccagattcccaagttcatgagtaacatatttaaattaagatgtcaaccaacgatcccagattccttgcaagttgcgcccctttggccttggcggcagaaaagaaaaaatttcaacttggcactcgagagtaggagtacacatgacctcttcaaacacttcacagctagtagtactggtataaaata

SEQ ID NO: 7454 - DNA, 829 bp, Oryza sativa
gcccaattattcagcagcagcacaatgccacaccctaatcgatgatgcaagcatgcccattatggcttgaactgcacgtttctcactgtattattggggaaaaagcagagtaaagcatcaggcatcactatgaaaacaaaatgaaaagaacttgtgataagtttgatctcacgttattttaataaatgatggctttgatgagctgaagattctcaggtccaggacaggtgctagattaacaagggtctcaagcatgtttgttatgagctcatcatcttctgttacatgataaaaatgcataaaaagttagtttgttatgagctcataatcttctggtacatgataaaaatgaatagaaggttagtttacatgttatcataacttggtcctaggataaataacttatttgatttagcacacaattaacatcaacttgaaattgaattgccctagacaattggatagaataatttgcaacacacttcttgctatctataaagttttccttgttggtaatttttttatatcctttagatctatgtaaaattctcttttaacttattttaatacattacagctggattatcccctaccatctcctgtcaaaagcaaaaattatggcacaacacaaccaaaagaggtagtcggtcatttccatattaatttatggtttttaaaatagaatataattgaatttggaactttaccagtgttttggtcttctaagcactgaaatacagtctccaaccagtgtctatgttgaaccataacagtctcattttctggcatgaaagagaaattgcgaattatattggaggctgcaacagca

SEQ ID NO: 7455 - DNA, 15674 bp, Oryza sativa
tgcagatcgcttcttcgtgacagtagagtcagctgtctttgtttggtcatctgaaggactgagataccgtatttcagaaaaatacaagtattgctgcttaactcattaaaaatgaggtgaagatgttgatgagactaataacaacatacgtggtggtgtctgagtagactttttcaacattctcatgaccaaagccggagagtgttgtattgacacccaatgttcttactcttggcggttttgtatgatccttaggcattgcaatatctcgccagtcatctatctgtacaaaatggaaatgcatcaaacagaatgcagaaataaagtcctaataagcgtatccgtacatgatcaccatatcatttcttttctggatgaaaattgatcagtgcattgtttaaaaaatttagttatttagcaaatttagtcatatcaaagaagcacggtagtccaattaaataaagcgatgctttggccaccaaccaattaagtgtaagtgcaaatatcggaacctttatttacgtttctatggctacagtggacaacaatgccagtcctggatattgcatgagatcatcacattttcatcaatgtctggatattgtgggcaagattctggtggcaagggaataggagcgagaggcatgaagccaagatcctggagacctggaccatggcgcttgggcaccattgtgcaggaggaagacaggaggtacacggaagttcgcagagaagcagggggtagggtaactattctagtttgccttcaagtagcgatagtcccatccttaagtaggaggattgcctaacaacttctgcagattaaacgaaagaataatttgcgaacaaaaagtaaagataaatcagtctcacaatccatgtcctgatcctactggtctggaaccaggtggctgcggccactggaggcatcaacagtactggaggtccaccataaaaaatgaatagggtgatgattgactgactaattattttctaaaatgaactctgattcaaattgatcaattaatgcatgctagaggaattgggaaacatgatttttggcttcagaagatatgcatcattccataacatatagatcaaattggaaggggggaagttaacattaagaacctacaacttgaaggagagcgtccaagagcccaggaactttagcaagaggtgttgtatcccgccggagatcatccttctccttaaatgagagtactgtaagggcgttcaatgcccatagtatctcactcttcaacccactttgcaatgcaagaacaattcttttattgttctgatctgaaaagtccacaaagaaacataaactctccttcttagtaaccatgtcgacagtacatgttaagtgtgcagaaaaaaggagtgcctgtgcatttcaagctcatgacacatatgtgaggtagcatctctattgaatgagccaatatgaacagggaaaaaaatctaggtaaagaaaatatacaggccatcgcttttacatctgaaatgatgaagacaactacaccacgattgtttgtccccattgtttccaatgttcgtcatagactcatatgattactagtgtactacccataaatcacgccgttcttgacggccaatttgacgaccagtcccatctagctaagcaaagccttattcaatactaaaaacattggtcctctatttccctgttaggtcagcagtccaataagcaaatcctcgatgcaaggtatattcagcgtcccaatttcaatttcaacaccaggcacataatcatcagaccaaaaaccctaatcccccttcccgcaacaaagtcgtctccgaagacacgcaggaagaactaatccaaaagctgtgccctagacatcatcacaaggtcgttgcggacttgcaggcgaagaagaagctcactcaccggagagtgctgtgaggacttggagggacggcccaaccagcgcggccggcgccgccgcgtcgccgattgcagccgccgcggccgcggccgccgccccgctgccggtggtgcttccgaaggggcgcccgcgcttcgccggcgtggagccgccgcccccgccggacttgcccgccggggcggacctcacgtgggacatgatgagggttcagcagctgaaccccaaattattttgggaacaagaatggtgtcagcaaagagaaaaaggtttccagatctagaagagaaggtgtgggtaatgaaagatagagagagaggatgagcgtatggggttctcaccggcgaggctgcggcggaagcagcaggacggcggcgcgccgctgctcgccggatggagataggggcgctgctcggcgcaggcggcgggcgaactcgcgtcgcgaggagagcctcgaggccgccgagggaggagacggggagatcgactagggagtgagaaactcagcaggcataggccaattcttctgggccatgcgcatcatgggctttctaggcccaggtatcaggtccactacagcccagttgaaacaaatcagagtaaaggtcctctctgcacacggaaaagatcctccgacttaatttcctccaactttaaatcactgacatgcgatccgttgaatagagagtccacctatcaatgaaccatgtcagagggaagtaaatctgaagatctcaaatcccgattgactgaccacggctcagaacaacacaatttgaaatactacattatagtaaattatctacacgattacatctatatatatatatattaaaattttaatataaataaacttaacgtatgctagattaagggatctaatcaatacaatagaacaatattttttagaaaaaaatattattagaggcatgaagctaataatccagtataataatctaatgaagcaggggcttaactgttcttatgctttatttagcgctgctccaaattttacatctatgcaactctagatcattgatttctaagtttagtgatactttgactatttaaatcttgaatttagagttatgtcaagcaaaaccttaagtacgcttcgaattgaagcgtttaccaggatcaaccatgagaaaataaaagtagagaaggcgtggatggtcagaaacgagaggatcgatcatccacattatgcatatggatctagtggtggagacaactctcaagtaggttaggcaaccgccaaagcttcatagttgacgtctctactaccaactaccgttaatatatatataaattagtggcttcactgtcagtatctctccaccaccaactaccgttaatatgtataaaaattagttgattactagaaaacaatattaattgtctgtacttgacggtgtcactagctccaccactgtctaggcctagccattcactgtgtgcgaaagggataagatagggaagaagatcactcatactcccaaagcatatggaagtttcaagactaacatataaaatacttcctccgttagaaaatataagatgtgcatgtattttaagaatcaaattccggcatcactaaattcatatgtactatacaggaatctttgaaaaaaaatggtggttgaagtttgatgatagaaacagtgcccaatcaagccacacattatatttttgaatggagggagcagtatacatatagagaaaagagacaattaattgcagcaaaaatataaatgctccttgttgcaagtttttcgcacaaccgcgtgtataagtttttatttttctaaaaaattacccattaccatttatgagcattactaaaatttcacaatgtttagtacaaattcattattttgccacaaaactgtgttaaaatttataatttgactccatcttattttcttttttttctcttgttctggtctcttcactgttctccaccagttcaagctatctgttcactctatttcatacctttttagatttgtcctaaatcaaacttcttaaattttaactaagttgatagtaaaatgtaacaatgtgtacaacaccataacaccataggaaccaccaaattgaaacagttcacaacatatcacgagaaaagaataacaagctgttattgaagaagcaaacgctgacttctaaatgccatttcagcctagatcttttaatacttgatataattaaagataaatggattatttgtttcagataaagtctttggacgtatggaaacgacgatacagccaagacgccaagtattgtcacaataaatcctatcacaatatcatcacactagttgaaattcctcttgttgattttaggtggtcttgaacgacattgttttgtgagtagaagaaagtaacacatgggacgagcggcttaatacaatttaatttgcatcgacatcccttataatttttacatcacaactacaaacatacggcgaaacgacacacgcaccaaaaaaaaaaaaaactgtgtagtagtaaattaacctattaagcagcgcatctataatcgatacacagtgcgtcaccttgcttgcgtgttctacttagattttgtcaatcgcccggcggactatgggagcgattaccagcgatcccacggtcgccaacccgccggtcgttccgacatccaccgcggtcaaaccgacggcgacgccgatcttgagagcaaccttcgcggcgcgtacccccacgctccgtttctcctccccctcctgctgctgcggcggctgcggctgctggtgtgcgccgtccaacacaggcgtgcaccgagggtgcgcgctgaagttgcacggcgcgcaggcgtacatgcggcacccggcgtgggagatcacgtcgcagacgttgcaccaccggctgcccgtcaggcgggtgagcgtgagctcgtgctcgtggcgctcgtgcagggcgaaggacgccgggagggcgaggcagctccggtggacgtggaagtcgcactcgccgtgctcgcagcggtagccgtcgccggtgacgacgcgctcgcacgcggcgcaggggttgcccgaccccgaacccgacccctcgccgtagtggtgctcggttaccaagtgctctgggtggtagaagcagctaacacctgccatctcgtgatatatcgattttgctaggtgctgcgtacgtgtgggctggctggctcgtggttttgtttgatttgatcctagtacttttggctgtccaggtagtagtggtgcatgctctcggagacacgtatgagagtatatatataggacctctttatcactgctcgggatccagagtttgaatattttaagggcttgctcggatcacaggataggaaaaacataggaatagaaaaaacatagaaataatataggattgcatatgcaaaatgtgggattgaaaaacaaaagaatttgatagtacgaagcgttcggaacacaggaatatataaaccacaggaattttccaattaatattaatctcatatattatagtataattaagcaataaaatattagttcccatctagtcactccaacgtgattagcatctatcccatggtagctaatggaaaaaaaatcccatggtagctaatggaaaaaaatgaggtgtgagtggatgttcagaatcctatgaaattcctacgttttcacatgttgctatagtattcctatgaaaatcctgtgcatggttcctatgaaacgaatgcataaacagtgccaaatccaaaggaattgccaatcctacgaaaatcctgtgtaattcctccgttccgaacaagcccttagctccacaaaattatagacgtggatttatgattacgttgataacatttgagtaaattatcttattttctttttgatgaaatttaaaattctaaacaactactccgtagtatatttaacatacataccattaaatctagactttctatgcatcgtttttcagagtgttttttttattaaatcgcaaggcaaccttgaagaacttccctttttgagagaaaccctgtacgtgcagtagaacgtgtcaaaagaaccaacaaactgcagctgcatgcaagcctgcaacgcaagaggcaagcacacggatgctacagtctacacgtaacttaagaacacttgctatctgtcctcgtcaataaattgatgtcaacgaatcgaacagtttaattatcaacaatttgtgtttgcgttgtgcacttgaatttttcttcatattaatttatatgccaatgcgcttaactttttgtgtattcactaaagacttatacatcgaactgcaagcatatgcgtgcgagacttggttcacgtgatcaaccaccagagcaagtttaatagtacagtcaacttagctccaaatcatctatagctaatataatagctaattcatacaatagttgcttactatactattaatacctggtcccacctgtcatacacacattacgttttggagtccgtgttgtagctagctacagatctgtagcccgctgctcttctctcttcatttatttctttaaaatatgtttatagctggcttatagcctgctattgtatctgctctcatactctggagtaggggatgtactccctctgtactcgtaaagaaagtcattttggacagcggcacggtctccaaaacacaactttgactttttatttctataaaaatatttattgaaaagtgatatatgtatacttttgtgaaagtatttttcaatacaaatctattcatataatttttacattttcaaactcaacaacttgagagttattcatgatttatattcccaaggtttgacttaaacattatcccaaacgacttcctttacgaatacggagggagtagtaattaaaggtgtcggtgatatgggaccgggagtattgcgcccggaggcttgaggcagatggaatcgcccacgtggcctggcaccttcggggacgtcgggcccgagggtgaggtgtccgccctcctcctgatttccccgagggggggtcgggttgctcttgccccggccccgagggccgaggtgccccgaccccctgtggggtttgcactatgtacataggttgggtgaacacggtagggctcacctaaccgcatttattgcggtctggtcaagcgtgtcacgctgcatgcagcgcaatgcagcgcgctcttttatccggtctgtgaccagtcacagaccggtcggatcaacggttaggtggcgactggcggtctgacgcacgcctcgccccgtcccgtcaagacgagagcctctaggcacacgtctccagccggagctagcgtgttacctcttagagatggcacgttagccctggttagatgaataccaggcttcatcccaaccattacaggcaagatgctacaaaaagaagggtgatcatgcagatcgctgaactgacgcatagaggacaagaatgaccgatctgtgaccggtctgacactggtcgcgtcagcaacagacagccacgatcccacgttgcgcctgtctccgccgggagtggaggtaggtgtgggctgtcccatcgaagtgtcattcgggcggcaaccataccaacctccgtccataaagagaagaaaagtccagtttggaagggagagggtacatgtggtatccccttaagatataaaaggaggaccatgcccacaaagagaggggactggattttcccgggagaggagagggctggttgatattttgtaacttgctcttacacagatccacaaaaaacacaggagtagggtattacgcttcccagcggcccgaacctgtatacatcgtccgtgtctcgcgtttcttcctggcacgcgatctttccacatacagagagagcttgagatctcaccctaagcccccggccgaactggcaaaggggggcctgtgcggtctcccggtgaggagccacgagctccgtcatctggcgcgccaggtagggggctcagcgtgtgttttctgagctctcatactcttccgtgtgcgccaagtttcccttgttcagcctaatggccgagcaagcaaaggcgcacgacctctctccgagtgtgagcggcgacgacggggagccaaacccacgccgtcgagctcgtactcccccacctcctccacaccaaagtcctaagcagggggaggcgctcgagagggtcgaaaaatccacagcatcaccggtcgcgggtgatgcaagagaacggcgagatggggagcgtcgcctcctcgtctacggcgacggcagcacgcctcagggcgcgcttcaggctgttggcgcgctcctacgtcacccgcccgtcgtccctgacccggagtctccagcccagcgatggctagacgacgtggccaacttggtcatgacggcacagcagcgcctgggtgctggtggacggtccgccaccaccaagacctccggcgccgccactaccggctccgtgtcgtcaaggcggagggcgcggcgagcggcggctgttgcacgccattcggctaccactccctcgtcggcacctccgactcgggaggatcagcatgaagagccggatgcccgcctcgacatcgagcgtaggcgtaatagccggcgtactccccgcgcagcggagggcgcctcttcgtccagagtgtcacctcgacagggacgtgaggaccagccctccgtgcccccggttggtggtgtcggctgtagagcctttgtggcgagtcttcggaatgtccgttggcccccaaggttccggcccaccatcaccgagaagtatgatgggagcgtcaaccccaccgagtttctccaggtctatacgaccgggattgaggccgctgggggtgacgacagggtcatggcgaatttctttcccatggccctgaagggacaggcgcggggttggctaatgaacctgccacccgcatcggtccactcctgggaggatctgtgccaacagttcactatgaactttcaaggcacctatccacgcccaggtgaagaagcggacttgcacgcagtacagcgaggggatgatgagtcacttcgctcgtacattcagcggttctgccaagtccgtaatactataccatgcatccctgcacacgcggtgatctacgcgttcagggggggtgtgcggcacaaccgcatgctcgaaaagatcgcctccaaagagccccagactaccgcggagctctttcagctcgcggaccgagtggctcgtaaggaggaagcgtggacttggaacccctccggttccggtgtggcagcttcggccgcccccgggtccgccgctcagacagggcggcgtgacaggaggagaaagaagaggtcggtccattccggcgacgagggtcatgtcctcgccgtcgagggcgctccgcgggccacccgaaaggggaggcctgcgagcgacaaaaagaaagaggcaggtgctcccagcagggagcgcccagccggcaagtggtgctccgtccacaacacctccctccacgatctcgcggattgccgcgcagtcaaaaatttggctgagcggacgaagaagtgggaggaggacaggaggcaggaacgccgtgagaacaagtccccggcggttctttccggtaatcggcgaagagaggccaagcagaaggcccccgccgaggacatcgatggtgacgatgatgacctaggattccaggagcctggggccaccattgccaccgtcgatgggggagcatgtgctcatgtttctcgccggagcttcaaggctatgaagcgagagcttctggccgcggtccctactcatgaggcaacgcgtcgggcgcggtggtcggaggttgccctcacctttgaccagaccgaccacccaccgtgtgttgcccggggaggacagattgcgatggtggtttcccccaccatctgcaacgtgaagttggggcgtgtcctcatagatggaggaacggccctcaacattctttcccccgcggcctttgatgctatcaaggccccggggatggtgctccagccgtcccaaccgatcatcggtgtgacgccggggcacacatggccattaggtcacatcgacctaccggtcacctttggtggatcagccaacttccgcacggagcgggtgaacttcgatgtggcggacctcagtctgccctacaacgcggtcctggggaggcccgcgttggtgaagtttatggcggcggtccactacgcctacctccagatgaagatgccgggccccggtggccccatctctgtccatggcgaccttaaagtcgcgctcgcttgcatggagcagtgcgcggaccacctcgctgctgcgtccaagcccgagggtggtgacgagaggcttggcacctctgcccccaccgccccgaggcagcggattgacacatgcgacgaggtcccggtcaaggaggttgccttgggcgacggcccatccaagaccacacggatcggtggtcttctggatggcaaataggaagacgcgctcgtctccttcctgcgggcaaacgctgacgtcttcgcatggagaccagcggacatgcccggggtccccagggaggtgattgagcaccgtctcgccgtgcggccgggcgcaaggccggtccggcagaaagtgcggcggcaggccccggaacgtcaagccttcatccgcgaggaggtggcgaggcttctggaggccggattcatccgtgaagtcatccatccggagtggctggcgaacccggtggtcgttcccaaggcgaacggcaagcttcggatgtgcatcgactacaccgaccttaacaaggcatgtcctaaggatccttaccccctgcctcgcatagatcagatcgtcgactccactgcggggtgcgaccttttgtgttttctagatgcatactctggttaccatcagattcgcatggctagggaggatgaggagaaaactgcgttcattacccccgtaggaacctattgttttacatcaatgcccttcgggttaaagaatgcaggtcctacttttcaacgtactactcgaatttctttgggtagccaaataggacgtaatgttgaggcttatgtcgatgacttggttgtaaaaacgcgcaaccaagaaactttactttcagatctagcggaaacttttgagaacctccgctccgcccgcataaagctgaaccccgataagtgtgtgtttggtgtacctgcgggcaagcttctcgggttcttggtctctgcccgaggcattgaggccaaccccgagaagattcgagctatcgagcggatgcgcccccccagcaaacttagggatgtgcaatgcgtcaccggttgcatggccgccctaagtcgtttcatatcaaggctgggagagaaggcgctacccttgtttaagctcctcaagcgcacggggccgtttacttggacggaggaagctgaacatgccctcactcagttaaaggcatatctcagctctcccccggttctagtcgccccggagccaaatgagcccctgctactttacttagcggcgaccccccaagtagttagtgcagcattggttgtggagcgcgatgaagacaatcctcatttcgtgcacccccattctgtgctaacttggcccgggagcgagcggggaggagaggcccccgagtcggacggtggcctacggcccctgacgaccggagccggccctctgcccgcttgtcagacggtgctaggtgcccccgaccctcaggagggccccaaggccactgcgggaaggccgcacttaacgccctttgaccccgaggctaaccctgtgctgactcgacccgggaaagagcagggagaagaggccccccgagccgaacggaggccagaggcccctgacgaccggagttggccctttgcccgcttgtccgacgatgccaggagcccccgacccccaggacggccccgaggccactgagggaaggccgcccctttcatcctccgaccccaaggtcatcggcacagaagacaagtgcgccccgaaaggccacttgaacgaagaacgccccggggatacggcccctagcagagaggatcggccccaccgaagggtgcagcggcctgtctactttgttagtgaggccctccgggacgctaagacccgataccctcaggcccagaagatgctttacgctattctgatggcctcgaggaaactgcgccattattttcaggcacatagggtcactgtggttacgtcttaccccctcggtcaaatcttgcatgatcgagagggtacagggcgggtggtaaaatgggcaatcgagctttctgaattcgatctgcactttgaaccacgccacgctatcaagagccaggccctcgccgattttgtggcagagtggaccccggctccagagaccgtctcaatccccgaggccagcacgaacccctcgcagctgcctcacaccacccactgggtaatgcagttcgatggttctctgtccctccagggtgccggtgcgggggtcacgttgacctccccgaccggagacgtccttagatatctggtccgcctcgactttcgagcgaccaataatatggcagagtacgagggactccttgccggactcagggtggcagccggactggggatccgccgtctcctagtgttaggcgattcccagctggtcgttaaccaggtctgtaaggagtaccggtgctctgacccgcaaatggacgcctatgtacgccaagtgcggcgtatggagcgccattttgacgggatagagcttcggcatgtgcccagacgggataacatgatagccgacgaactctcacggctcgcgtcctcgcgagcccagaccccaccgggcgcctttgaagaaaggcttacccagccgtcggcgcgacccgaccccttaggggagacggatgcgcctgaccggcccccgaggcccgtcggagtccaggcctcgggacccgaagggagcgctccaagctcccttagattgattgcttggatctctgagatccaaacataccttacagataagactctacctgaggaccgcgaagggagtgaacgcgtacaacgcatttccaaacgctatgtgctggtagaagggaccctctatcggcgcgcggctaacggaatcctcctgaagtgcattcctcaggaacaaggcgttgagcttcttgctgacatccatgagggcgagtgcggagcccattccgcctcgcgcaccctggttggcaaggcctttcgtcaaggattttattggccgacagctctcaatgatgcagtcgatctggtccggcgatgcagagcgtgtcagttccacgccaagcaaatccatcagccggcccaggccctgcagatcataccactgtcatggccatttgctgtctgggggcttgatatcctgggaccgttcaaacgggccccgggcaggtttgagtatctgtatgttgcgatcgacaagttcactaagtggcccgaggcttatccggttgtcaagatcgataagcactctgctcttaaattcattaagggcatcacggcccgttttggagtgcctaaccgtattattacggataatggcacccaattcactagtgaactcttcggcgactactgcgaagacatgggcatcaagctctgcttcgcctcacctgcccaccccagaagcaatggccaagtggagcgcgccaatgcagaaatcctcaaaggccttaaaaccaagaccttcaatattctcaagaagcacggcgattcatggatcgaggagttgccagcggtgctctgggcaaaccgaaccacaccaagccgagcgaccggggaaacgcctttcttcctcgtctacggcgcagaagcggttctcccatccgagctcaccctgaggtctcctcgggccaccatgtactgcgaggctgatcaagatcagcttcgtagagatgacctcgactacttggaagagcgaaggcggcgcgcggcccttcgagccgcgcgctaccagcagagcctgcggcgctaccatcagcgccacgtccgggcccgatcactctgcgtcgacgacctcgtcctacgccgcgtccaaacgcgtgctggactgagcaagctctcaccaatgtgggagggtctgtatcgagtgatcggcgtcccccggccaggctccgtacggctggccacgggcgacggcactgagctgccaaacccgtggaacatcgaacaccttcgtcgcttctacccctgaggggggggggggtcgggtgtcaggtttcgggctcgggctaaccccgcacccccctcgggtgtgcagggttagccgggggctaccacacatgcacagccttacttttcttatttcagcatttcaataaaagcagtttcaatttcctaaaggttgtgtctgtgccgtttttccttctgaagaatcttaacttgaaataaggtcactcgtgctcaaccttgccctcgggggctcggttcggtcagctaaaatcgccaagcggggcccagaaccgagccgtgccccggggcgtggtgaactccgggggggaatcggcaaaaacccacaatcgggtcacccataaccctcggtccccatgttcccggcctggccagtctcgacatgtggatctccccaggcactagccccgacccgagccatttgaggatcgggacttgagcacgagcccttaaatcaagctaaaatgcaaaaggaccacggcacaaatcatcctcaactcatatgcatagaaaaataaagttaacatagaaatttttcatcatttttgattgcagattaagttgatctatacaaaaagaagaaagaaaaagaaaaaattggagattggcgggggcctgggggctcattccaatgcgcccgggtcgccggcctcgtcgccaccgtcgtccttaccgctggcgtcgccctcctcgtcggagctgggggcgaacgcgagccgaggggccgacccctcgaagctttggacgatgtggttggcggcatcccggacccgcgcacgcgcatcgtcctcggtcccgggagggaactcctccagcgccatccatggggagaagccggggtccctggcctggtaactcgctaacacgagttccaccgctccttgggcgaggtccctcgaggatgacttgatggtcttctcgagctcctcggggagttgttggacagcccaggccatcctcctaaggtgcggggcaaggccttccagattggtggagcgcgaaattgtctggcctttccagaggcccgcttcccgaccggcgcgatccagccgggagactgcatcccaaagcatgccgggccctatctcacccgacaagcggagggcctcggcttccccggtggatgagtccagggcgcgctgcatgtccgcgacggtgtgttcggcagctgcgaggcgggcgactaagtcgctttcgcccgtagccgccccgccgctgcgctccctcgcgtccagctccttttctcgcgcctcgaggttagcagcccgctgctccagcgcggctctctcggcgcggacgcattccagattgcggcgcgcctgctcctcctgcgctgcctcgcggagggacaggctgtccgccagccgttgtgtcgcggcctcggactcctcaagagctcgctcccgctcagcaagcgcgtcctcgcggagccggagcgcggactcctcttcggcgcaggcggtctcgtgcgccgccagcgtcgcctcacggatagcggaggcggcctcgcggtccgccaagctggtcttcacggcgccggcatgatctttcagcgccatggcacgggcttcaaggg

SEQ ID NO: 7456 - DNA, 913 bp, Oryza sativa
aaacgatttggcagaaaattccagcagcattcataacaccaacatgctccaatatataccagccattccaagcctaccaaaaaatatcatagatagtactctgaaactctggaagcaagtgtagtacttcagaaaaggaagatcaaggcgttaaaatgtaagcttgcaaggctgcaactaaatacagctaaaagcttgttacatacagtcagaaacccaaggcattttcaacataacaggtacttaagctactaaagtacatcttatctagtagattttaacaatacaatgatgcatcagtttatgttcccccagatagcttgccctgctgtcactttgttgctcggccttgcagtcagctcatatagaatccttgcaaatgtgtcggagtatttcccttccgacgtgagtatctcagcaaaagtattctcatggacaaggagatgcatcctgttttgaggctcagagactaggctctccactatcattgatgctttcctacaaacttcaggcacgggatgtggcgtcttcacgaccttaaggagtctatcgacagccctggttcaaataatacgaaatttaagagtttgaatttaagttctcatgtcagtgtgctatatctaatagaatgaaggagatattaccatcgctcgctagcaagcttcagctggaagtacatattcaattatgctacattgtacagagcactaatagcagctgcctgtgcatcgagtgttggcacactcaagaggtcaactagtatcttgtatatctgtatgaaatttagcaatgtaaagtacagaattttatcacccacaaccgaatagctttattcggcccatctccatagcatatcaacaaaattgaaacaatatgctagaagtcaaaaatgatttacctgtggaatggctgg

SEQ ID NO: 7457 - DNA, 25336 bp, Oryza sativa
tggttaggtgagccccgccatgctcacctaccccatatacgtggcgcaaaacccacaaggggtcggggcgcttcagccctcggggccgagacgggagcggcccgaccccttggggagacaaagagaagagcggccgtatcaccctcgggcccgaccccccccccgagggagttaggccacgtgggtgatcgtgtctgcctcaagtctctaagtcatgatactcccggtaaagaggagggcgaacacatcaccctcgggcccgacgccccctgacggtgccaggccacgtgggcgattgtgtctgcctcaagcctctagtcatgatactcccggtcccatgtcaccgacagtagcccccggcgttatgccagggcgatcgccctcctcgagggaagcggtcgggcgtaacgccacttcctaaggcctggtgacaggtggggaccggtctccacagttgggcagaaacccaacggccacaaatcacgcacatcggcaatggtaactcggctgtcaataatgagcggtctcttcaagactgccacattactcgagtagcacacgaatctggacatggcgattcgtttcgtctggagatatggtaacgtcgcttcggtcggcgagcgtaattaacgcgcgcacgatatgatctatctcgactgccacaaccgcatatccacctcatgcgccgcaagcgggcgaatgggattagtggaagcgtgggcgcgagaaacgagggggcgaaatagtgggcgcgagaagcgaggagccgggcacagcgttggcaagagtataaaggcactgaggaagggatctgtttccttcctttcgccattattccccttgtcttcgccgcttgcgccctaactccttctttcctgtgccctaccttcgccacacgcgctcgctcttaatcttctctttctccggcgccatggcacggggctccgctctgctcgatggtagcgtgctgccgccttcccgcatcgtgagcgagaggcaggctgggctgccgcgccgcttcatgccggaatctgccaccggccgggagatagtcacgctgggcgagggacgcccggcgccagactacccggggcggtccgtcttctttctcccctttgcaatggcagggctggttccgccattttcttctttcttcatggatgttctggagttctacgatctccagatggtgcacctcaccctcaacgcggtgatgacattggccatcttcgcgcatctgtgcgagatgttcattggggtgcgcccatctcttcggctgttccggtggttcttcaccgtgcagtcggtgtcgccgccatcggtagttggtggctgctacttccagccacgggggccggtgctgaaccgctacatcccctgcgccctccgcaagaagtgggacgactggaagagcgactggttctacaccccccttgccgacgaagtgcgcctccgacttccgagccagcccccggcgcaggcctccagctggcgggcgccggtagatctgggggatggctatgacgccgtcctcgaccgcctggcgggcctgcgatcccaggggctcacaggggccatggtgtacggcgactacctccgtcgtcggattgcgccgctccagcggcgcgctcggggcgcctgggagtacaccgggtccgaagacttcatgaggacccacctgggagtgagatgggactgggctcctgaggacttcaagatattggtccaacgggtgctgaatctcaactccgtggaggcgtccctcattccccaaggaatcctccccctctgcagcgatccagaccgcgcctccatcctatccattatgatggcggtcggggcctcagaggagcgagctccaaagggccacgacggcgcaggcgggagccgcaggggggaatgatctaccccgggagggggtcgtgcttctgggtcccgcgacaggggcccggggagcagccgccctgccgacgcccgggggaagagcaagcagggaggaacacctcccccatctcctccccgagggggcggggcggtgcgcgccagcagcaggcgcccggagggggccgtgccgacatcgcagcccgagggggagcgcgagaagaagcggttccgcaagatgggggagacagaaccatctcggggaaacctcatttcccctccaaagtggtcgtttaaccgaccccctcgcaggttcgtctctcacccatcgcggctgtattcattctctcaacgcgagttttcactcacccatcttgttcgtcttctggtcttttcttttgtttcagcgagatcccgtcgcgtccctcccgccattccaagcccggccagtctgaggccgaggatccggcggccgcagaggcccggaggcgggaatctgaccggcgagaggccgcggatcgcctacgggaagccgaggaggccgcccaggaggccgcccgggctcgccaggccgaggaaaccgctcgggaggaggccgcccgggcccgccaggccgaggaaaccgctcgggaggaggccgcccgggcccgccaggccgaggaagccgttcgggaggaggccgcccgagcccgccaggccgaggaagccgctcgggagaaagccggatttcgccaggacgaggcgttggcgacttccgaagcagctcgcgacgaggccgcgggcgcgtcgcttgggcccactccctcgggcgacgctcaggcgacagcttccggggcagctggcgacgaggctgcgggcgcgtcgcttgggcccactccctcgggcgacgctcaggaccaaccgggtccgggggacatccccgagtccggcacttccatcggtggcccgagccgcatggcatcctctccaaggcggctcttccccacgccttctatcgccccactgaacgcagagccccttctgcaggccttggccgccgcaaacaccacggtgttggatgggttaagtgcccaggtggaggccctgcaggcagagcgggcggagctcgacgccgcgtgggcgcgtgtcgaagaggggcgacgctcggtggaggccatggtggaggtgggccgtaaggctcaccgccggcacgtctcggagcttgaaacccgtaagaaggtgctggcggagatcgccaaggaagtggaggaggagcggggggctgccctcattgccaccaccgtgatgaacgaggcgcaggacaccctccgccttcaatacgggagctgggaggcggagctagggaagaagctcgacgccgcccagggggtgcttgacgctgccgctgcccgagaacagcgggcggcggagaccgaagcagcgtcccggcggcgcgaagaggcccttgaggcgcgcgccatggcgctggaagagcgcgcctgcgtcgtggagagggatctggcggaccgcgaggccgccgtcaccatccgggaagcaacgctggcggcgcacgaggctgcctgcgccgaagaagagctcgcgctccgcctccgcgaggacgcgctcaccgagcgggagcgagctctcgagggggccgaggccgcggcgcaacagctggcggacagcctatccctccgcgaggcagcgcaggaggagcaggcgcgccgtaatctgtaaggtgcccgcgccgagagggccgcactgaaccaacgggccgctgagctcgaggcgcgggcgaaggagctggacgcgagggcgcgcagcggcggggcggccgcgggcgaaagcgacttagccgcccgcctcgcagctgccgaacacaccatcgccgatctgcagggcgcgctggactcgtccgctggggaggtcgaagccctccgcttggcaggcgaggttgggcccggcatgctttgggacgccgtctcccgcctagattgcgccggtcggcaagtgggcctctggagagggcggatcgtaaagtacgccgccaaccagggaggtctcgcccagcgcctctcgaagatggccggggctctccaacggctccccgaggagctcgagaagacaattaagtcatcctcgagggacctcgcccaaggagcggtggagctcgtcctggcgagttaccaggccagggaccccaatttctctccatggatggcgctggatgagttccctcctgggaccgaggaccgcgcgcgcgcgcaggtccgggatgccgccgaccatatcgtcgacagcttcgagggctcggcccctcggctcgcgttcgcccccaactccgacgaggagggcaatgccggtggtgcagacgacagtgacgacgaggccggcgacccgggcgcattggattaagcccccagacccccgccattcttcagttttttcttcttttctttcttctaaggccttcgggcctcttttttgtatagatcaacttaatctgtaatcaaaaatgaagaaatttttgtgtcaatttcatcttgctgtgtgtatgagatgaggatgatctgtgccgtggcccttttgtgtcttagcttgattaagggttcgtgcccaggtcctagtcctcaaaaggcgcgggtcggggctagtgcctggggagatccacatgtcgagactggccaggccgggaacgtggtgaccgagggttatgggtgacccgattgtgggcttttgccgattcccccccggagttcaccacgccccggggcacggctcggttctgggccccgtttggcgattttagccgacccgagcccccgagggcaggattgagcacgagtgacctatttcaagtcaagattcttcaaaaggaaaaaacagcacagatacagcctttaggaaattgaaactgcttttattgaaatactgaaataagagaaataagaatgtgcatgtgtggcagcccccggccaaccctgcacgcccgagggggtgcggggttggcccgagcccgaaacctgacacccgacccccctcaggggtagaagcgacgaaggcgttcgatgttccacgggttaggcagctcagtgccgtcgcccgtggccagccgtatggagcccagccgggggacgccgaccactcgatacggaccctcccacattggtgaaagcttgctcaatccagcacgcgtttggacgcggcgtaggacgaggtcgtcgacgcagagtgatcgggcccggacgtgacgctgatggtagcgccgcaggctctgctggtagcgcgcggctcggagggccgcgcgccgccttcgctcttccaagtagtcgaggtcatctctgcgaagctgatcttgatcagcctcgcagtacatggtggcccgaggagacctcagggtgagctcggatgggagaaccgcttccgcgccgtagacgaggaagaaaggcgtttccccggttgctcggcttggtgtagttcggtttgcccagagcaccgctggcaactcctcgatccatgaatcgccgtgcttcttgagtatgttgaaggtcttggttttaaggcctttgaggacttccgcattggcgcgctccacttggccattgcttctggggtgggcaggtgaggcgaagcagagcttgatgcccatgtcttcgcagtagtcgccgaagagttcactagtgaattgggtgccattatccgtaataatacggttaggcactccaaaccgggccgtgatgcccttaatgaacttaagtgcggagtgcttatcgatcttgacgaccggataagccttgggccacttagtgaacttgtcgatcgcgacatacagatactcaaacccgcccggggcccgcctaaacggtcccaggatatcgagtccccagacagcaaatggccacgaaagtggtatggtctgcagggcctgggccggctgatggatttgcttggcgtggaattgacacgctctacatcgccggaccaggtcgaccgcatcattgagagctgtcggccaatagaaaccctggcgaaaagctttaccaaccaaggtgcgcgaggcggagtgggctccgcattcgccttcatggatatcggcaagaagcacaacgccttgttcccgaggaatgcacttcaggaggactccattagccgcgcgccgatagagggtcccttctaccagcacgtagcgtttggagatgcgatggacgcgttcactcccttcgcggtcctcgggtagagtcttatctgtgaggtatgcttggatctcggcgatccaagcaatcaatctaagggagctgggagcactcccctcgggtcccgaggcctggactccgacgggcctcgggggccggtcaggcgcatccgtctcccctaaggggtcgggtcgcgccgacggctgggcaagcctttcttcaaaggcgcccggtggggtctgggctcgcgaggacgcgagccgtgagagttcgtcggccatcatgttatcccgtctgggcacatgccgaagctcaatcccatcaaaatggcgctccatacgccgtacttggcgtacgtaggcgtccatctgcgggtcagagcaccggtactccttacagacttggttaacgaccagctgggagtcgcctaacaccaggaggcggcggatccccagtccagctgccactctgagtccggcaaggagtccctcgtactctgccatattattggtcgctcgaaagtcgaggcggaccaagtatctgaggacgtttccactcggagaggtcaacgtgacccccgcactggcgtcctgaagagacagggagccgtcgaactgcattacccagtgggcggtgtgaggcagctgcgaggggtccgtgctggcctcggggatcgagacgggctcgggagccggggtccactctgccacaaaatcggcgagggcctggctcttgatagcgtggcgtggttcaaagtgcaaatcgaactcagaaagttcgattgcccatttcaccacccgtcctgtaccctctcgattatgcaagatttgaccgagggggtaagacgtaaccacagtgacccgatgcgcctggaaataatggcgcagtttcctcgaggccatcagaatagcgtaaagcatcttctgggcctgagggtatcgggttttggcatcccggagggcctcactaacaaagtagacgggccgctgcacctttcggtggggccgatcctcttcgctaggggccgcatccctggggcactcttcgtccaatcagcctcgcggggcgcacttgtcttctgtgctgatgacttcggggtcggaggataacaggggcggccttcccacagtggcttcggggccgtcctgggggtcgggggctcctggcatcgtcggacaagcgggcaaagggccaactccggtcgtcaggggccttggacctccgttcggctcgggggcctcttctccctgctctttcccgggtcgagtcagcacagggttagcctcggggtcaaagggcgataggtgcggccttcccacagtggcctcagggccttcctgggggtcgggggctcctagcaccgtctgacaagcgggcagagggccaactccggtcgtcgggggccttgggccaccgttcggctcgggggcctctcctccctgctctctcccgggccaagtctgcacagggtgggggtgcgcggaatgaggattgtcctcatcgcgctccacgaccaacgccgcactaaccacttgcggggtcgccgctaagtagagtagtaagggttcatttggctccggggcgaccagaaccgggggagagctgagatacgccttcaactgagtgagggcacgctcagcttcctccgtccaagtaaacggcccggagcgtttgaggagcttaaataagggtagcgccttctcccccagcctcgatatgaaccgacttagggcggccatgcaaccggcgacgcattgcacatccctaagcttgctgggggggcgcatccgctctatagctcgtatcttctcggggttggcttcgatgcctcgggcagagaccaagaacccgagaagcttgcccgcaggtacaccgaacacgcacttatcggggttcagttttatgcgggcggagcggaggctttcaaaagtttccgctagatccgagagtaaggtttcttggttgcgcgtctttacaaccaagtcatcgacataagcctcaacattacatcctatttggctacccaaagaaattcgagtagtacgttgaaaagtaggacctgcattttttaacccgaagggcattgttgtataacaataagttcctatgggggtaatgaacgcagttttttcctcatcctccctagccatgcgaatctgatggtaaccagagtatgcatctagaaaacacaaaaggtcgcaccccgctgtggagtcgacaatctgatctatgcgaggcagggggtaaggatccttaggacatgccttgttaaggtcggtgtagtcgatgcacatccgaagcttgccgttcgccttgggaacgaccaccgggttcgccagccactccggatggatgacctcgcggatgaatccggcctccagaagtcgcgccacctcctcgcggataaaggcttgacgttccagggcctgccgccgcactttctgccggaccggccttgcgcccggccgtacggcgagacggtgctcaatcacctccctggggaccccgggcatatccgccggtctccatgcgaagacgtcagcgtttgcccgcaggaaagagacgagcgcgtcttcctatttgccgtccagaagaccaccgatccgtgtggtcttggacgggccgtcgcccagggcaacctccttgaccgggacctcatcgcacgtgactatccgctgcctcggggcggcgggggcggatgtgccaagcctctcgtcgccaccctcgggcttggacacgacggcgaggcggtccgcgcgctgctccatacaagcgagcgcgactttgaggtcaccatggacagagatggggccatcggggcccggcatcttcatctggaggtaggcgtagtggaccgccgccatgaactttaccaacgcgggcctccccaagaccgcgttgtagggcagactgaggtccgccacatcaaagttcactcgctccgtgcggaagttgacgggtccaccgaaggtgaccgggaggtcgatatgacctagcggccaagtgtgccccggcgtcacaccgatgatcggctgggacggccggagcatcatccccggggccttgatggcgtcaaaggctgcgggggaaaggatgttgagggccgctcctccatcaatgaggacatgccccagcttcacgttgcaaacagtgggggaaaccaccatcgcgatctgtcctccctgggcaacgcacggtgggtggtcggtctggtcgaaggtgagggcaacctccgaccaccgcgcccggcgcgtcgcctcatgagtaggggccgcggccagaagctctcgcttcatggccttgaggctccggcgagaaacgtgagcacacgctcccccatcgacagtggcaatggtggccccaggctcttggaaacctaggtcatcatcgccgtcatcgatgtcctcggcgggggccttctgcttggcctcactgcgccgattgccggaaggaaccgccggggacttgccctctcggcgctcctgcctcctctcctcctcccacttcctcgtccgctcagccaaacttttgaccgcacggcagtccatgaggtcgtggagggaggtgttgtggacggtgcaccacttgccggctgggcgctccctgctgggagcgccggcctttttctttttgtcgctcgcaggcctccccttttgggtggcccgcgaagcgccctcgacggcgaggacatgaccctcgtcgtcggaatggactgacctcttcttcctcctcctgtcacgccgccctgtctgagcggcggatccggaggcggccgaagctgccacaccggaaccggaggggttccaagtccaggcctcctccttgcgagccactcggtccgcgagctgaaaaagctccgcggtagtctggggctccttggaggcgatcttttcgagcatgcggttgtgccgcacgccccccctgaacgcgtagattaccgcgtgtgcagggatgcatggtatggtgttgcgggcttgacagaaccgctgaatgtacgagcgaagtgtctcatcatcccttcgctgtactgcgtgtaagtccgcttcttcacctgggcgcggatatgtgccctgaaagttcatggtgaactgttggcacaaatcctcccaggagtggactgacgcgggtggcaagttcattagccaaccccgcgcttgccccttcagggccatgggaaagaaattcgccatgaccctgtcgtcacccccggcggcctcaatcccggtcgtgtagacctggagaaactcggcggggttgacgctgccatcatatttttcggcgatggtgggccggaaccttgggggccaacggacattccgaagactcgccacaaaggctctacagccgacaccaccaaccgggggcacggagggctgatacccgcgtccgtgttgaggtgacactctggacgaggaagcgccctccgttgcgtgggtagcacgtcggtcattacgccgccgctcgatgctggtgcgggcgtccggccccccacgcagatcttcccgggtcgaatgagtcgacgaaggagtggtggccgaatggcgaacagcggctgccgctcgccgcgcccttcgtcttgatgacgcggagccggtggtagcagcaccagaggccttggtggcggaggaccgcccaccagcatctagacgctgccgtgcagtcatgaccaatttggccacatcgtccagccaacgttgggctggagactccgggtcatgggcgacgggcgggtgacgtaggagcgcgcccgcagcttggagcgcgccctgggacgtgctgctgtcaccatagacgaggaggcgacgctccccatctcgccgcccttttccacctcctgtggatgtcgaagtcgcggatccttcggccctctcgagcgcctccccccgcttaggactttggcgtggagggggcggtggagtacgagctcgacggcgtgggttcggctccccgtcgtcgccactcacactcggagagaggtcgtgcgcctttgcttgctcagccatgaggctgaacaggaaaagcttggcgcacacgaaagagtgcaagagctcagaagatcactcgcagagtcccctacctggcgcgccagatgacggagcgtggggctcctcaccgggagaccgcgctggcccccctttgccggttcggccggggaccctgggtgagactctaagctcccaatctgtggaaggttcgcgagacaggaagcacacaagacgccggcgatgtatacaggttcgggccgctgagaagcgtaataccctactcctgtgttttggtgaattcgtgtatgaaggaactacaaagtatgagccagcctctccctcgttctgggttcccaatctggaaaagtccaaatcccccctctaagtgggcaaggtcctccttttatatcttaaggggataccacatgcaccatctccccctctctttcttccaatttgacttctcttcattaacagacggagatttgcatcgccgccgtctgaatgaccttctgacgggacggcccatacctacctccacttccgccggaggcaggcgcgacgtgggaagatggctgtctgctgatgacttgaccattgtcagaccggtcacaaatcggtcattcttgtccaccacgtgtcagtttaacaatctgcatgttcgctcttcttcatacaatatcttgcctgtaatggttaggatgaagcctggcatacatctgaccggaaccaacgtgccatctccaggagctaacacgccggctccagctagggacgagtgcttggaggctctcgtcctgacgggatggggcgaggcgtgcgtcagaccgcctgtcgccacctaacccatgatctgaccggtctgtgactggtcacagaccggataaacgagcgtgctgtactgcgatacatgcggcgtgacgcgctcctcaaaactgcaataaatgtggttaggtgagccccgccatactcacctaccccatatacgtggcgcaaaacccacaaggggtcggggcgcttcggccctcggggccgagacgggagcggcccgaccccttggggagacaaagagaagggcggccgtatcaccctcgggcccaacccccccccgagggagttaggccacgtgggtgatcgtgtctgcctcaagtctctaagtcatgatactcccggtaaagaggagggcgaacacatcaccctcgggcccgacgccccctgacggtgccaggccacgtgggcgattgtgtctgcctcaagcctctagtcatgatactcccggtcccatgtcaccgacaccctccgtcccaaaataagcgtcctaaagttttgcactatttgtgttcaacatttaaccgttcgtcttatttaaaatttttttatgatcagtatttttattgctattatttttaaatgtttcataaatttttaaaataagatggacggtcaaacattggacatgaatatcgacagcaaacaagacggaggtagtacctaattcaagttccctttaccgttttgatgaggcttaccgctatcggttaccacagtaactgcacggtcaccacgaaaactgtgatgctacgaaattcacaatccgtgacctcaaaatgctccggaaaatcatcacagcaatatagtaacgttcaggctagagcgcataaatcgtaacgctggctagactatacaaaggtgcacgagcttgcatataaaccaggtcaggatacaaaatgcccgcgggcataaacatctggaataacaattaggtttgacatggcactaccaaatgtccaaatcaagtaccgaagcaaactaggcgagctgaaagttcactgcggcttgggaacaggttcgagggcttcaatcatcacaacactgtttcccctgataacctgcagaagttactgcattatcagtacttgagtatatattcctaatcgaacatatgtgagatcttctctagacagaattgaactacgggcctgtttagcacagctccagctccagctccactcttcctggagctagagctcagccaaacagttttagctccaccaaagagctctctcacaaaatgtactagagttgggagctgggtttaggcagctccacaactccactccagactcaactcttggagttatatttaggagttggagctgtaccaaacaggccatccctatgaaacaggaatcccaagaaagatctcattccaaagagtttacttaccaccatccctatgtcattcttctcgtttccattgacctccactgtgttgtccacgaccaaattcataaactgatcgaatcctcgaagagtgccaatgacaacacggttcgcattcagcttgactggcaaaattgaaaagagagtgaatgagtacaccatcaaagctgagtaagaacacaaggattagaagttcagcatcactcaagactattattagcaaagactatcaagcagtaacgagataaaattggatcaaattgcaatatttttataatgtataatcttggtgcttctagccaatcttaatccacgtgcagaccaaatgtgagcgtcaccaaactatttaattagcttagcccaaacgactatacacagtcacaactcacacaaatatatcaggtaatggtactgatagcaaccatagttccactataatgcaatattcaaatcaaagggatcaaccagcagcaactgaaacatcaaggatatgatttgatccttgatgaagggacggtagagttgttttcctccctgagttgagggtgagccaaatattaaagggcaactagccaactattacaacatcaaggtagcctatcagtgtaactatgacaaaaggcttcacttggaaaagaatccatagctttccaaagaatgtcatcatttaggcagcctactgatgttgattaatgagaaccatgaaagaagtgtcaagaaaacaggttctactgaacagaacaaagacaacaattggaattatatattctttttagagaacaataggaagtatgaaagaaaaaaaaaagttccaactagtacaaaagactggacatggcatggtgtgcacaaggatctcaacacgccactgataaaattatataaggaaatgaagagtttaaatgccctatcagagtaactatgacaaagaagcttcatttggacaataaatccatagctttcctaagatatcatcatttagggcattcacaaatcacaagcactggcacaaaaatctgcaagctattacagaacatatatctgcaaacaccaacatagttgtgctcaaagataagcaaacctgctgtattcacatatcagatctggttcaaacgaacttccaggtttctaaccaggcttaagatttactaacaggttgagctgaattcttcagccaaaatatttttgatataccaactctactacgacaggaataaacaacatgaaaagcatcaaagatcaatacgacaaaaacaataactcgatatatctccagatgaccataccaaatcaattaccaatacctagtcatatgcttcataacacccctatctcgcaagttgcaacatagagctcttacaacttgcaccacaaatctcagctagggcatgtattaagatgacgaagcgaattggcgataccggaccatacataatcagttaatcacagaatctacacagcgttatcttagaattaacgaggcagctaaaaactttgggttggatgagtgcgcttactttggagcttcttgtccatgtacctgcaacccaccagaacaaaaactcgcatcaaaaatccaaatccaagtagaacaaaccaagcccacaaatcgaactcaagatgaagaaaaaaagcactaagaaattacttcttcagatccggaggctgccccgatcggctcatggcgactccccgacggaagatctagaccttctccgctcaaccaaagccaaatcttcggagtaggcgagagaaaatagccgccgccgccgccgcagagaggagaaccctgaaccctaaaatagcccgagacgggattgctatctccacactataaatagtcgctgacatgtgggcccgcgtctccgctccatcgcgaacacaagaagacgaatagatacagaaatattattaaactcaggggtgtatctgcaaatataccaccagcccagcctggagcacgacgaagcgcggacgaggcgagaactccttggagctctgaactctctatcgcgtgaggaggtcgacggcgagagagatgcgcggcggcggcggcggggatgcgggcaccagctcgaggggcggcggttccggcggggcccccgcgcgtccgcggcggttccctgaggcggcgcagccggagatcatgcgggcggcggagaaggacgacggctacgccgcgcacgtcaccgaggcctgccgcgacgccttccgccacctcttcggtgtgttgctttttctccccccgtctcgtagcttaagattagctccgcgtcgcgcgatttgatggtggtttgggttttggtgatgatgcaggtaccagggtcgccgttgcttatcagaacgaggtgagagcttaaattggctgtgttggcttgtggctctactcgggttatgtgatatttgtcgaattctgccggaaatttaacttatcttatacactgtttgctacatagactggtgatatgagagtgaatgcctgaaatcagatgaattgtttcggtgtttgggtaaagtagttgaaaattttcaactattgtatattgtcgtatgactttggtatgattggcaatgagcatttagtgtattagctttttacaacttcaaatttgattgcacacctataatattacatgctttcaagtttcaaggcttacaagttgggtatgcattactgtactggggattaaacttcaactatcaacggacttttagggctgtttgatttcttcggcgttttaactcatgtagctactttgcatttgaattcaaatagctaatttgttctagtcagtatgaactgacaggttatgttattatatatatctgatttccatgcttggtggtgaaattagtttatttatataaaaaaatgaagatggattgcattgtgttgcatctcagtcatcagattctcagtagcatagaatgtgttgtgctgtgtggcagaagcacaaccttttaaaatatgaactacatcaaattgttctctagatctgtaacatagagaaatagtataaattttgttctctgcatttatttcggtgctaatattcttattgattgtccaaaattacatttctcatgaacatttgcagataaaattgcttggtcagtctctttattacttgctaacaactggttcaggccagcaaacacttggagaagaatactgtgatatatctcaggtcatactgcttttttgtctttaatgcacagtttctactcgcagctatttgatttggtacttggtagtataccattagcttgttgctcatctgttgccttatactttgaggggcacacgttgtaaatttgtctctgtaactgtaggtagtatatactggacatgtgctgttatttcagttttatgtaggagacacaagaaacctttgatggagtaaatatggcctttttgtttaattgaggggtctgtttgcatctgaagtgaaacacaaaactgtttattttttcttaaacatgaaattattaggagtcaaataactggtagatcctattaggaaaatgtaaagggaacacaaaatgtgttggtttcagttattgagatagtcaatttttttattcttgtcgacaagacacaaaaaattgttattagcagaagagtcttcaatgaataatattaatcttaataaggtacagccaaattgtaggcttgaagctgccattcacagaaaacataggagtcaaaattcactctatcatgctgatgttgtccatgttgtaaacaggttgcaacctcgcacggacttccgcctacacctgctagacggattctattcattttgtaccaaactaccgttccctatcttgctgaacgcatcaggtttgacaataatagttttggtcattcattcctatttagatcggctatcttgcccaatgaaactgattgcataatttctgctcactgtgattttaacagctctagaattgttgcacgtggtattgccctcgaggactctcagcttgatgaccattctgaaagtgatagttctagtataggcactgcagcacaaccatccccaattaggaacagtccttcaagaagcttgagtttttctcatttgtcaaggttgagaggcagagtccataccttgtgggaatgggttcttcggaaatggccttcggtatgaaattattctaatttgtgtgtggcatccttttcttatagcagaaaaaactctcttgatttagtaatagggaaatgtttctgtagaattaaggttgtagcaacactatgaaaatgcatttcttgcctaacacctatatgttgttgcctgactctaatatgcatgcagatgctaccatttgctcaagattttatacagttaactatccggacaaaccttatgttcttctattttgaaggtatcttatgttcgatacagcatgtcaaattttgaaatgagtttgaggaccaataaatttttatagggtgacaagtagcaaatgaagagttctgtttcttagtactgctcagtggctgccttaaagtcatggaacctgaacttattatgacgcaattagaaaaattaaattaccagaatacaacttattggtaaataacaacccagtttatcataacatctaacagaacatttccagtgaattgtgcaattcactgtcatgctctgctgcatatgagaactctatcatattctacttaactgaaattgctacatctatttcaattttttattttatttatggtaggatgcaacaccatgattctatcaagccttaattaatgtaatggcttagttagagttgacttatgttcttttttttatcacctcaattgaatctgtagcaactgtttgatatttgattaacatttccaatttcttgtaggattgtattatcatttaccaaagcgagcagctggcattcgttatgtattcattgggaagccattgaatcagaggcccaggtactctctgtttctctgctcatctactgtttatactacatgaaacaaatcatacaaacaatgggctatgaaacaccagtaataaatgagtttgagaatgctgataataagtcttttcatgatctgtagtttttttggacatcttcacatgtattacctccatttgagagcttaaaattctccagcaggtcacatttaactcattggattttgcaggtatcaaatcttgggtatttttctgttaattcagttatgtattcttggtgctgaaagacttcgaagaagtaatttatcaacaatagctagttcgattaaccaaatctcatctggaggctatccttcatcaagaggtggtacactctttttctcaatttatgaaaccagttttggttctatgttaatgctttgtgtttacttgtttcatggatataaataaatgttccaatattacctttgtgaatggcaaaacaggtcgaggtgtccctgttctaaatgaagatggaaatataatcagcgacatccgccatgggaaaactgcagatttggctactagttcagaggtatttttttctagataaattcattgagatgactactattgtgtagcacaaaatgtttagctttgtgttggacgccaacagcttttaagattatcggtatcaagcacttcatgttatgcaacagaattctatttaaaaaagaaagcaacaaagtaaaaaaaatgttacaatttaagattatgattgaactgaaaatgcttttttaccactattcttatattgtttatgttatttgatgtattttgtgtatgaatataattcttctttcatattgtatgtctaatgttcaggcatccagtggtaagagcaaatgcaccctttgtctcagtacccgtcagaatcccactgccacaacctgtggccatgtcttctgctggtaagactcgttttttggcctttacggatgcagcctgaaatttttctctcatgcactcacttgaatggtatggtaattcatgacataacatgcaggagttgcattatggagtggtgtaatgagaagcctgaatgccccctatgcagaactccgattacacattcgagtttgatttgtatatatcattcagatttctagcaaatgattactagcaaggggtcatatcattctccagtggattcattaaaatgatactgaatccccacattttggcgagaactcttcttctgaagtgttttagtgtaccaaaagaggagagtagaaaccatccaatgaggctgaagatcaatgctgccattcaactgtattgtagagctcaaataacaaaacaatcaaacagaacaaaattttcattagagctcaaacggatacccatgtatatgtacattgtagacacaacttgattttgtagggtagaacagtggctgactggaatcattagagcaaaatgtatcgacctgaaattctgccgggaaatttaactatttgccaatattagattcgacaattattcaaatgcccctcttagatttggacttaattttttgcccctcttaagagatgccttcttaactatttgccacttttgtccacgtggtatgccaatgtggcaacacagggtagaaatcggtgtgggacccactagtcagcctcttctctatccttcttctttccctctggtccggcgaggagcgtgctctgccacaagccggtgctgctccggtctccatccttgtgcgcggctgctctaatccaccgccgctttgccttcgtcagtgccaccgcttcacctccttcgacagcgccgccgctttgcctcctccaccaccgcgaggagcccgtccgccgccgctacacatcctcctctgccccgaccgttgctctgcctcctccacctccacgaggagcccgtccgcgtcgctatgccagcgccaccgcttcgcctcttccaccaccacgagtaacccgtccgccgccgctacacatcctccttcgctggcgccgccgcttcgtctcgtccacctccgcaaggagcccatccgctgtcgctacgcctcctccgccggcgccgccgctccgcctcctccaccaccacgaggatgtccgccatcgctgcatctcctccgccgccactgctcctttccccaaccacgccgtcatcgcacgccggaccggagggaaagaaggaggagagagaggagaggctgacttatgggtcttacaccaatttctaccctatgttgccacgttggcatgccacgtgggcaaaagtggcaaatagttaagaatgcatctcttaagaggggcaaaaaaaaaagtgcaaatctaatagaggcatttgaataattgtcgaatctaatagtggcaaatagttaaatttgcttatccccgtatccctctgtatcacgttctttgattgcgttgcgtgactggcgtacgagacatttgcttatctcatactccctccgtcctaaaaaaaagacaaaccctggtttccgcgtccaacgtctgaccgttcgtcttatttgaaaaaattataaaaaaaattaaaaagacaattcacgcataaaatattaatcatgttttatcatctaacaacaataaaagtatgaattataaaaaatttcatataaaacggacagtcaaagttggatacggaaacctagaatttgtcttttttgggacagagggagtactctactgtgagttctgcccacacgcagtctgcaattctggcatctctgcagaaacgcaatgcctctcctctcgcctcgtcactttgagctcagtagaattggagtgtggcaaagcaaaagagcgaagccgtttgtcacaagtgccaccaaccctctcgtccggcggctgcccaacagaatccaccatggtttctccatcctttttccattttcaatgcaatccaccttaaatttctctctcccgtaacgccatccataccccggcattgctctgcccgtacacaaactaccacactagtcgcaagttaaaaccactacaaaatccattccaacttgcctcatctctcccacctccatcaccaaaccagcacaggtcgctgtctctctccgaaatatcatttcgttttttaatcatcttttcctcctcttcgctaatcaccatgatttgcctccgagccgccttccccttgacctcctccttctcctcctcccctctccgccgcctcgccctcaagccctcctcctcccgcgccgccgccgccgccgccatgtcgtccgcccccgccaccgccatcgccgcgccggtcgagcacatcgtgctcatcaaggtccgccccgaggcggcggcgtcgggcgccgccgcggcgatggtgtcctcgctgcaggcgctgtccagcgtggtgcccgggctgtcgtacatccacgtcggccccgtgctccgcctccggtcgccggcggcggaggcgctggggccgacccacgtcctccactcccgctacgccaccaagcccgacctggcggcgtacgcggcgcacccggcgcacgtcgccgccgtgcaggggcacgtcctccccaacgcgctcgacaccaccgccatcgactgggtcaacgccgcgctcgcgccgtccccggtcaccccgggctccgccgtgcggctcacgctggcgaaggtgaaggaaggtgtggaggtgccccagctcgtggagaaggtcgccgcggcgacggcggcggcgggcgaggcgaagggcgccagggtgagcttcggggagaacttctcccccgcgcgggctaaggggtaccagttcgggatggtggcggtgttcgacagcgtggaggagctcgacgcggtggagggggacgggaaggtgcaggaggccaaggcggcggtgaggccactgctcgacgaggtgctcgtgctggacttcgtcgtcggacctgccgccgtggaggctccggcgccggccaacctctgagaggtttgccttcggtttggaaactcttagttgccttgttcaatcgatcgagaataatgcaatccttgtgattgggtgtgctgctgctgctgtggcgtgtgattggcaatggcaattgattttggaatgaataagaattgtacctgactacctgaactaggaattaggatggccgctcttgcttggatcgtcgtgtaccaagaaagagcttgctgtcttcagtgttcatcttttcttctcgctctgcaactgcaaatttgtatgtcagataattttaagactcgcaactcggtgctatgcctctcatgcctcccttcccccattaagcatggaggaaccactgacatgccactgcacaatcttttagtatcatgcacccatagaagtattttagtcttgctccaattctgccttgtgaaatcctcataggcatgatttatggaacatgtgcctttgtgattgtagagtattatacgcaataatcgctgttgtcggaatcggatgtccgggttactacattttgagcagttttgatgactttggccatgttaaagttgaggaggtcagtccattcaatagtacagaggacctttttttagtggtaatagtgatcttgctgaacgcatcaggtttgacagtaatagttttggtcattcattcctattgagatcgactatcttgctgaatgaaactgattacataatttctcattgtgattttaacagctctagaattgttgcacgtggtattgccctcgatgactctcagcttgatgaccattctgaaagtgatagttctagtataggcactgcagcacaaccatccccaattaggaacagtccttcaagaagcttgagtttttctcatttgtcaaggttgagaggcagagttcataccttgtgggaatgggttcttcggaaatggccttcggtatgaaattattctaatttgtgtttgccatccttttcttatagcagaaaaactctcttgatttagtcatagggaaatgtttctgtagagttaaggttgtagtaacactatgaaaatgcatttcttgcctaacatctatataatcttatgtttgacacatcatgtaaattttggaatgagtttgaggaccaataagttttgatagatagggtgacgagtaacaaatgaagagttctgtttcttagtactgctcagtggctaaagtcatgaaacctgaacttattgtgaggcaattagaaaaattaaattaccataatacaacttattggtaaataccaacccagtttatcataacatctaacagaacatctccagtgaattgtgcaattcactgtcatatgagaactctatcatactctactcaattgaaattgctacgtccatttcaatcatttatttcatttatggtaggatgcaacaccatgatactatcaagccttaattaattgatggcttagttagagttggtcttatattctttttttatcacctcaattgaatctgtagtaactgtttgatatttgattacacttggacgtttccaatttgttgcaggattgtattatcatttaccaaagcgagcagctggcattcgttatgtattcattgggaagccaatgattcagaggcccaggtactctcctttattttgctcatctaggagtaccttttatactacggccgagtttagttccaaactttttcttcaaacctccaacttttccatcacatcaaaacttttctacacacacaaacttctaacttttctgtcacattgttccaatttcaaccaaacttccaattttggcgtgaacatgaaacatatcatacaaacattagactatgaaacacctgcaataaatgagtttgagaatgcagatgatgagtcttttcatgatctacagttttttttggacatcttcacatgttttacttccctttgggagcttaaaattctccagcagatcatatttaactcatcggattttgcaggtatcaaatcttgggtatttttttgttaattcagttatgtattctcggtgctgaaaggcttcgaagaagtaatttatcaacaattgctagttcgattaatcaaatctcatctggaagctatccttcatcgagaggtggcactttctttttctgaatttatgaaaccggttttggttttatgccaatgctttgtgtttacttgttacatgggtataaaatgttccaatattacctttgtgaatgggaaacaggtcgaggtgtcacatcgaatatttggacacatgcatggagtattaaatatatataaaaaaattaattacacagaatacatgtaaattgcgagacaaatcttttaagtctaattgctccatgatttaacaatatggtgctatagtaaacatttgctaataacggattaattatgtttaataaattcgtctcgtagtttataggcagaacctgtaatttgttttgttattagtcttcatctcatacttcaaatatttgtccgtatattcaatgtgacatgctaaaacttttcacccctaaactacacagggcctttaggctgtgttcgcgggaggatgttcccaaccagccgttagcgcacggaaaacggaacgatctattagcacgtgattaattaagtattagctaatttttttttaaaaaatggatcaatatgattttttaagcaactttcgtataaaaactttttgcaaaaaacataccgtttagcagtttgaaaaacatgcgcgcggaaaacgagggagatgagttgtgaaacttgggtaagaacacacccttaattaatctcgcgttaatagaccgctccgttttccgtgctaactgttccggttgggaactggaaatagcgaacacaatcttagggtgtgtttagttcacgccaaaattgaaagtttggttgaaattggaacaatgtgatagaaaagttgaaagtttatgtgtgtagaaaaattttgatgtgatgaaaaagttaaaagttcgaaggaaaagtttggaactaagtcctcagtagagttggagtgtggcaaagcaaaagaccgaacctgtttgtcacaggtgccaccaaccctctcatccggcggctgcccaacagagaatccagcatggtttctcggtttctccatccttttcccattttgaatgcaatccaccttaaatttctctctcc

SEQ ID NO: 7458 - DNA, 4721 bp, Oryza sativa
catttcctaatataatgaatctggacaggctcatgtctagattcattgtactagaaaatgttacatccgtgtctaggttcgttttttcggaacggatggagtaggtgtaaaggaaaaaaaagacacacatgttgaagatgagacgaatttcacaaaattatctacatgtaagaagtgttttgtaaagaaaaaagatacttgagtaagatcttaaaaataagctaggatggtcataaaaaggacaataatattgttaatattaagggagaaaatattataggaaacgcgataggaggctgtcgaggttggttatgcaccgtataagaccatccaagtgctcttaaaatgccaaagttgctttatatatattatatatttgcactttatgaaccttaggttgcgaaggacgaatataatatctacatttcaatttccgttttgtccttctctgtggaggagccatgcatatggtcatctcagcatcagataatggcgaggactgaatgagacggagggcgacagctaggactaagggatgataaactccacataccatacctttcagatgacacatggccatagctcgatcttgtactattcactctatgattgtgacaagcatttcaagagaacctgaacttgcggcccagcccagaaagatcgccccaaccaaacacagcacactggcactgaacatcagcaagagaccattttccagctgctgttttttaataatggaatggtttacatctccgatccaataagttctattgttgaatatatatatatatatatatatatatatatatatatatatatatatatatatatatatatatatatatatatacagcttttgatggaatgatatttgacatggcaccagaagagaatggtgcaaggttcagacatcaagattatctccactcctgaaagaacatcaagattttctgtgatacattagcagatgaactttacatctttataaaattctgtccaattaggctttgaacaatgtactatattcaaagcaacctgtactgcccatgtgtgtgttttttcagtggctaccctgcagactcagcaagagaccatttttcagctgctgatagactgatacttgacacggcaccaaagagatagatgcaaggttcagacgtcatgatcatcttcgctccaaaaaagaacatcaagattatctgtgatatattagcagatgaactttacatctttacaacattcacaattaggaattgcacaatgtactatattcagagcagcctgtgcccatgtgtgtgtgtttttgagtggctacgctgaagactccccctccccctcaccctcaccctcctcttccttccagacagggaggatcccttggccagccagcctcttgtaaacccagaacaccacatacttggcgtttgctctcttctcgtcgatcaggaacggctcgatggtgctcacttctgtgctatacgatgacagcgcgaagcccttcggtcctgcgttaatcgtcgagatgaatgatactggtgtaaacatttcaagctattcaataagctatgcgcccatatctttgatgatgatgcagtgttgcaacttgcaaaatatgcttctgcaatcctacttaagtactctgtactctgcataactggtcttttacacctagatgcactatattgtagtcttcagaatgcggatttatacctaaataatacgctacatagcagccttcagaacacggaatatcaagtgatagtagtttacagttaaaaattcaaaaggtatgaaatatataggttatgtgaatgcattgaggtattgtcctgcttatgcctcccaacggtattctcagcaagaaagcagcaatttttgtatgaagaaatgagaaaggtgcaggaggtagcttgtacctgtgaggtctccatttggaaagaaggcccagaagtaataaggcacttcatcctttatgaaggaaccctccaactgcattcatcaaagcaagggttaataatgtcgatatatatgtaataacgcagcatagcagaaatgttggtatgaattatcaattatctagaaaaagcagaaatatttggtcattatcattccttgtaggctgtagccttattgtacaaaactatcacagcctaagcaaatgtttttaatttccttcagaaattcctacatcatcagcaatgctattgttcagaactaggctgaatcaaatttaaaaaaagcaatgagaaacctattccatgtaattaaatttgacttgtttaacattcatcgaacaattagctatgctatgctgaattgctttataccatctgtaactctgtaacttataccaagttgctaatttacacgtttcagtactaatcagtaatcacaaaatcaacaagcttcagacaacagtacttatgaaacagttagggatgctaatatgcagtgtgatcacttccctattatcatctccggcactagtcggcacactcaccctattatcttcgaaggagagctccacttgggacacgtcgtcctcagcctccagagctgccttcagcggggggatgatctcctcctgcatcatctccggcagcggcttcaccggaggcttcttcggcttcgcggccggcttcgctgcgggcttcgcctccgcggtggcttccttcttggcatcggccgcatccttcttctcactgactgcacaccacaccacaaatccatagtaaccaaaagatcaacaaaataagtgcaacttttcaatggcaaaacgcaaaacattggcatggtgctactatggcaaacatttgactgatctaatcaacactgatgcgtttctttcctaatcttataaaggatttacagtagctaagcaattgggggcggaccagtcgtggcggcggcggcggacgacgactcctgcacggcggagcaggaggcgccggaaccggagccggagccggagccgcgagggaaggcgacgaggagcggcagccgctgccgcccgaagacgagcgggatggcggcggagcacttgcacgccgccgcgtgccggccggcgagcgggctcggcctcacgaggcgtagtggctgggacgccatgggaaaatcgggcggcgacgccgatgaggtgaccgtctaaagctttcgttcttggcaggcagtggctcgccgtggccgtggtggtggttgccttccactgattcagttggatggcattggtttcccgccacaactcgctctatctgctcggaaactggagctcagtggcgaggcgcgagcagcacgattgcctgagagccagccattcgtttcattatctctttgccgtccgatcacaaccaacggttcggattagtcgctacagctggagaaacaatagaaagagaacttttttgggatttgctaaaaatatgtggccagtttttttgttaatgaactaatgattcacttaggggaaaaatactaatttatttgttccaaatcgacttggaaagaaaatactccatccgtttcaaatataagactttttgactctctctaaatttaactaattctgtagaaaaatattactatttttttcctagatagttagtcaaacttagattagtttgactttgaccaaagtaaaaaagtcttataagctaaaacagagggagtcataactttgttctagaatataataagttttataactataaatctaaacaaatgcatgttaagattataataaaaatactatattttgagatgggttgagatgggatagtatttagattttccaaaacatctaatttacaaacaaactccgtatctcacaacaaaccctatttttactgccgaaaatacttcccagtttgtgctttgtacttgacttggtgaaaattgaagcggtttgcgggggaggggcggagatgcaacggccccgtcggacacggcggaggcgccgcgtagccgaacaccaccccgcccgcccgcgcgtcgtttcccatccatccccttccacccatgaaactgacaagtgggcccaggtggaccccacctctccacccacaccacccccatggccccaccaaccacgtccaccctctgggcccggtccacgctgtacgcgcgagcaacacggcacgacgacccggcaccgtctcctctacactaggcggatgatctcccacgtcactgctctcacacccgccgtccgatctccgctctccacgatccgcgccgtccatacagggcatcacgggcatagcgtgcctgcgcggggccagaggccagagctatctgtagacacggaccacatggtcagacgagcgtagccaccccaaccggggccccacctcccagtcgccgtacgtgacatggacccggtgcacgtgattcaccgctcgaagcagagctatcgtatcactgacttgtggggcccgacgatcaccgtggtgggacccacacccaaagtatgcgtcgtctctaggcgcgtcgcccattctttaattcggatcccgcggcagagagacgtgtcaaagttggggagccagctgggggtgtgcgcctaattcaagccggtgggcccccaccaacgacgaggagggggagggcaataccgtcatttcaagagggagaagcatccaaggaagaaaagaaggcatccatccaaatccggccgaatctcctctcctccccttcgcctcgagccgctcaccgacaacgcgcac

SEQ ID NO: 7459 - DNA, 15216 bp, Oryza sativa
tttaaaactatttctcgagctccgaaattcacggaaaattccggagagtattttagggcacaaagaatattgcaaaatattcccggccaatgatttttaagggaaaattttaattctcccattatttcacttggataaattgatttaacttttatttaatttctagaaaatgcattatttaatgatttttaatcccgaacgaaaatcggggcgttacaaatctaccccccttacaggaatctcgtcccgagattctgggatggctagaaagaaagctggtgctggtcggcggtctgactgatctgcacattgaactgccacatcctgcttcgaactgattgattgactggttgatcaaacctgcacgattgaactggctggattcgacctttctgttcctttgctttgccaaaactggaccgactggttctgcttgaactgacccagactaggactgcggatgctcctgaaacttacttatcttggactgaactgttgaggttggcaattttggtaacctgagaattcaccacgctggctataagaggatgaaaattgaatctggcatttgtaaatcatttaccctatgtccgcttcgactggtcccaattcaaatgacaagtaattccaggaaaacctgcttgacctgcctttcgtctgtactacaactgtcctcgctgttgcttttctaagctaaactgttgacatgcttcacaggtgtaccttagaatcgaacctgtcgacctgagattggggtgactctgctgacaccttgcaactggcttcttcaagtactacccggattgttgcactgggttgaaccttcaactaaaacagcgacgaagtgagccaaaactcatctccgagacctaccccccttacatggagtagtcttactttctcctgactaggaacaattggactattgtccttgaaaaataaccaacacttctcttgcttacaaaggccctcactttgaaaactgaaacttcacggattcatcaaaatagagtaatgacggcgcactttcatcacagcaagatttggaacttaatcctcagttgctgatgggagattccacataaaagtgactctcatttagctcatgaacacactgactcttgactaactttcccataagttctaactactggcatgactgtcctgcttctatcttgacttcggtgtcgagttgcaaaaactgaactaaccgactctgcattggaactgacacaactcgaggagttggggtgtcgctaacaaagctcttgatgtgatgacgctgacgccttactgtggaacaaccctctgagaggtgccctgtcgtacatcttccatggatagttggacactttgcaaaaactgctcttgaaaaccataaccactataggtagcatatgttactcctgggattggtggtggcttagctgtgctgctttgctgaggacttggtggcgtactatctgaggttgtgggtgcttcctctttgaaaacaaattggctttggctctgatcctaattccagcttgcatctaggcttgtacatgttgttggagacactggtgttgcatctgctgcattggactctacggttgctgtatcaacatctgacacatccatcatctgacattggctaaccaaaatctgcccagagagaggtgctctgatttagcttgtagctggctgccttgaactgatccaatggctctgaccgcaacacactactgctggagttatttccgctacatttgaccaggtgtcgaacctgcatctcccacatcgatacacccatcttctgatcttggacaccaaaagttgatcatgagcagggttcatctggcgttggggcaccttgcagctttcaactaaaccattgatctgtggctttaattgatcttatctctgacactgaccatctgctgctaggacggaagagaggtggaagagaggggtcgctaaagataaggtactaaaccacttgcctactgatctgttgtgactacacttttattgttcaagttgcttaagcaaacaacctagtatggtcgcatccccaccaatgatgcaaaccatacccctacacacaagcaaacaacacacgatctagaaagctaacggaactactcttctgggaaagattgggtttaggtcaacttcgggaaaactccacttgatcttcgcagaacgacgactctgaactgatcttctcgctccttgcacgaagcttgaggctcgaattgacttgacttccgaacagacatgaagctgacagctggtcctctaggtttgacaactaaaagaattggagagattgggaggagaattttgaaaaaccgtttgacaaagaaatgccgaagggcgagaggagacatttttcaaatagggttttcagaaagcttgtccttagggtttgaccgtttggctcaacctacagtcaagttggctctgataccactttgtcacgcccagaaatttagcccaaatttccagactattttgtgtattaaatccctgtccaggaccagccagggtacacaaaacgacaagtaataaacagttccaaacgtaaataaagcgtaaaatacttacagaagaggcacttagtcctcacaccgaaacaaaagcagcagcagcggaaaaaggcgatcctagcggggcttcagctccactccacaggcaaaactcaactggggtctgagccttggtcctctaacttcgtcttcagctcagaagcactacgcttctgaaaaagggggaataatagcaagattgagtacaaccaccgtactcagcaagccacaccaacgatgcagacgtgcaaggggatccaaggatggtttgtggctatttgcataaaggcggttgtaaaacattttattgagcaaaacagtaaaactgttgagtaattaaagtaaattagatctccactgatcaacgctacaccacgttgaacaggcccaaccaacccacctgtactacagtgcattgggtcgatttattaggggtgagactaatcacggtgaatctggtcgatcgcccataaccgcgggcacggctattcgaatagttttactctggccagaggtgcacaactgtacccacaagacacaacccaccgacatgtcaccgcgtcatcatgtgcccatgatgcacacgtcaccatgtcgagtgattgtgacgagacccttcgcataaccctcccctaaccatccacaccacgctaaggtttcacccccacccctcaaaaggcagtgggcggtcccctcttgcgccgcggtgaatccggcagctggacaaccggacaccccggccgacccaactccatcacgcccaccctcgccaccggtgcctaggaaagggtcgagctatacttcagatcaagcagttacccattctcgcttgtggcaagcgctgtaagtcttccagggtttcccgtgaaccggtccttaattgccatgggtgcgactcacaaaaccatgcacccacagcccaccattcagtcgcattttagttggataattacgaccataaaacatggccaggtgtttcgagcacgcagctcaacaagatactagaaaggtctaaaactgtaattatcccatcaactgagctagtggtaattaagcatggctaagcatatagttctagctaggtcacataagtaacacaagctagtcgatttatcacccaaggttgacaaaggacagatatcaagtaaacatggcacaagcgagcagataggtaaaccctattcccatgtaattagcaagacatgcatgtttatttgcaaacggtaaaacatttataaattgggatcaacatgctcaaggggaatgtgtgacttgccttgcttcttcacttggatcttctaaactcttttcctcgcgaccgcggacttccgaaacgacggaaactacacgctggcacgcaaaacgaggaaaaactctaataaaaaccaaggaaacagtacataaaaactaaacaaacatgtagagctcaattttagatgaattttgcaagttgaatggctcaattcggagttcgaatgaattagatatgaattttagaagttttgagccatttaaatgaatttctataattaaactcgatttattgcgcaattattaattatttttacaaaggaaaaaggatctcgctgacgtcagcaaggggcagccggcgccgacacgcgggccccacacgtcagcgggtcaaggagctcggtgcaccgtggaccgggaccacaaggacggtccaccgccggtccacgggatggacggcccagatcgggccaagccgatcgggcagctgaggggagtggtggcagggcacgggcacagccagggctggcccgaccgaccacagagggcggcggcgcgcagacggccggacaaccggcggcggcggcggcgcaacgcggcgctggcacgggaggcggccggcaaagaggaaaaggaggagggaggcggctcaccgagaggcgcggcgacggagggagcggccgcggagggaggcggcggcgctccttgggtcgacgacgcggagggacgcacggcggtggatggcgagggcgaggaggcagacgaggtgcaacacacgacgacgaagccgacaaaggtgacggcaagcggcgaccgcggctatggcggtgatgattgccggccggaaacggtgaatggatgtggtggctcgggtgtgtggtgggaaggtggtttcggtggtggcgagggagagaaaaacggtggccgagcttgggcttgtggcgacgaagccggcggtggcgacggagcagtgctgcggcggttctagcgacgggaggcggcagccggcgctcacaaaggcaatggcggctcgggttggcagtggaggtggcagcccggtggtggattgggggagtgtagcggtggacgacgtgcggcgtggagtggtgatgccgacggcatgggttgcgcggcgcggcggtggcgctagcagcgacgaggtgcggctggaggcgacgaatgggtcggcggcctcgggtgcacggtgaagaagtggttccgggggtggaggagggaagggaaacggatgccggggtgaagcgtgggacggcgatgccgatggtggcgacggcgctgcgcggagatggcgagagcggcggctagaggcgaccggagctcgccagagagcggcggcgcgcgggagcggcgtggggagagcgggagaaggcgagggaagcgccggcgaggaggggaaacgagagaagggagcccggggatggattttataagctcggggagggaaaatcgttgccgggcgtggcggatttggggcggcaatgacccgcgacgtgggtgacatcgtgggcgaagtggagctcgatcccggcacaatttttgggggaaacatggggagagtgtagaggaggtggatgggaaccgatttcatgcggtttgggcgcgagggcgcgagcggaagaggccggaatcgtgggcgacgtgggcggcaatggcggcacagcggtttggatgagggaggctggaggtagaggaagggtctgacaagcgggtcccacggccccacttgtcggcctgaggggagggaggaggcgcgcagggacgcaaagcagacttggggaggggaggcgcgctgggccggcggcccgaggagagaaggaaggagggggaggaatttgggccgagcccgaaagggaggaaggggaagaaaggagaattaaatttgttttctttttatttaattggttaaatgatctttgtgactttaaaactatttctcgagctccgaaaattcacggaaaattccggagagtattttagggcacaaagaatattgcaaaatattcccggccaatgatttttaagggaaaattttaattctcccattatttcacttggataaattgatttaacttttatttaatttctagaaaatgcattatttaatgatttttaatcccgaacgaaaatcggggcgttacagggggcgtcgggcccgagggtgatgtgttcgccctcctctttgtctccccgagggggttgggccgcttccgcctcggccccgagggctggggcgccccgaccccttgtggattttgcgccgcgtgtatgggttaggtacggcgctcacctaaccgcatttattgcggtttggacgagcgcgttacgccgcatgtaacgcagtgcagcgcgctcgtttatccggtctgtgaccagtcacagaccggtcagatcatgggttaggtggcgacaggcggtctgacgcacgcctcgccccatcccgtcaggacgagagcctccaagcactcgtccctagccggagccggcgtgttagctcctgaagatggcacgttggttccggtcagatatatgccaggcttcatcctaaccattacaggcaagatattgtatgaagaagggcgaacatgcagattgttaaactgacacgtggtggacaagaatgaccggtctgaccggtctgacaatggtcatgtcatcagcagacagccatgtttccacgtcgcgcctgcttccggcggaagtggaggtaggtatgggccgtcccgtcagaaggtcattcggacgacggcgatgcaaatctccgtccgttaatgaagagaagtcaaattggagggaagagaggatgagtccccacacaaaagaaagagagggagagatggtgcatgtgggatccccttgagatataaaaggaggaccttgcccactgagagaaaaaagaagaaaaaggatccgagcttaatcgggggctggctggcattttgtagcttcttcatacacagatccaccaaaacacaggagtagggtattacgcttctcagcggcccgaacctgtatacatcgcccgtgtcttgtgtgtttccacgatcgcgaacttttcacatacagactaggagcttagaatctcacccagggcccccggccgaactggcaaaggggggcctgcgcggtctcccggtgaggagcctcacgctccgtcaacagttatagagcacctcaaagaggaggaaggacaaaggagggaagatgttgctgggcaaggtcgcaggcaccgaagaccgcattcgtcgaggccacagcccgccgccggcaccacagagctgaccacgagccgctgatcggtgcaccgccagccgggaccagctacggtgcacaagctgtcgaggccaaagccttcaccgccggccgtaggggggtgggtgggtgggggaaactaggcccgccgccggacgccatcgtaacctccgccaccgtggcctccgccgctagccttcgccaccgctacctctgctgccagtcaccaccgcgtcttccgtgcgcgccgacctcctgcgccggctgccgccagccgccgagtcgccatacgccgccacctccgcctcacatagtcaccgcacgggagcggctcgctctagccagatccggcgtggaggcgtcggatccacccacgaggaagccagatccggccgcggctgcgtcggatgcgctgcctccaccccacgtcatcggactctccttcgcgcgccggcccgccttccacgcacagagacggggcgccatcgagtcttggcctcgccgccgccatcccggctggccgcacggaactctggtagcacactctggtggcggcgaggggagagagaggaggagaaagtggcggtgggggcgctaggttttcccccgagtcgcccgctccccgagtcgcccgcgcgcgggcgacgtgggggccaacagtttcttcatttgtaacagtattgatagaccagagtctgtcgcgcgggcgacgcgggggccagcagtttcttcatttgtaacggtattgatagactagagtctgtaaccgtgcatgtatagtcagcttccttgcgcaagtggatcaggaaggatgacgactccgtttttacatcactaaagaaattcgcagggaatttttctaaaaaaaatggtgaggaagatacgagaacagaataatctgagaacccaagcaatggccttgcggcttgtttggttattaccctgataagaatttgcctgacctaaaactagcctgacttatcttagtccttgtttggttgccacactgagagctcttctcctcggccttggcctgacggacccgggcaagtgattagcctgagctctacgcacacgcgcgcaacataaattaatgataacccattggagcgagtgttaggaaacgatcggcagataaacgataaaaaacaatagaacgattggcagataaatgataaagaacgatagatcaatcacgaagacacgagatttaacgtggaaaactctcctaaaacaggagagaaaaaaaccacggttgccagtcagcaaagatctttactatattatgtgagattacaatactgaacagcggcttacaggaagtatatatataggtgaaaccctaaaaggataacgttctgtatcgcttcgctccggcccaagcctctagcgacgggcctccgcttcgctccatccgaagttggtgtttatatgtgtgtaaatgaatttgtatcacaactcaccagcgaggacccctgtgcgcagcatgaggcccatagcaccactacaccttcgccgccattgtcgtcatggcgagaaaagcccagacctccgctgtcgtacgtcgccgcgtgaagcccagacgtcccatctgccgctgtcgtcgtttcctgaagctccactgcagtgtcgtcgtcgcgctagatttggccatcgctatcgcaccgaagccaccgactgctgcttgctagattcggcgttgtgcgcgcgaagacgccgcggacgcttagctaggatgttgattcgctgagttccggtcacgcggcctgcctttccgcacgaagcacgcaacaggtcagcaggtattgtcttcgatggaatcagataactttgtacagtctgcagttgtgccactgatatgtgggccccactttagtatggcccacatgtcagtggcataactgcaaactgcacaatattagaggagtctcatccatcttcgatgctgggtgttcccaacccttctccctcatattctgcgtgcacacttttaaactgctaaacggtgtgttttttttgcaaaaagtttatatacgaaagttgcttaaaaaaatcatattgatccattttcgaaaaaaaatacttcctccgtttcacaatataagtcattctagcatttcccacattcatattggtgttaatgaatctgaatagatatatatgtctagattcattaacatcaatataaatatggaaaatgctagaatgacttacattatgaaacggagggagtacctaatacttaattaatcacacgctaatagaccgctctgtttttcgtgcgcaggagatttgttctcaactgcccacaacgaacacagcctttgacatgaagttggagtttaatttgatgcattctcctaattgtttcccctctttagatatgtgatagatttgtcatttgcacatggaaagctaggtagcagatagatttttggtgggccatgcattcttgccaatcccacattgataattgatggtggggaagcacaacttaaaagatagtctcatccattagacaagtcttttgggttgtatagtcttaagacctaaaattgtggcctcagtcgagcctgtggcggagcgagcccaatgtgattcgggtgacccacagtaagtgagccaggttgcgcactctaacaaatattttgcatcttattccgattatcacttgacttagggcctatttagatcctccaaaatggcaaaagttttatcattttggagcactttttaccattttagatctaaacactagtagcaaaagttggcaatttggcatttgtcatttgctagtctagggtagcaaattttgccaaaaatgctctgggaccatgcgcgtgctctctctctctctctctggtactaaaatggtaaaactttaggatgcatctaaacaccaactacatgccaaatcttttcccaccaaaacttttaccatttaccatttgctattccaaatgaatcaaaacggacccttagcaaaaattatgtaccgcctaatcatacttctcaggcggcagctgcaaatcgaacaatcaaatatcccgcctgcctgaccaggcaaaaaagtagggggctgtttggttgctgccctcgcctggagaccattgctcaggcaggtcgatccgaccgcaggcgaccgaaatcggacgcctgagatcgacgcctgagccaggcgcgaatctgagggcagcaagcaaacgcgccctagaactcatctgtcaggcatgaaaaaaaatctcaggtatgctgttcaggataccatggtcaggcggcagctgcaaatcgaacaatcaaatatcccggctgcgcaaaaaataagggggtatttgggagagaggggctaaactctcaaaaacataagtccctcccataggaacttatatttttgtgagagagactaaattgtttagccccactttagtccctccaaccaaacaccaactaaagctcatctgtcaggcatgaagaaaagtgtcaggcatggtgttcactgttcaagtgttcagggtaccatgatcacacaaaaaatagaactcatcggagaactgtcaagcatgaaaataaataccaggcatggtattcaggataccaaccaaacagacccttgatgccagcatgatcgaagcatggaactggcctgttgggcttgctgaaatgggccgagatcaaggcccattaaaacgccacgtggtcacgtggagcgctgctctccctccttggcgggcacgccaagcttagcacgcaccgtaaagtccaaatttgaccagtcaacaagtcaaagaaaggcacaactccaccttatcatctccactatataaaattcattttcgatcgatcgatcgctcactcacccacttgtctcacactctcactgagctcctctgcttctcgcatccatggccgccgccgccacgggccctgtccccttcaaggacgccgacgacgacggcacgctcgccgccgccgaggcgcgctcgcctctcccgaaggaggagttcggcgacctcgtcgcggcgctgccgcggaaggagcagtacctcgacgggcggctctacgaggggttctggctgccggagcactacgcgccggggatcatcgcgttccgccgccgcttcacgccgcgcgccgacgacgtggtccttgccagctaccccaagtgcggcaccacgtggctcaaggcgctggccttcgccgccatgacccgcgccgcctacccggcggacgaacacccgctgctccgcctcaacccgcacgacgtcatcccgttcgtcgaggacgtcttcaccgacggccacgaggccaagctcgacatgctcccctcgccgcgcctcatcaacacgcacacgccgtaccagcttctcccggagtcggtcgtcgccggcgacggcggcggcggatgcaaggtcgtctacatctgcagggaccccaaggacatggtcgtgtcgctgtaccacttcatgcggcgcctccagcccgacctgtcgctcgccggcgtggtggagtccgtcgccgacggcacggtgccgttcgggccgatgtgggaccacatcctcggctactggcgggcgagcgtctcccgcccggaccgggtgctcttactcaggtacgaggacctgctccgcgacggcgccgccggcgagcacgtcagggcgatggcgaggttcatggggcggccgttctcggccgccgaggaggccgccggcgccgtagcgagcgtcgtggagttgtgcagcttcgagaggatgaaggcgctggaggtgaaccggcggggcacggcggggtcgtacaagagcatgccgcgcgacgccttcttcaggaagggcgtcgccggcgactgggcgaaccacatgtcgccggagacggcagcgaggctggacggcatcttccgcgaaaaattccgtggcacagggctcaccattgttccatgacacggatcgagcagttggccagcgacgtcgtcgtcagtcactgacatgtgggccatagcaaagtggaacccacatgtcaatgacccaactgcatgtcagaggatctgcttccgtgtgcttcatttcattgtgattttgctgctgtttcggacatttttgtttggcatcgcttgtttttatttgtgattacccacttttctcggttccaatcatggaacggagatgtgacgaaaggcgcatcgaataaagaaatgagagtgattcgggcttgatcatcatccacttgattttgtgagcatcatgatacaaattattaaatgaaatgatgtattttgtacgaaaaactttaaaatataagataaatctatttctgagtttaaaacaattcaaacttcgagttatgaaattagtttttttattcgtgtccgaaaaccccttccgatatccggtcaaacgtctgatgtgacacccaaaaattttcttttccccaactaaactaaataaggtcttattttgtttgggctatttattgatttgggccgagtttgtttgttcgttttggacttttttgtgtgggccatgtgttctgcatttgcccaagtcaaagccatgaaaagatccaaaagagatggtggttttgatgaaacaagcagagtaagaaaacgagattgatcaaaaaaacaatcacacacaaaaaaagataaatcagaaacacagcatgagcgaaatacactactagaaaaataattttttatggtgttggtcaataattttcgctggcggaaaaataccaaaaccgccagcatggtcgtaacgagggggtgaggggtaccatgttatatcggccgccaacgaagatatgttcattttcactggcggtcacttagatgagccgctaacaaaaatggataatttttgctggcagttgggttaaatagtccggtagcaagttacaattatttttgctggcggcccacttaatcaaccgccagccaaaattgatttacactggcgctcttaaaaaaattcgcacataaaaaaatcaccgcgcgcccatacctttatccacccaccactacagaataaaaatatctccacttctcccctccaaatccagatccacttcctctcctccaaatccaagcaccctcctctcctcttcccctccagatccacatctcctctcaggcggcgactgcggggttctcgggtggcgacagcggctccggcagctatgcgtggtggcgacggcgacgggaggcgggcacgtagctgcgacgggaggccgtcgtcgggggggtgcggcgacagcaacgggaggagccgtcggggggcgcgacgagctccttcttctcccctcccccttccacagtggcttggtgctgcgatggttgcggcgacggctcgttgttgcgggacatggcgagctcccccctcccctcccctcccctccccttcctctccctctccctctcccagatctagccggaggggagggggtggcggcgaccacggcggtaacggaaggcaggcggtggtggatctgacaacggggtcggcggcatgagagcaaccgcgacgacgacgaccgtgaccgcggcgacgacgacgacgatgctgcgcgccggccgggagcacggctctagcggcttcttccctcccctccttctccctttcccaaaggagaggtggaagcggtggccgtagcggcgacgacaggtgggcggcggcggcggatctgaccgcggcggccataattattagaaccggaccggaccggcggtccggccaggaaaaaccggaaccagggcaccgcccggtaccgcggcagccatagttattagaaccggaccagaccggcggtctgaccgggaaaaaccggaaccagggcgccggccggttcggttcagatataagatcagcgcgcaatcaaaccggagagaaaccggttgaaccgggcggtttactgcagaaccggagaaaaaccggggtggttcaaccgcttgaacggcgtcacacgtgaggtggcgacgctgtagagtacatgcgtcacatgaattagagaaaataggtaaaaaaaagctgtagaacccaaaacctccatgcttccaccgagaatctctaccagcaggctatgtgatgggttgtgaaacaactataacacacacctatttgaacctctttaaaccgacggtttgaccagtccgaccaataaaccagtgacccaagtgacttaacggttcgatcaccggtctggtcttaataactatggcggcgacgacgacgacgaccgcaatcgtcgaccacaaccgtggcggcgatgacgacgacgccgctatcgacagctctatgcgtgggcggcggttgtgatattgatgtttgcttgttgaaaatgtggtgaaaattgatgtattgttttctgcatgtggatttgaatatggatctgatgccgatttgaattgattttgagtatggattgaaaaaaatccaactgctcaagaggtcgattgctatttttttattggaaaaaaaatcttttcgttggcggtcctcttaaggatccgcctgcagcggttctcttaagggtctgccagcgaaaatctattttcgcaagcggtcctcttaagcgtccgcctgtgaaaatcctattttcgcaagcggatcgcaactgccagcgaaaatcttagatcttcactggcctttgctttgtggcggctccaaataccgttagcgaaaacgcaaaatgaccgccacgaaaaatagttttcctagtagtgataagaggagatcgaataaaataaaataaaaatccagaagtgttttaggtggaacctgaatttggttggttacggaggtaatcttgaccctctcacgcaagatttcgttgattttgcttactctttgtttacttgatctcaaccgcgtcaactttttttttgttcgatttgttctactactcgatgaaacaattgcagctctgtgaaacttcaagagaagcctccattgcttcattgttggcctttttattatcgacgtttaatcattctaccatttattaaaaaaaaaaccccccacttttttttttgtggggggggggtttccccccccccacataagaaaatttaaaagaaaattccattagcctcaaatgtacaaaaagttactttggctttatcacagagtatgacaatatc

SEQ ID NO: 7460 - DNA, 18720 bp, Oryza sativa
  unsure (1)..(18720): unsure at all n locations
acttctgctgttttatcccaaaataattgcctagcgattcatgaagttggcacaagtattataaatataaagaaagtaggcaaaataaaatggaggcaattatttattaattaagaaaaaatatgtggagaaattaaatgcgagatggttgtaattagttgtatgtagagtaagtgaagatatattaataggatttattttgtatgccaaaggttattatgttttttgagaagggtagaactaattatggataggttgctctattttccaaggcttatggagattcctgtgagctaacagttaaataaggagtaaagccattaccctttttttttctcaaagtactattttggaatggtaatgtgttgccaaatgataactcatagatactactcgctagctctatcctaaaatataaaatataaatacttctagaatttctggattttttacagcaattaagaatagacgtgaagttatatgagtgatggatatgattggttgaaacaaataagtagtggagaaattagataatagatagttgctattggttgagataagtgagtagttggagaaattagatgatagatggttgtgattggttcagataaaaaaataggcggaagataactatagttttgaataacgctaaagatagctatattttaagacaaagcgaataggatgttccttttgtttggacaacacttgaaacttgatgttgcaacattgagttcttgagttggaacaactgcttttttttagttggaacaacagtcacgcggctctaaacgtgttgggtgctttctttattttaagagtatagatgggagattcatacacttatacagtgacatatacatgcacaacttacaaatgcttggagctttttggagaaacagggtctcccaagcatgtttagggcatgtttgatcgttggctggcattgtcactattcaacctgtcacgagtgtagtacggcacacaaagtgtgttaaacaattcattggccacaagtatggtaatgtttagctagagaataagagtatggcatgcatgtggacagtagacctatggagcaacaaaatgtgacttgtcatagttgaaacaagtaaccaaacaataaacaataaattatggcgtgcctaacatgtggtgtaataatgtgcatggcattcaatcaaacaaccccttactacttgaacaaaacaacacaaaaggtcatcaagcaatggcttagcacctagggcaaagggggcatagaagagcggcgctagtttagctcaacgtagtttgggaatgagaaggagttgtggaggtttaagagaaaaaacacatctcctaaggagaggagggggcgaagaggccaagggctaaaaggggatcatggttcacgagttgagatgcacactgttgacccttccatgttagtcgcaacaacagccactacagagagtagaatgaaggagatatacgatggcacggatggttgctgatcaaaaggcctaggaaatacatgaacaaccatggacggagctaggatttaagcatggagtattagggtgataggccaaagccaatatcaataacaattaatacatgtataatgatatatcgtctccacggtcagataaaaaaccaatatatgttttagttgttttactcttcatcttagttgagcaattttaatacatggttggaattgaaacacaagataggaaatcacaaaattgagtacttattgcagttaggcaagaaaccaacatgtgttttaatctcttcactttcatcctgttgagtaattttaatactactaaaattgtaaaaaatatatatatagaaaatcacaaaaccgaatctcatcgacggactctagtctccacatagggactaaaaaaagagtagaacttacaacacaaggatttagtaagattttatgatatgagggagaacacacctgtgggcagcggcttggtggatgaagggtgccgacatggtcggactcaaagactcggcgatgaccgacaacaaggcgtgatcgccggttggcgtcagagcaaaaggaggaggggcatgtcgccggcgcactccgcgtagccatgtgcgaagcgaaagagatgaggcttcagaagaagcttaggagttgaaattaatgtgtgtcgaggatgggtgggtgggtgtgtgtgggggggaggggggagganganggcccgtncnnaattagatggggatgtgcggtgtgaacaacgtaactataccaaaacacgtggacgagctaagcgcaaggccatacaatatatgtctacgaatattgattttatatattggatttgaggcttgttaataaagttgccccttcactattttgcaataagccagcttccttcactgtntattatatatttctacaacacaaatataattgcaatataatacgcatttttttacaagtagtaaaccttagcatttccgaggatataaatagttatacctttgcatttttttttccatttgcctcttccatcattttcatgtaccattccatgtgtagctagaagaattatagtttctctctctgaagaggagaggaaacctcagaataaatttttttttttggctggcatcatgcaggtgataaaacggtcatgaattttggttttattatgagagctaccaacaacctcattgtcctcggctgccacgtgtaacggtgccgaggatgactccttcccaattgttttgtttggctgacatgtagggcccatctcatagctaaagttcctttctagacaggactctccagtggaggtctattctattctaccactctaccagacgcctttgtatagtagctcctgcagtcagtgacgtagaattggccgatcactctataattttaacaaaaaagatgtgaaggaaaccatcgttgatgcagcaactctaatactagcgcgggatcctctaaaataataaaagttttatcgttttggaccactttttagtaaaatggatccaaatactagtaacaaaaagtaggtaagttggtatttgtcatttgggagtccatagcagcaaatttggctaaaaagcaccggccccgtgcatgagagaggcagcagcaattaatagcaaaactttaccatacatctaaacactaacttataaaattgcaatgccaaatcttttgccaccaaaacttttgctaaaaaaatttgctgtagcaaattgatctaaacatgctcttatttcgtaaacggtatttctatctaaacacacgtaattgaataatgattaatgaatactccagtatttacggccttgagcaaagttttgatactacatttttttaagataaaattatctagttcatatttagcttgctactaatatgaagtaaattagtcaaatcttaatagatggcgaagaaacatggagcatgtgcactaccgattatttggcttcaatttaaaccatcataattaataaattacgtttatctataaaaaacatccatatgttttttttcaatgaaaaaccaaagaattgaacccaaaagattaaaaggatggtgttatgatggtgatgctattattctattctagtagataaaaaaagagagaaatatctcaacatcatggttagcaagtatgaagtaacaaccgagcaagtagagccatccaaaattaatagtttgatatataatttgatactgaatatagctagagccctctgttttttgtttttgttaatggaagaagccttgtttttatctgaacaatggcacaagtaaaagtaatgttctggtccttgattttgttatacaaccatcctgtttgattagcaagtgccagccaacggttctatgatgccagcatgaaagcacaaaaggaagaattttcttttgctttctttttttttccccatgatcagaaggtggcaaaagcttgcttccttaatcaatcttagtatctttaggaaacctctatttttccgggatggtttgtccttagttatgttgtacattatacttggttcatgacatcacctgtaaacatatctatcacgctgcatcttgccagatacgtcatcgaagaaaatgatctacataatttattatcatttgagttagagttctatttagcaactacctttccactgagcattgattcgatgctaaagtactaggtcattaaagggtagtgttaatgattaaaaataaagaaaaataatgcaagcacgcccgaccaacaaatccagatgtgtgccatgatatttttctttacgagttaaatgtgcatgtgcaatactacttttttttttcaaataacgcatgtagggtttgttttgattgcatctaattttcgcggtttgtttgattgcatccaatttgtgcgctttgtttggactaaagtcaatttcagccctaaaattttttacaactttaataatattgaatggatgcttggtttactgctaattttttccacattagtaaaagttctattctaacaattttaggcgttgttcagcagtggtttttgcagcagcagtagctgcggcacgtgtttgcggctgcgacgcataactatggctagtagctatagctgcagccgcaaccgaacaagattttagtggtgccataacttgataaggttttagtactactaatattttttaccaaacataatacaaaggtagaagctcatataaagacatgcaagctcatccgtgttgcaaatatttaaaaaaatggcttcaaaccaaaattataaagaagctcctcatgaaaaatgtgttttcttacatatttgtatccctttggatataagttctttatataaaagtaggaaactaaaatgcaaacagaaagatgtagtaggaaatataaaagtatgctacttgcaccgtacaactctatttttaaaccactaaaaagttccattgtctttaaatagagttgttgccgttgtttctaaatagttgtcagcatagttgtgcatgtgtgttattcattctcaatacacgttgactttttaatagggacaagtgtacttatagattgaaactttataatactttaatataatttgtcatgaattatacgctaatcatgatttgttataacatataaaaatggaaactaacagtcaaaattaacattttgacacaagacaatcacttcctaagaatcaacaatgaaattacaatatgaacttggacatcgaaatacaattgaagttaatttactttgtaaagagacaatgttagcctctcaataaaaaccgatcgaaaaccacgaaatctcgatatttcgatgtgtgacaaaaacatattccaactaaaatctttttaaatgattttcagccattaaaatttaataaaaatagtaaaaatcgattaaaacttaggagaaaaaaaactatcacaccgcttgaatccagattcggctctgatatgcatggccctgttcttttctccaacaaaagttagattaacttttggatactcgtggcacgcttttcaaaccgttaaacggtgtgtttcgtgcgaaaactttctatatgaaagttgttataaaatatcaaattaatctattttttaagtttataataattaaaactcaattaatcatatgttattacagcctcattttgcatgaaacacttaattttcatcttcatcttcagaagattcaaacaccaataataatagtttttccttattgtacaagctgaccacgaactccaactcgaaccggacagtttttcctttttaaaaaaaagctcgaacctgaccacatcttggaccaaactcaaacccgaccccggccccgacgagtcggaactcgaagcatctcgcctcgccgccgccgccgccgcacgcccgacggaagcgagcgcctctctctctctctctcaccggcgacgggatcgacggcggcgggggcggggatggtgggctggctgaaggcgctgtgctacggcgcggggggcatggcggtggtggggctcgcggcgctcgtggcgctgcaggagcgcctcgtctacgtgcccgtgctcccggggatcgcgcgggcgtaccccatcacccccgaccgcctccgcctcatctacgaggacgtctggctccgcgccgccgacggcgtccgcctccactcctggttcatccgccactcccccacctgccgaggcaagcacctccacatacctcctctcgacctctcctagattttgtgcagttcgtggtttgctccctggtgtgttagtacttaggttagcctttgtttttgggtctcggttggtggatctctgtctgcgaggcttggttgggaaggcccgcgttttgatccgattcgcgtgcgtggcttcatctcttagcttcctcgatcgcgattggattggcggatctcggtaggaaattaggaattggggtttcactagaaaaaaaggggggcttaatggtgatgaaatttgtagcgggatgatttagttatctcccatgctcgcgaagattcttttgtcaatttctagggtttctgtgtaatttggttacataggtctgtcttgtctggagtatgaactgattgactgatgttatgatgtagtttagtgggaattgagttaacaagttccctttttttgggggtgattttgtagttgatactctttgttgtatgcgatgcgatgtgttggtgcttagtattaggatttctctattgttctatcgtttatatgctctgtagtgcaagccccataaatgttcaatgtacgataggtttaaacttttatattgtgatgaagaattgatcgtgcttcgttgcttccttcccattcacttgttctacagtcattagccaatcacattgcaccatatggtttagtttatgaacttagttttggaagacatgcagtttagaaagtactatactgctttccgacgatagataacagcatgcgtggctaccaaaatagttcatgtgagcagagttgattgaagcaggcgggggttggaaattatactggcggtaatttgtcgatgagaaaaatgtggaaaatgctacatatacatccaaaatacacatcagcatccttggctcttggtcccaagaaacgtgccacacaactgaagctatcttctgattagctgacctcagttgttgactccttaggcccacaccacaaccaaaacagctagctttaaaattaatgtttacacatatgcatgctataattattcaaggcatcaatgctagttgttagtgtcattgctataatctagctagtgatatactagattatactgctaaatgtataccatgaaccagctattgttgtctatgcataagttcgcgttcttctattttgttggttgaacgcatcatgtgctggtgttttgagttgtcatgctaggttagaagagatttgattatgttctttgtttctaattagatttcataatgcttaattgtatgagattgcaataattttaacctttaggagagcatttgaataattgttttgatttttatcctcttgcgcaactgtcctcccgatccagcattcctatgatgacatgaaccttatactgtgtataactgtatattcttacacattattctgctcattcttcagtactccacaaattttacatcatctttttatggcttgcttatgtgttttccttatgcaggtccaactattctgttcttccaagaaaatgctggcagtatcctgaaattttctatatagacactgaaagttataccacattttacaggcttatagacgatggggttatattcttttgaattcctttactcttaatagatattgcacatcgtttggactttgttcgactaatgatgcaacgactacagtgcaatgtatttatgctttcttacagagggtatggttctcaacagtataaactagttctgttatctttgttgcaccctttttgctcaaagctctccatatgttgtgggtccaaacatgcttcttcctccattcactagtgcatctaaaccttgaattatatttgtaggtatggtgagagtgatggttatccttctcagaagggcatcataaatgatgcacaggtttgctgattcgttcaatcggttttatgttaagttttctgtttctgtctattctcttactgctctctttttaataggctgcacttgatcatctagttcagaggaaggatattgacacatccaggatagttgtttttgggagatcgttaggaggtgctgttggagcagtgcttgcgaaaaacaatcctggcaaggtactcatgataggaaatcttgtgtactctcatgtttctgcataaaagttagggaggcccctctgttctctctgctattggatggatgacgctagtatcctccattgcacctatatttcatgcctaagtaatgtgggtcaacatgcacatgtacatgaattagggatcgatcagcttttccaattttgttctgatacagatctagtaaaaaaaatctagtttactatgtaatgacattatatcacggtcattactccaccagcaaatttcaaattcactgatatattgaaataactactcctttgtagaaatttgaagaacttagttttctttggaagtgtggatttcaggattccttctccaaacatagtttcaccaaagaaaccgaagttttatgtgcaatctgctattttttaagttaaatcatatcactttttaatgtcaatattaaggattgaagggaaaaggtgaactgatctatgtgatgaagagtaatgtcagcagcaactgtgtgtaacacagtgatcccaagatagactgatagagagactatagtatctttaatattgagaagttcccactggcaatgaactgctttctacttgctatacattctttttgtagccacactgaaaaatgccccttcttttcaagtgctagcaaccaactgtagtgtctgaaagcaatgcacaatcttgattacattgtactaacatgatatgatggcagtggcacgcatgtttaacaaaggaatgtgttataaggcggctgggacagaatctcatatttattggaaaaagagtatctcctagatctattttcccccttaaaatagactggctgcaactggctaactaatatacgtcaaaacaactcctattctctcatccattaagggtgtttggatgagataatcttcttgaagtaaatctgaatatcttgaaggtatgttaaattctgattttcgaagtcgagtaaaattcattgtatgtgttgccatatgttgcaggtgtcagctctaatactggaaaacacctttacatctatattggatatggctggtatcatgctacccttcttacgatggttcataggtggcagttcttcaaaaggtccaaaacttctgaactgtgttgttcgctccccatggagtacacttgatatcattgcagaggtgagtgactatatcaacatccaagatctattgttttcacgctttgattaccgctctcattttcttcttttctattttggaaaattagattgtaggttgcatatctttagagaatacatatcaatttcttatgtgattcaaatattctaatttgcttttttggcatgcatatttgaaatttaagctaagattttttttactacattatttcagctactgtatatatatattgacaagagttagaacttagaattattaaaatctataaggcctcagatctttgtaaatactctttccactttttggttactattttaccgagacctgatgctgtgcgttatctattgcctagttgatgtgtccctttcttatgctcgcttaaccttttcctcgcaggtcaaacaacccattattttcctttctggattacaagatgaattagttcccccttcacacatgaggttactatatgaaaaagcttttgagcataataagaattgtagatttgttgattttcccaatggcatgcatatggatacctggaattctggaggagaccgttactggaggacaatccaactgtttctggaccaatatgctccagaagtacagagttgtaataccagctgcaaaagtgaaattgctaatgatggtaattttctatcttgtctattaaaaagtttctcaagacagttctgttatcaagttttccatttgctttgttgacagggtcaatttattctgaagttctgtattgtgtttactgcattagacttttcatatgccgacaaatattttttttaataaattaaatgcacttcttttggatactacccatagttcatttatgttgtttgcttgccatttgctgcctggctttaccccttgtattgggtgactagatttaaatccatttggattgggggggatcagaacccattcattggatggacaattttctctgcccatctgaagggatttagtatttgtttgcttgaacaaatcattatgtgatgatcggtgattctgtctatctgtgtacactatgcagttttagcagtgttgatgtctgactgctggcaaatattttacccatctccttcaaattttagaaccacgtactatttttgctgttgactggagaagtttgttttgacgaattcaatctttttctagatgaagctgaagagtgaccagaacatctggagcggccttcttttttttttcttccaggctccagttttctggtgtgatgcgatttaaatcctgatgaactgaagctcactgcaaacaattaattcaggcaattattctccattcaacctgaagaaggcaaagttgtgaataccttgaggttgctctccatcctagcactacatttgtctctggagctatatatagatttctgagaagacctagcctttgaactgatgattccccctcccccccttgatttaatctgtgatgttgctttgttgaagttttttacaatatactgtagcgcattaccatgtcataatctggcctcggtgtataacagtgtaatgcataggtttttaggctctggttcagcaatttggttttgtgttttttattattggtgttatagatctggttgcctgcttcttaagcctgttataccaaaactgttgcaatatcaataggccatgtcttcaccggcagtaattttttagcattacacgaccttattgactcgttgctttatccagtttgatagttgtaggattgtcacgtttgaagagtgaacctgatgcatttttcttaacactggcatctactatgaaatgaagcagcatgaaggaactgactttgttaattgagtcctcagctcgaatttaggcgcgtatctcttttcctaatcaaatatgcacctaaattcacaattttttttggtttcctgtaaaatcaaacgattgtggacacggtttggaatggagtgcgaagatggtttgcattatattaagaaaccattcagttcaattcacgcgaattcttttaattttatttggtaaggtatcagacttaacggtacccatatatctttactaaattttagggtctagttggtagtgcttaaactcctaaatttaacttcaaggatgaagctatggagctatctaaatcaaacttcatctcaatagttcattttttgagagtattctaactatgtttactcctttttggatggagctaaaatcgtaaactgttttgttgagctacagttctagaagagatgaagttatgccaaacgagacgttggcattaccaaactttaccaaatttggatgctcgaatttagtagtagcgttaattttggcaaccgaacaaactacacaagccgccgatatgagtctgtcgggctgaccggtgggccccacgcgccagtaaaatctggaaaaggaaacaaaaacgcgcccgccccgcccgccctaggcttagcctaactaagctgggaagggggtggggaaatttcgtcgtcgcgatgggccggggcccaccaagtggaggcgcgggggggcgcgcggacacgccccgttctctccaatccaaccacttaagtcgccttccctccccctcgcgtccgcttccccctcctctcttctctcttttaaacccctccccctccaaaagataccaaaaaaaaaacaaataatgtcagaataaaacgcggcgcagcacacaccccagctcctcctccggcgacgagaaaaaaaaatggacgcgcagtacaacccgcgaacggtggaggaggtcttccgcgacttcaagggccgccgcgccggcctcgtccgcgcgctcaccgcaggtacgcgccgccgccgccgccgccgcagccggaggtttttctagatgcggaccgtttcgagattttttttttatgctgttatgttagtggggagttttttttttggtttttttttctggggttgtaggatggttcgctgattggtttggtgtggttttttctcgctgcagatgtggaggatttcttccggcaatgcgacccgggtgagtggaatttctttttcccgcttctgttttttttttcctgcctttcgctttcgatgcgcgttggaatttgtacagggaacgcatttgtttcgtccacgaatgcgcttagctcgctgcggatttatgcgctgcagtagaattccgcgcaaatctccggtttattttttgaatccgacggtttgaatctgtgtctcgttttgaatacacgagtactactagtagttaagcagaatacgcgtcagtacgtgaagctctcggaagtcagaattcgaatcaaatgccctaattcgtgggggtttagtgggtaatggacggttgagattaacctaaaccgacacttccagtgagaatgtgagagtgagaccttcaacttcacactcatgaggccatgaaagctatagcaggtagcagtagactagtagcttggcagtgaaatggaccaagggaagaagcagtagcacttggcctggaaggcgccacaatctgtggaggctgctgctacatttgagtttgggatttttggttgttgggttcagcagcattagtggggtcctgtttggtaggtggggtttgattcttgtggcctaaataatggggggttgatgtggtttctgggattcttgggagcacatgtcacaggcctacaatggtaggaggaggtcaaccttgctggctttgctgcaagcaatgctgcttgtggtgtgtagtaggagtacagaagtaagccggtggctgggcagttggtgttgtgaccagcgggttgtgatcccaatggttcttggctaaacatggggtacagtacagctccactgttgcatacagccaagagcggtgctgtggcccgtggggatccactggatggtggtggtggtgtgtgattgattttgatcccacaacaaagacccagcatttgatcctataaccggcagcattcacccatcctatcctcaatttagcctctgttgaaacatcgtgttgctgacatcatgctgcctcgtgtcattatctctgctttcttctttacattagaccatcacaacaccactctctgcacactgtactgcttggtccattgaagcctgtaagactaataaatgctctgaacaccttactgtggaacgtggaggaggtcaggggagggcattgtgcagtgaagatcctcagttgttcccaaataatgaaagttgtccttgtgtggattgggcctttgtttggtgaattacatcaactacttgtcatttaatgtccaatatccatgaactggctagtggaaacactgcttgaagcatttggttaggaaatagggtcttatattgaagagtctattctcatggcaatggagcagcaaaatgataattttggtgagcttgagtcatgcttattttgagttcatatatatgccgtgaaggtatggaagaagaaattcattgacaagtggtttcacttgcggctatttgatttcaaccactaaatttcttaataagttgggttccacctgtttttataaatgtgcaacatgtttcttcctaagccatagcactttgtaacagattgatctacatgttttcggatagtaaattgtagcaaataccctaaacttggatacttttctcatatcttttgagccttagttgaattattgttttgcaagcccacccgtttctcctatgttacaaccgtcgttaggaaaaccaccgttggctctaaaggtttgtttgattatacttcaaaggtgaccttatttgaacaagatgagatgcatatttcagcttactttagctaagtcatactcaaattctgaccagtgggcaccattttctcctagtacacctatgctgacctgatatttgagcactcataagcgtttaactaatatatttgtccagccatacataaccatgcgtttctctttctgcagaaaaggaaaacttgtgcctttatgggtttcccaatgagcattgggaagtaaatttgcccgcagaagaggtgccacctgagctcccagagccagcattgggcattaactttgcacgagatgggatgcaggaaaaagattggctgtccatggttgcagtgcacagtgatgcatggttactttctgttgcattttactttggtgctcggttcggatttgataaaaatgacaggtatctcatccttcctatatctatacttctcttacctagttatggtgcttcatgtgccttttttttttttagatcctactttgctcatgcattcaccacacatgcagtatttaagccttaatcagatagactcagttttagtatcatagcatcaaggaaaaaaaagaaggggtaaatattgttgtatactactagtagtaatggtgcttaaataaaatccggaatgggtaggtgtccatcctctgggaatcttttgcctcactaatagagtgactcagcatgagcgtggagtaaaattttctattacagactgaagaatagtcttgctaacattttaacatgctataatggtacttgtatgtatggattgcttaatttcattctgtaattctacggtttgtttcacaaagatctagagttacctaaaagagccagctctcagctgttctgcttggtacatattcatgtttgaagtttaatatatgttttctagttggtaatcttctggttttatctgtgatgttagtgtcttgggagtgtttcggtattaatggaaatgatgcacatggttaagtggttaatgtttatcgcatgccttaatgactttaattgagaaatgatgttcttgaatatttgccgctttgtacctatgtttgacctgtcatgtgttactgacactctgctgttgttgtgcaggaagcgcctgtttggtatgattaatgatcttcccacgatttttgaagttgttagtgggaagagtaaagccaagccaccgagtgctaataaccacagcaatagtaaatcaaaatccagcaataaaacggtacggcccattctcctgaattgtactcataccatgcatgactcttgcttgtgtgaccaatctcagacaccaatacaccatgcaaatccttcataatgctcagcgctttgtcatttccttattgttgatctgttcagtgtgtttcgttgtttttctttcaccaaatcaatccttttaacatttttttaaaaatcttaatcatatgccgttctgaaagcagaagtcttctgagcctcgggcgaagcagccaaagccgcagccccagcccccagtgaagaacgaaggccgcgaggaggaaggcggcccggacgacgaggaaggcggcggtggcggcggaggaggcggtagggaggaggagcacggggagacgctgtgcggcgcgtgcggggagagctacggcgccgacgagttctggatctgctgcgacatctgcgagaagtggttccacggcaagtgcgtcaagatcaccccggccaaggcggagcacatcaagcagtacaagtgcccctcctgcagcggcggcaacggcggtggcggcggcgtcagcggcaacggcaagcgtgcgcgcccgtcctaaggtgtggcacggcgagcccatccagagttaagatttgggctcgccgtgtggtaggagcagtctgcatagtgcagtgcagcggctattcttatttgcaatggctgtaactcgtgaggatgatttttaactttgttaagttattgtatggcagtggctgtaacttgtaagggtgtttttaacttgttaggcatgcagttgtgctgccccttagggggctaagactgcttatccattgtactcctaatctaatcttaatttggtttttttttaattaagtagatggctgtatttagctggtctaccagcttactactgcgtcctgtgttaagagtttgctttcttgctccatttaggtaccgtagccgtttgcagtgcagagatgtcgaacgaaataccgcataaatgcataatgatgttctccagtatacggcactgtatccaaagattcagaacatagctatgccggtagattttatcagtaacttttggttttctagtgttttttatcttcgtttttcgatcacttagaatacaagggcaatggttttacattagattttgttatcaacttgaattttctagtgctttgatcttcgtttttggatcaaaaagaatacaagggtaatggttttacattcatcaatttttattgtttagattacgtacctacctataataacattagtcagtagctacgaattggcaatcactgatattcgagttcgaccaaggacacgtcccctaaatgctgatgctaacactcgtattcaacaatcaatatcaaactcaagtgcgaaatcaggcgtgctagccagggtattataattgcaaaggctcacattcatatttgaatccatctttacattggatattgaaaatgaaacgacacatggtaccaatcactcatctgcaacgacagaactaaaaatttgtagtactaaacgagaagccattataagccagtacctcgtgagagatgagagaagcaaaaacacaagcacgcatgcccggagtccactgataagtgacaacccctatgaagtgattagtgatattcgcatcatgttagctgaacagtacactactaatgcacgggaagacgactttgatgcaaaacctaatgacaaggacaaccagggcgaaggaaacgtggcctggggtggtataaacaaagaattgtacagcttacaagttacaatccagaattaaacagctcggtagcaaagcacatattgaatcatgctgccgatacaaaaatcctgctgtttagaagatacaagctaggaatagaaaagcaagcgaagactcaacatcaacattgataacatgtgggaaaaatgattgttgaggaaaccatagataaattggccgaactcaactgcccatttttcccaaaactggtttagcaggaaagtttaagcagcatgtacaatgaaattgtatgtgcagctccatttatactagtcctgcatgcaatgagttctagacaaccgaagttgataaaagtttcatgacactgccatacaaacaacaaacaaatctgtttcaggtctaatgagaggaaaatgattgttggagaaaacagaataagcttaacccaactgcccactttcctctaattgatatagcaggaaacactttcggcaaaaaatgcatagcataaggcattaggccgatacacactatcctgcagggtaacatgacaacggaaaaaacaaatgtaaaatccatgaaaaagtaaaacatttctttggtactgctatctagagagaaaactaaaagctacagaagcacaataaggaataaataaagcaagaatgcaatttacagatcaccaaaacagacataatgtcataatataaaaatatgtagagataaatgagaggaaaatgattgttgaaaaaagcacaaaagcttaacccaactgcccactttccccagatcaatatagcaggaaacacttttggcacaagacgcacaaaaaagcgttaagccgatacacactatcctgcaggatgaagcatatacagtgggcagaatgattacctactatactaatctcatgtaaaaaaatgagaaatatatcaggaactagaaagtgagacacaccataaatgttactgagcaccaggaagaaattaatagtgacgaatcttgtattagttgctgatgtttgcaacttaaaaactagaactctttactagtaataatgttaataatgaacattacataactgaaaaaaacatgaagcgcatgcatcagatcacctaaacttattctatttaagcagcaactgggatctcagctgtaagaggctttgaaaactcatcctcatccttaggggcatggatggtaacaagatccggtaaaggagtcattggtccttgcttgcccttcggatcccaatcaagcataatcttgaccttaatacccagcacaccctgaaaacaagaagcagcttctaagaaaaaaattcaagctatcacaaggagacagcaacattttattcaaacggatggattttatgtacaaacctgtctcagaagaacatgtctaacagcagagtcaatatacaagttaacaggataaccagaagaaatcatgtatccgtccttgaacttcatggatttagcacgctgagccctaagcttcccactcacaataacctgtaaac

SEQ ID NO: 7461 - DNA, 18285 bp, Oryza sativa
ctatagggcgaattcgagctcggtacccttttttatattgttaggggaaagcctgtagctcggacattatgtggtctggttcgtcctggacttgtggcaagcagctttaccactataaagctttttgtcgtaatggtaccacaatatctgtaagtattttgtcatggtcatggtcatgtgtgtatacccaattgcccatattgttttctgagcttcatgtgccatcttctttgcagacccactcttttgtgcttgtcatgtctgaggaggaaagtcgctatcttgcatacttggaagatatgtacgaagataagaaggggcagaagaaggttaaagtgcgatggtttcatcaaaaccaggaatttgcttgcgctatacctcctccccctcctcatccttgcgaagttttcatcactccttattctcaagtaatcagtgtggagtgtgtcgatgatattgcaactgtgttaactcctgagcactatgaaaaatgcgtcaatacattgccaaattcttctatggtgggaatccgtttctgctttcgccaatacagtaaaaataagtttaaacgttttgacctgagatcattgcgtggatattttagtcaagctgttgttttgtccttaaaacttcccccagagcaagaaaaggatgatggttctgatatcataaaaacttttgagcaatggacacctgggaagacaaagtttcctaagcagtttgagaggctttactcaaaatgtttgggaactaaaatctgccgaggcccacaagaagactccatagcatcttatcagaaaccaagcagtaagcaatctcccagaaaacatctctcagtcaagttcatagggccccagaatcagcgtatgccaacctacaatgttggtgacagaatagaggtcttgtctcaggacagtgggattgtaggctgctggttcaggtgtacagttctcaagtcatgtactaatcataacaaattgaaggttcagtatgatgatctccagaatgctgatgatagtgggagattggaggtatgactactggtcttagtttgaaatttaagtggtatatgtatttttgaaaggcagaatatgccataatatttggtattttgttgttacttctattctttttcgtaatgccatgatttattttattaactctgtgtaaaatgtatgctttcataagaggatgagattattctatgcttctttgtaggagtgggtacctgtatcaacattggctcgtcctgataaactgggattgagatgcccagagcgacgcagagttaggccacgccctcaacaaaatagtttggctgacggaactaatcttttacctggagctgctgttgatgtatggcaatttagtggctggtgggaaggagttctagtcagtgcagacaacatttcagctgatagcctacaaatatattttccaggtaaatttcctttttgaatttttttttctggtcctttcttccaatgaaaaacaacaagttgttttgataaaatagatccttctgcagtccgtatctaattttgaccttccaagctaggggcaattgcaaatttgctgttggattgaatcgttattgcaagactgccactagaaaaatgcaaaaatgacacactgtcattcgagtggtatccctgcaaaattgaaaaaaccattggcaaatttgcaaatgccccagtggtattccttgcaagcgtatggaagctaaaccatgttccttatcatcaaacaacgatttcctatgttctttaatcctctatttcatctgcaacatgttgatatttctattgtttttacaggcgagaacttctttagtgtatgccagctaaagaatttaagaatttcgaaagattgggtcaagagccactgggttgatatagaaatgaaaccagatgtgttatcgaaaataccttcggttggtgttcaaacaaggcaacctgataatctgacatctgttgagaggccggactccagaaattctgcaatgtctgaccaagagcttgcagccatacaaacaaactctagtgaagataaacaaacaggagctgatcagccagcagaagttagtttgactgatatggcctctgcttttgcagaggaccagaaacaaacagttctaggaaagcgacctagggatgatgatgctgaacaacattgcaatggggaagtaggcatagatgttggcaaattgtgaagtttgggaagcgcaacctcattagacgtatgtacatagctatagatatggtaattggaccccagcagaggggttttttactaggttgctgatatcagtgagcatcgacatcttttttcatacacgtgttcccttgttttactgttagcttcccactttcaggctttctgtcaccagatacagaggttgcaaactaaatattacccttaccagtcatattgtatagcagtctgattgatcattgcttctcttatgttttcctccggagtctggactatagtttcagtttattctcaattgttaatatagtttaagttcatatgaataacattcttgtcctagcttgcttgtgctacaagagtatatctgcatttaagctgttgtgaagattcaacgactaacaatcacacattgtgattgggtatggtgtgcaattgcacatccatcaagtatgaactgcacttgcgcatgttgatctgaagaagttgcaaaatgagtggttttttctcctcctcaagttctgtatcatctatttgtggcatcctgggatctgaagtcaattctacctgatgccaatgccatcccatgatatcattatcttctgttatgttaggcctgatgtccctggcacgagcatgtcacattcatatgatgcattacctagttcctttacacatgcaaactctcatctgctatgattggctggtctaacaaatctccggtcccattatatcgcaaactttgaattctataaaactcaatctttgaagttgattttatggtttcatcgtggtttattttacaacattttgcttttgtatcattaaattttacctataaattactttttgtttgctaataataggcgatacgaataagcataaagataagtgaaatgatggggctgctcatctcactacatatggatgtatgtcaaagtttgttacatggtacatcgttacatgtcagctattatatctactaggtacatgttctatctgcagactgcagtggagaaggaaccagcagcagtctgaactttctgaacttgtgaagaatcggcgatgatctacagccggagccactgctcgccgttgatgaagctccggccgatgaacggccgcgcctcgtcgtaggtgagcgtccgcgaccacggcaccctctgcttcgtgctcgcccctggccctttgcagttgtactccccgaacagcaccgtcctgtcagaagattcagacacattctctgtcattttctgacggatatgatatggcagtatcgtctctaggatttcagaaaagaaaaggaactcatttggtaacagccttgtcacatgtggtaactgaattcccctatcaagactgtttggtgagcctgcaatgcaactcccaaccacttcctatgccatttgatcatcgaggatggtaagttggtaactagtaaaattcagctaaaatataatctcttcgatcaataatattaatatgccatgtgaacctgacagagtagctgcaattataattgtaactgtaattttaatcaagagcagcaaattgagtgtgtgattaaatggcaggaaagttgatcactttgttcttgattgatcaccccagtcgctccatccctgggggacgatgatgccactgaggtcacagtaggagtacaccactctggagtacttgccccatgctcttcccaggtagagcatgccggagccggtgagccggcagccgacgaagctgaacccggactcctccgacggcgagctccgctgcgacgccgcgatcgcgccgtagctcgtcgccacggcgtgcagcgtgcaaccctgacaaaaagaaaaaacaaagttacaaaaattcagactgccaagaagctaattgtccattttaatcatggcatattactgcctccacgtgttacagttgtatattgatctaataataatatattgacgtgtaaggtttttgcatgttcgtgaaaaaaataaattgatcatggcaccacattgccatgtaatgtcactctcattaacactcactccggcatttttcattcagtgacagttgtgccgaaggtagaaagagaatgtgaccactaattctgaacaccgatttgtgtaagagcattggtggcattggtgcagggctaagtgcctaaccaccttatcccacttagctatatagctaggttaagcaaggtgctaatctaggtgcctcaccagagtgagaagttcttttgctgtaaggtataaaatggaagagttggtgaatgcctgaattgtgagtttgtgacagctctgatcggaccaacaggagacacagcataaaaggtatagtactactagtctagaggacaactagagcaaagtgtgggggacagagtgtccaaagattttatcatgctatacataaacatattcttaaaaaatataaaatacttcctccatttttatttacgtgacattggttagttcaattttgatttgaccaatgtcaaatagaaaaaacatatgttgtattaaacatccaataagaacttagtgagattagggatttgcaactgctctctatctctttaaacgagtattcagcggtcatacttgttgtgtgtagtggcgtatgtgcgcgtcccttctaaatagaaatagaagtcggtttttcttataggattatttctcatggtaacagtacactactgatccttaccaagaattaccacaaaaatacctgtggttaatttgggcaacatcctgacttaattagacagtagtaaaaggcagcaacagtagtagtaacagcagctgtggtttaattttatttatttattagttacctggtacaaggaccttgcgttgccaaagatgaaatcgatggagccctggatgtcgcagttgtagaggtagtgcctcccgatgttgtcgaacagcgtgtcctgcgtccccagtatcctgcacttgtacagcaccgtcttgtcgccggacagcctcagcgccaccgcctgctgccccaccgcccccggcgccgccgccgccgccgagttctgcaccaccaccacgcttgttacatccaggaacacgtttcgccgccgccggcgagccggccggcgacgacgacgacgacgacgtgcggtgtgtgtatacctcgaaggtgatgtggctggcgcagaagtagtcggcctcgacggcgacggaggcggagtagaaggtgcccacctggtggcccgacgcgccgacgtcggacgcgcgcgagtgccacgtgatcaccgtgtggccggtgcccatgccgatcagcgacacgaacggcttcgtgatcggcaccgtcaccttctccctgcacggcacgccgtcgccggcgaggtcagcgccattgcagcttcaattccagtcttaaaaagcttcgcgagataggacgacattaactcgtccatggcggttacgagagggacaggtagtggggaggcgatcgatcggtcgaacacccacgtacctgtagacgcccggcctgacgacgatcttgaccctcctcgtgttgccggcggggaccatgtcgacggcgccctgcacggtgcgcgagtgccccgtcccgtccggcgacaccacgatcgtcgtccgctgctcgccgccgccgccgccgccgctcctcttgccgccgccaccgccggccgtgtcgtcccacgtgctgctccgcgccgccccggccggcatgctcaggtcctcccacgtgatgaacccgccatcacctcctactccggcgccgccgccgccagccaccgtcacggcgaacacgagcgccacaacgacgacgagcacgcccgtggcggccatgtccaactagtcgagagctaccgatctctagctagagctaattaaccacgcggattaatttggaacacacgagagatcaaccagcttagcttaatggagtatatatcgagctcgctgatttcacattacacacgccatggatgatgacgacgacgatgtgaagaagaagaagaagaagaagaagagaagaaaggatggaatgcaagaagacgttggaggcgtgaggaagtgatgatgccattaaatatggggagcgccacacacaaagccatgggtgttttggtgtgcccattggagatatatcaaagatttttaacattttagggcacaaaagtgggtgtttttgcttatggagttgtgtacacggtttcgtcgaccgcgaaaaaccatttttttttcatgagactaatttcgtccacgaaaaactttagcggtttgtcgctcgaaaagccgctttcatccaggttgcgtgatagtggggacctatttgtcagtgactgtttcgtgatggttctttaagagtggattgttggtagagctagcacgatggtgttgcattgcatggacttgttttgtgggaagggaactcataagggtgtgatagttattgcatagtattttttttgtgattaattaattaattaattagtatgtcatggcataatggttggtgctttgttttattgattacaagaattggaaaggttgttcatgagttgtgcacgagagagaccaagatttgtttggggaattttcgtggtggaatttggacaaggtaggctgatcaaacggggtagttagtaggttgttagtgcagaacggttgagtctagcatgcacgtcccactttctcaaccctttttacctagctcttgtgaattgtgatggtccatagttaactgcttttcttgacctaaatggagaaaaattagattggcaaaaatgttttctaaaacaaagcgctaatgcttcagatgagaagaatggcaagagatcaatggtcaatgccattttgtttcctattgctagttataatggattaggcgaagaagcattatgtaagtgcgagcctaacactgctgaaatctgtcaaaaggtcaatgcactagagctatttttgacgattaggtaatcttctgcagaaacctgcagttcaagtaaagccgtttactgtgcaatcaaatgaacatgggttgtgtaggatctatgcccaaattactcaaaaattcagcaaatcgacacgcttattcgtgacaactttcatcaaaatttcgtttacaaatgagcacggtgaaagcaatttttcagaccgcactttgtcgttcaactcaaaatcaaagtcagcctataaagtcagacaactttgtacaagtgtgaacttaaaacgagttcatgtccttggtcgtgccaaataaaaatggactgaaatagtccgtatttgtatgagggattgatgaattcaatataggctctagtactttcaggctcagccttgcaacaatgaaatggtcctgtggtttcagcccatggactggttactggttagagatttcgtaattgtcatgctgttctgtggaaatttccagaagcttctagaatcaccatatgcacaaacagatatggcatatatgtatgcatacaaaaacagtttttgttcatgggtgattaaaacatgggtacaagtgattcccgaattccaaatttattgtgattgatcttttcacaaatcacaatatgttcaggagattaccgaaatttggtatattctcatttgggttactctggatcccaaaaaactttacaaggaagtgggattttgctgtgtcatcagcatatgcttaagctttgcatactgcagagaagtggaatttttgcattggctaacaaaccaagtaaactgtgatcatatttagcaagtgatcttcaagtgggatattaaatttttacataatcctaaatacttattcaggttccaactaccatctccacttcaccaaatgttacacatttatttctgcaaaatagaaaagcatatattaggaacaaacaaattcagcatagacagcacaaccagattgctacagattggcagttttttggcaggggatgcacaaatgcaaggcagtatttatatactgaggcaagtaagcgattgagtaccatgatattatatcccactagcctaagcgattgagtgatatactgaggcaagtaaggtttggaaaccggagcggaatgtccctagcccactacaccagtacaacatggtactctagctaaagtctgcaatgatgaccatgtgcttcatccttcatgcgttaagtcgttatgccatagcccataatattgtttgttaacatctacgttgagacatccacagatagaaatagtacaaaattggaaatgctaacaaccaaaagatgccttggatgatgttatagtttattaaattgaaattaacatgtggcatcttgttttacatccctttccctcctaaataaacacaggcacgtcattagtcataggaactttctatacttgaaccaatagtcagtggagaaaatacagtaccaaccaagaagcatacaaatgggaactaggtatagtgaaaggcacacccttaacggcttaacagtaatgggatccatgttcgataagagaggcctcacagccctgattttgttgcatccacgcttgaaaaaattctcaaacttcagacttaggtattagaattccagaaatttagaaaatattgcgtaagctagcaactctagtctctaagtaacccttttttcattaagttacaaaagttggtaaccatttcatatctgataatcacacttatgaccagcataatcctcacagcgaagcaaacatagatatttgattatataaataatttaaaagaaggaaaatctatctccatgcagcatcaagatcagggataggatcaatttgttcatacctaatacttgttcgacgattgttcaagttcaggcctgtggactgacatgcgagcaatctcagatactgccgtctcactagcctgcgtatcatcaccagcaagctcctcatatgcagcctcgaatgcttcttgccagaaccgtggaagccgtacccgatcaacaccggtgcgtgtgtacacatcccacatccggcgcactagcttctctctgtcctccatctcctactcattatttaaaaattaggcaaaacttcagtacaagatttcattcacaactaaaaaatgcatatagttttgctcgtctatgttttagcttaggattctgctggtcatattgactagacaattatgcagatgaagcttgggaaattaaaccgttaacacaaatagcatatgttccagacaccaaaatcaagaaataaaggtgactgctttctcgtccatgtaatggaacaacttaaaataccatcagaccaaaaaaaaaaatcatcatgtttccagcagagcgtgtacccttccttagcatttttttgataatgagcattttcttagcacagaactaaacctttcagaagagaaaatatgcaatgtatgtccaaatgaaactctataaacagagaaaattactagattgcagaatgcttagtctactatgtgaatttctaataaaataagctgtttgtgactttgctgaaacaagtacccatttcatccccactatgaaatctgaaatcaaccaataatgcatctcctttttcgcaatgtcagaccgttgggacttgggaaaaatgcatgtacacatcggacagttgaggaacaatggaagagattaggcaccgaccaccgagtggcggcaagatctggaaggaaggaagggaatgttggggtaggggagacatacgagggggtcgaggtcgtcgataagcgggtcggggaggtccccgaactcggcggcgaggtcgccggaggaccagcggatggtgacggaggcggcgaacatggaccagagcgcgaggagcgcgatggcggcgagcgcccacgccttgtaccgccccttcccgagcagcgccgcctccgccccgccggcggcggccgagatggggatggagatcttggtcgccggcggcggcgtggaggagtggtggtggtggtggtggtcggcgggagccttcatggccagcctcgagtatggcggtggcagtgggagctcagcagctgggtctgggactgggcgatgtgggcaattactctaccttttgatgagatgatttgagcaacgtgtttatttttctttgatagttgtagtgtactccctacgtccaataaaaaattaaaccagtattaaatataatatattctaatacaataaatttagaaatacatatgtctatatttttaggatgtgtcacacatcccgtactagattcctttttttttttacggagagagtatatggataagaggaccaagattttaatttttgatgttgctgccaatctatttttgttaatgatggctatgattattcactcaaggaaaagaaagagaagtgctaggagagaatgtgttaaatatggcccaatagttaaaagagataggatgagaattgagtatctagacacaaaaatttggaggaacgataccacttgtatcaacatacttagacttacgttattaccaccttttagaaaagactctttgttttggctatgtaagttctttagaaatcgtggtttgcttaacgataccatccacatatctattaagaaacaagtaactatgtttctaaatacagtaggggacagccttagaaatagattagttatcactaagtttgataggtctggagaaacagttagacgttatttcaacaaagtgtttcttgctgttggtgagctacaagatgaactaattaggcctcctttattggacaccccaactaaatttgccgggaatcctaggtggaatccttacttcaaggcgtgagattcatctatgtctcattttcaattttatatttaaataaactagtatgaatggtgaacagttaacagtgatggatagtatatcatcactaactgttgacaccaagaccctttactagaagtttttagcaactgctccctccgtcctaaaatataaagatttttatggttagacaccggtattaaaaaattatgtggaattaaatgagataagattatgattggttgagaagtaaaggtagatgagaagattgaattgtggagggttgtgattggtttagaagagaatgttgatgaaaaagttattgtattttgggacaaaccttaagcgctaaaagctgttatattttaagacgggaggagtacaattccttttaacatatgtagctctatagattctcagtaaaaaatatatgtatagttatataatccacgaaataaacaaaataaacaagaagtcaaaaactgaaaaatccaacctttgtaaattcttataagccaagcaattgttaataagaattttaagctaccgagagctttaagccttttaactcgaagttgccaaacaactgtaaatcttggctaaaccgctaacgcatgtgaaagtaggcctggtgatggtgggccttgggcttagcatgatctgtattaaactaattaaaactgctaaatcgcaaaaaaaaaatagaagttgctctaaaatatcaaataaatctatttttcgattttataataattaaaactcaactaatcatatgttaataccacattattttaaaacacttaattttcatctttatttacatgagtttcaaacaccacctacctatatacttaaataaacatctcaaacaaaattggtttaattaggagttaggtggccgtgagagcctgtataggtgtccaaacgggcggcacggcccggcccggcacgggcacgggtccggcacggcccgtttcggcacggcccgttaggcacggctgatgaaacgggccgtgccgtgccggcccacgtgccgagccgccggcccaagcacggcccgtggatggccgggccgtgcccgtgccggcacggcacgcctgcggcccacgggccgttcggggcacggcggcccgtgaaggcaggccggcagctgaggcctgaggcccagtgcacagtgttttttaaaaaaaaaagcaaaggaaatgtataaggaaaaaaaattaaaaatggaaataaaatgtttaaaaaaaagtaatgatttactaatgttaaaaaatgaaaaaatggtatttaaaaaatggaaataaaagtttttaaaaaaagtaatgatttgctaatgttaaaaaaaagaaaaaatggtattttttttgttgtgttgaaaaatttaaaaatatagattgtgattcattattttgaaataatttaaagataaatccacacttgcgaaaatattgcaaaagaatttgttaaaaatagtaatgacctttattgatgtttatatcattacaggatacaatgatacatgctgcctcgttaaaaaatttgtcatgtaaaaactcataggggaaaatgagaaaaccatgacaaagaaaagagtacagctcaaaggtcagaactacttctaacaaaattctactggggttggtctggatccaggtagagttgctcgaactgggcggccaattcttggttgtccgcagtgtattgggcatgttgtcgagcaagctcccagtctttaacgcttagtagcatttcgatgtggtcgctgcgcagagtcgtcctccggtcttcgatgattcgggcgcatagactgaaggccgattcggaggacaccgtcgacacgggcaccgtcaacacatcccgtgctagttttgaaagcacaggatatgttatcttgtggtcattccaccacccgaggacgttgaaatcttgtgcttcgtggtggatggcgtcgctgtccaaataaccggacaactcttcggccacaacatgcgaagaggcgtctccacttgtagccgacgaactgccaccaccttggattgaagacgatccaccccaaatcctaccccactgtatcttcttcttacctgtagtggggataggagggggtctctgctggcgaacttcctgaaactttacttcatatcttccaaaaacctcatataatttacgtctaacctcagtataaaaagaactataatctacacctatagtatctccaacaagtgataaaatagcagacaatccccttaatttacacctaggatctaaaacaaaagcaaaagcatacaacataggtatatttttccaatatttcaaatatttttgtttcatgtgaaagacaggttcagttagaacgtcatcattttcgtattctttaaataaattagcaatttcaagaaggttgtgcaaaattatattagcagttggataataaacttgtgataaagttagagtacaatcataaaaagtttctagaaattggtgaaatttttggacaattgcccaaacatgctcgttcagtactgaagacccgtcactgtttcttgggccaccacgtgactgaacaaaatcagaaagtaaactactataaggtaaaacaacttttaacattaaatatgttgcattccaccgatgctctgcactgatgaatcccctaatgattttggtaaaaatcattaagttaaggtggatacacatcttgtcatatgatcaaatggtttcgcgaaaaatcaataatcagacaacaagatgtgcgaactcgatattttacacgactctctttaccaattctgccccgaattacacttaaaacgactcaacagcttaacgttggcttgccacgcattacttgactgtaaaactctcactcttaccgaacttggccgtaacctgccaaccaaagcgagaacaaaacataacatcaaacgaatcgaccgattgttaggtaatcgtcacctccacaaagagcgactcgctgtataccgttggcatgctagctttatctgttcgggcaatacgatgcccattgtacttgttgactggtctgatattcgtgagcaaaaacgacttatggtattgcgagcttcagtcgcactacacggtcgttctgttactctttatgagaaagcgttcccgctttcagagcaatgttcaaagaaagctcatgaccaatttctagccgaccttgcgagcattctaccgagtaacaccacaccgctcattgtcagtgatgctggctttaaagtgccatggtataaatccgttgagaagctgggttggtactggttaagtcgagtaagaggaaaagtacaatatgcagacctaggagcggaaaactggaaacctatcagcaacttacatgatatgtcatctagtcactcaaagactttaggctataagaggctgactaaaagcaatccaatctcatgccaaattctattgtataaatctcgctctaaaggccgaaaaaatcagcgctcgacacggactcattgtcaccacccgtcacctaaaatctactcagcgtcggcaaaggagccatgggttctagcaactaacttacctgttgaaattcgaacacccaaacaacttgttaatatctattcgaagcgaatgcagattgaagaaaccttccgagacttgaaaagtcctgcctacggactaggcctacgccatagccgaacgagcagctcagagcgttttgatatcatgctgctaatcgccctgatgcttcaactaacatgttggcttgcgggcgttcatgctcagaaacaaggttgggacaagcacttccaggctaacacagtcagaaatcgaaacgtactctcaacagttcgcttaggcatggaagttttgcggcattctggctacacaataacaagggaagacttactcgtggctgcaaccctactagctcaaaatttattcacacatggttacgctttggggaaattatgaggggatctctcagtgctctgcatcggtggcaaacttacgagctttcacaccggccgcattgcaaaacctcttccatgcagcaatctgcgggttagaagcagttaaccacgcgattgcttgacgaacagcatcgatgtggtcacctaccctcttcatgccagtcttaacaatcaaattaattatatgacatgcacaacgctgatggagtagaaaagattgagcatacacacaaaataaaggttacaatatttcaatagccctagaattagcagatgcattatctagggtgacagcaaatattttatcagcaagattaaattcattaattacttccctaattctttcagctatgttttctcctgtatgtgagacatctattaacctaagccctaaaactctcttttgtaattgccaatcatcatcaacaaaatgaacaactacgctaagataatcctctctagctctactactccatatatctgaagtaacactaacagagaaagtacatgtactaaacagttccttaagtgcagttgcttccttgtgataaacattctctaaatctctagttgatgtttgcctactcacagctttaaacctagggttatgagattgctgaatgtaatgttcaaaagcaggggactccccaaagttcaggggtaaatcttgcctggcgattaaccggacaagagattcccgagcaaccatgggatcgtactcccaactgcgtaccgtaccgtctgggtttaccataagttgctgctgccggagttgtattccttgcttcttggcacacgactccgcatggcgcttgaggtgacctgtaccaccagaagaacgagcagataaaatttgcctacatattctacaacgggctttcgatacctcccttccgtcggggcatgtttcctttatctcgtcgaagttttgccacacaccggaggttctcgatctcttcgagccggtgtgtgtcgaaacacttccgctcgcggttccggaaaatccttccgaagctgtcgccgcctgaaccggtacctcctcaacgacagccgtatgaaccggtacctcctccacagatggtggagttggagccgatccggaggtatcgtcaaaccccgacatgtagttggggtcgaaatcacccaaggtgaacgacggcgactggtatggaaagttcggatccattctgaaaatttaaaccgacataaataaattttcgaatatttattgaattcacaaacacaatacaaataatacacaaatttgaatattacttacatctttccaaccgcgagctcttcaaacctctgcgatcaaactgttgaactacgaaactaattttgatttttgacaaaatttgagcaaattttgtcaaaatcaaaaaaaatgcacacttgagaacaaagagagcacttaaaacacttgagagcacaagatgaggagtgtgggatgaggagaaatggctggggttcatgccctatttatagggcgaaatttgagattttttggaattttttcgaaatttttatgaattttttagcctcccaacggttattttcaaatttgaacggtcaaatagccgttagtgccacgtggcgccttcccattcgaccgccgcccgccctgtcagtgcgccgctggcgctttcggcctgacgggccgctggcgaaacgggccgtgccgtgccgtgccgctacagtagccgtgccgtgccgtgccggcccgcgggctcggccagcggcccaagcacggcacggctactcgtgccgtgccggcacggcccgttactgtagcaggccgtgccgggccgtgcctgctacaggttcggccgtgccccgggccgcccgtttggcccggcccgtttggccacctctaagagcctgcaatgagatgggctctgtgcaaaagctgagttaggtggcccgatcccctttcttccccgcaatcaattgctcaccggcggagaggccgccgccgccgccgcgttcttcctcctcctgagccctaaaagggaatccagctcgaggtcgaaccaaccaaaagcttggcggcgtcgcggagacgcggccaacctgctccacatacaccgcccgtttcgccagtgtcttttctctttttactggcgcgcgcgcgggcgcgggcgcgggagaggcgagggagtggtggtggcgcgctgcagggggggctgcttggctgcggagtgcggacgacggctataaagagggcggaaagagagcgcccgatcccgctactcatcagctgccgtctcctctgtgtgtgtgctcgcgcgcgcgctccggttgctcctccttgggttcttgatttgctacacgcgtttgcttgctcaccacgtgtttgatggaatacctgtgaggtgaggtgaggtgaggtgctgtggctgtggtttggttgatgctaatccagctgttatttgtgctggattgattgcttatttgtgcttgttattactagtcgttgttagaaagcttctggctaaaaagtcgtcatttttttgcgaaagcttctttagcctacaacggcatagggatttcgatagctaaaaggtgtgcttatcttgttaatgaaagagaagtgcagatgctttatttgttgtcttgttgttccaaactctagaaaagtatgctctttttgcctttatcccacgagtagtagtatatcatcataaaacttaagggtccctttgaaacgcagaataggaaaaacacaggaataggaaaaacgtaggaattgaagtagcatgttttcctaatcctacaggaatggaaaacacaggaaatatgaagagggtccctttgatagcaccataggaaacaaacaaagcaaaggatagtttccaagaggttgaacctcttgcttattttcctatgaaattgagctataggaatgcaatcctaaggaaaatttcctatactttcctatgaatcaaagggtttcataggaaaaaatccttaggaaattaaatcctctaaaattcctatgacaatcctccaattcaaaggggccctaagtagatgggagaatggagatattcccgatatacacacgtggattggagcccaaccgtgcatagctagccatcatctttgtctcactttgttaggaaatttaagtgaaatcaattaaaatctaggtaaatccaaaggttacgcctttcagtttaactatcaaatactccttgataaaactttactaaatataaagagtttgatgttgtttccagagaacttatatcaaatatcaataatttttggtatccattcttctgaaattagtatttcccttccggaaaacatacttaaaatagcagatatttcctctatttcacaatgtaagtcattct

SEQ ID NO: 7462 - DNA, 18996 bp, Oryza sativa
aacaaaaggcaggtttacccagtccaaagtgaaaatattgcttaaagggtggtccaaagtgaaacatcggtaacaaaaggtagcccgaagagaagtttactcattatattttaatagtattttcgttttgggttgaaaaggttgctaagtttctctataaatttggtaaaaatttaaataatattaaattttaaaaataaaatgtttcataatatgaaatgaagggaatatagaaaaagaggggacagtttatctgttagagtgctctctcctcattggttgtcatgagcgctaatcatccttgttagcactaacacacagcaaaataagcatggcatttagctgtccccgggtccattttccatttttaagaaaaaaaaagggaaattccatgggtcctgactagagagactatagagtcctgcgtgcatcgatctagggagtaaacgaacaacaatgtttcaaacgattctgtcgataaaattttgtcacatctacctaacacaagatatataaaaaaaatcacatacaaaatggtttgcaatggagcaattaataatgattttgttgtaaatgtatatgttatcaacatgtatgttatatcgtttgttaattaacatgcggtacccttctactccctctgttccacagtgtaagttattttagcatttcccacatttattttgatgttaatgaatctaaatagatatatatgtctagattcattagcatcaatatgaatgtaggaaatgatagaatgacttacattatcaaacggaggaagtagctcttttatcttttgtttccccctccacattacaaatatcctacgtgttgatctcccagacgatgacatcgtatcattattcttgtccctctgatgttattttcttattaacgatatccatggaacatatttttttccaactaacttaaaaatgttcatcattacgatagtccttaatttattcgaagataaacgtattagagtaaccggattacataatatgattatgaaccattgtaccacaatccgtgcatagcattgtagtggctattatataaggcagtgtacatagcagaagatgtattcataacatatccctaattgttgtggccgtttattttgcctactaatagtcatacattttgacgtgatcatgttttaccaacaataaactatgcccattatatagttttcaataaggagttcctattggaaaatttgtgtctcaccatggacagtacatataactacacgctgcccataccttctaactccactcgttagctcatcgattggactgaagtaacaagtacaccagtcataggagtgtagctagggttgaggaggaagagggagagggagagcacattgatgcctatataaaagatggcataacaattagactatgaatggatgacaaggtaatgtaatagtgtcactgtatgttagacaaaacttaatggattatgggtagacttgatggtgaagctaatatatcttagcaatcagactagagtagcgggtcgattatcgatcacacatcaatggtgactacatgaaggctctatgtgttataaccgtataagcaaaatacccacaacgaggttggatacgtgggtggaggcgtagctatatgaagacaacactacgtaactcgtggcagatcagctcaaaaaggaggagaagctattggccaatgcgctagttatacattagccatatatctatatcgctaacactgttacaaattgtcttgaatctatatttattcatgtccaaattgctgcatgatagccaaactaaattgcatctttcagagccatcgtttcacttattcgcggaataagcgaaacaacatagcgatctaaaatcaaagattgaaaaataaacttcaataaaaaaccgtcaaaattagctccaaatttagggttgaaaactcaaattttggttgataattataaatataagtaaaaagatgaggcgctttttctctcaaagaacctttgccatgtctctctcatgcatattgagcccctgcacatcaacgtagtcatagcacaaattgctactactactacacaactttttcaagacatagcaagtgctcaataatatcctacatagaagcgctgaaatacttttgtatgtgtgttttaccttgctatacaacctatttatgtttcttgaatatttttacataaaacaattactactaacacacttgtaatatggacatgttactatgtagtgaagccacacgtaaacatgatgatggcataattttaattgataattaaacgtctaggtctttcaactagccgatctgggtttgaagtattacccattctaattatttgatattaagtcatttcctaatatttgtcttttaattaccaatcaatcaaacatgaagcagtagcgcagcgttaaacgtgatttgagcaatattgcaaaccaaacaagagtagtgcacgactccaacgcgaggccccgggtccaaatcaaacccgtgccagccgcctccggccccactgccagtctgcaccccaactgggtcgcgcctatctcctcacagatcatccgacggtcctcctctccccaccccaaaacggacggccacgaatccacaacaaccacaaaatcgacccacacccctccatcagcctccacgtgggtcccaccgcattccgtccccacattgtcagtcacccacccgctcgaacccacacgtgagaaagcgattccatccattaactaataatatctttgccccttaaaagaaaacgatacgaaaaaaaacccagagaaacaaaagaggaaaaaaaaagaagcgagaaaaaaaagagatgcttttggcatcatccagcccaccacgcctccacgccgcgctccccccctcctctcaaaagaaacacacgcctctcggatcccgccacgtcatcgatccgcacctcccgatccgagccctcccattggctgcgtatacaacccgcgatccccccacctctcccctgcaccgagtccacggtgcgccccgtgaaccgcctccaatggggaggtaaacacccttgccccgtatatatctctccgtttcaaatcctctcgaaaccaaacaccccggaaaaaaataatttattttttataggagaaaaaaagaggagaaaaaaaagggaagaaagagatggacgaggcgtgggagagggcggtggaggcggcgctgcaggccgccggagaggggagctcgtcgccggcgaggagcctgacgctggacggcgccgtgaagtgcctgcacggacgcgtgcccgcggcggagattctggagcggtaccagagcctggagcacctgtcgatcgccggcgtcggggtcgcgtcgcttgccgggttccctcggctgcggaacctgacgcgcctgacgctctccgacaaccgcatcgccggcggcctcgaccacctcgtcgccgccgggctggcctcgctccgcgacctcgacctcagcaacaatcgaatccaggacgtcggcgacctctcgccgctcgccaacctccgcctcgtctcgctcgacctctacgagtgccccgtcacgcgggtcaaggattacagatccaaggtgttcggcatgatccggactccgaagtacctcgacaagatggacgccgacgagaacgagaggccggagtcggatgacgacgacgacgacggggatggcgacggcgacggcgaggaggaggaggacgacgacgatgacgaggatgaggatcctggcagcggcgaggtggccaacggaggcgtctcccacccgcgcggtggcgtggcgtcgcacccggtggaggtgaacggtgtgatcgatgtggacgaggacgagagcgacgccgacgaggtcgtcccgaacgggggagacgaacaccacgctaatgggtttcggtcgcggccgttggggacgaggatgaatatgtggaggaggaagacgatgatgatgaggaagactatgaggaggaggatgatttgggggaggagatcgatgaggatggtgatgacgaagacgctgttgttgaggtgcatgatgtaccaagtagcagtgatgaggaggaagacggcatcgaggaagaggatgaggaggaggacgaggatgaagaggaggttgaggatgatggtgaggaggctgagccagagagcagcgggagggtcgctttggcggtgggggacgttggagaagagattgatgggcatgagcacggagagggggaagatgaggatgagaacggtgagattggagaggaagatgaggagagattggaggatgatagggtttatgaggaggggaatgatgacgacgaggaggatgtggatgatgaggtataacacattttgcattaatttctcgcaagcgtatcaagatctttgctattcgttgcaatgtttcgtagtaacggtagcatcggtagtcgtttatattcatgttctagtaaaattgatattaaccattctcagttgcaggttcttttttttttcaggggatttactagttcgtgcgttagttatgtgggtgtttgtttagtctacttattataagtgcaacattttttttgtcatgctgaagtagataacttcaattgttaggtttcctttccacaatcacctttttggtgatgttttacactctgaaatagtgtcagggataatcttctttacctcagttacttagcagcagggataaaatcatttttacctcatttactgagtgtgatacataggagcagttcagagacttatgtgtgcgctctatcattattggctaatgtatccgtgtgatgattttatgagttgtgcattagtactttgtttgatatgctgcagctatgtgcacaatctttttgaaaattccagttagacccaaaaatgacaggaaatgtgagaaattagtgtttcagatatgattagatagatactgtatgacagcagagtttagtttcttcatgtagaagaaagagaaggttttagttatctcttttatgccctattttcggatataacaaaagattttgcatctgaagtttttaaatttggcaattgcttaaaagaaaaaaactgatacatctatgaaacctgggattttatatgttctttttaccttatttgatatccatatctatgtatgcttagtaaatcactagtgtttctactctaatttttattgatatatttctgttttagtagtgccagatgttttgtcatgcatttatttcttttggggctatcttaataatgcattatttcattatatatccctgactgtgtaagtgtgtacagacctgtagttcttctatccatgagaacatgctttagtttttgcctatgttatctggccagtagaagctcttctctcatttgtgaactgtgcaatttattcgctgctaaatatccttgtagatagattttctcctgtcatgcttgttatggcccattgttttgttcattgtgtaacgagaaggccttcctttctgaatttcatcttcttaaatccttcgagaggtggttgatactgcttttttactttcactattgttttagtgtgctattcttgcttataggacatttaatttattgttaagttgatcttttgatgtaaatattgctgatgtttactatggttttgaaaccatacatattttctttcagtggtagagacgcttattgtatttcagcaattgcatggttactttgcctatgtttttcattgctaatttattgctgcatgtatgttaaaactataaatcatggagtaatttgtttgactctttgggcatttcacttagtgagctgtttatgatacacatgacttttatgtttgaggtttttctaaaccctgttccagaatgtccttcctgttaatgactatctctaaaagcagaattgtggaaacacaggtctaatgagaattcatccaattttgcatttcctcaggatgaagacacagaatatcttgttcaaccaattgctcaacctcaggccatggcggttggaaacgactttgatgcagctgaggctgatgatgctgatgaagatagagatgaggttgatgacgatgatgatggtggtacggacctgccctcgtcctcgcagggcgctaagcggaagagagatgatgatccatcaggcagtggagatgacgacgaggacgatgatggtgtcgaggacctgaggcccttcaagcaccactgaccaagcagcaatgtacatggatcccttcctccccctcttctcagctagaaagaaccaagcaagcagcagcaggagcatcagcaaacagaaatggtgggtttccccctgttttttcttagcgtttttcttgtaaagactttggattgagagagagcttcttcatccagccttcctcttcaaacatcagattttaggagggaaaatggagatacctgtgtagcaacttagcaagtagccatggcagctcagtttcagtttcagtttcattgtctccctagcctgcaccatctcttttgattttcttttttccctccagaatttcaaatggtagttacaagccccaggtttccctccaccctttcaaatttctgttacattggcagtgtagccgatgtattgccaactctcaaaactgtagtttccctccaaaggaaaagcccgggaaatgccccccctttcaaatgccccctcaccctcagtagccgttgctccccctccaatttgaatttttatacttttgccctagttggttgaactgtgttgctgtgtgtggtaagagtttctcactggggagtgtggacgacggtgccaccaccccggggggggcttctgtacgcgggcgctgcgtgctttgagataggtgaaacggctgtggttgtagcgatgcggaggcgtccgcggccaaccaacgaaccagccacctctgtgggcgagagggcgggcaactgggctcccggtgctcgcagcagtaagagccatttctttaccaatttttggaccgagcagatgcagcagcacagcccgcggcggctgcgcccgtgtccacggctcacggcatgggtcctcctctctcactgctcaccgggccccactcgcaggcaattctgttgtggtgggggcgggtggtaactggaccgggtggtgaggtgaaccacggcgcgggagtgggtgggtgggtgggtgggtgggtgggtgggtgcacgttgtcggtgagcggctcgaggcgaaggggaggagaggagattcggccggatttggatggatgccttcttttcttccttggatgcttctccctcttgaaatgacggtattgccctccccctcctcgtcgttggtgggggcccaccggcttgaattaggcgcacacccccagctggctccccaactttgacacgtctctctgccgcgggatccgaattaaagaatgggcgacgcgcctagagacgacgcatactttgggtgtgggtcccaccacggtgatcgtcgggccccacaagtcagtgatacgatagctctgcttcgagcggtgaatcacgtgcaccgggtccatgtcacgtacggcgactgggaggtggggccccggttggggtggctacgctcgtctgaccatgtggtccgtgtctacagatagctctggcctctggccccgcgcaggcacgctatgcccgtgatgccctgtatggacggcgcggatcgtggagagcggagatcggacggcgggtgtgagagcagtgacgtgggagatcatccgcctagtgtagaggagacggtgccgggtcgtcgtgccgtgttgctcgcgcgtacagcgtggaccgggcccagagggtggacgtggttggtggggccatgggggtggtgtgggtggagaggtggggtccacctgggcccacttgtcagtttcatgggtggaaggggatggatgggaaacgacgcgcgggcgggcggggtggtgttcggctacgcggcgcctccgccgtgtccgacggggccgttgcatctccgcccctcccccgcaaaccgcttcaattttcaccaagtcaagtacaaagcacaaactgggaagtattttcggcagtaaaaatagggtttgttgtgagatacggagtttgtttgtaaattagatgttttggaaaatctaaatactatcccatctcaacccatctcaaaatatagtatttttattataatcttaacatgcatttgtttagatttatagttataaaacttattatattctagaacaaagttatgactccctctgttttagcttataagacttttttactttggtcaaagtcaaactaatctaagtttgactaactatctaggaaaaaaatagtaatatttttctacagaattagttaaatttagagagagtcaaaaagtcttatatttgaaacggatggagtattttctttccaagtcgatttggaacaaataaattagtatttttcccctaagtgaatcattagttcattaacaaaaaaactggccacatatttttagcaaatcccaaaaaagttctctttctattgtttctccagctgtagcgactaatccgaaccgttggttgtgatcggacggcaaagagataatgaaacgaatggctggctctcaggcaatcgtgctgctcgcgcctcgccactgagctccagtttccgagcagatagagcgagttgtggcgggaaaccaatgccatccaactgaatcagtggaaggcaaccaccaccacggccacggcgagccactgcctgccaagaacgaaagctttagacggtcacctcatcggcgtcgccgcccgattttcccatggcgtcccagccactacgcctcgtgaggccgagcccgctcgccggccggcacgcggcggcgtgcaagtgctccgccgccatcccgctcgtcttcgggcggcagcggctgccgctcctcgtcgccttccctcgcggctccggctccggctccggttccggcgcctcctgctccgccgtgcaggagtcgtcgtccgccgccgccgccacgactggtccgcccccaattgcttagctactgtaaatcctttataagattaggaaagaaacgcatcagtgttgattagatcagtcaaatgtttgccatagtagcaccatgccaatgttttgcgttttgccattgaaaagttgcacttattttgttgatcttttggttactatggatttgtggtgtggtgtgcagtcagtgagaagaaggatgcggccgatgccaagaaggaagccaccgcggaggcgaagcccgcagcgaagccggccgcgaagccgaagaagcctccggtgaagccgctgccggagatgatgcaggaggagatcatccccccgctgaaggcagctctggaggctgaggacgacgtgtcccaagtggagctctccttcgaagataatagggtgagtgtgccgactagtgccggagatgataatagggaagtgatcacactgcatattagcatccctaactgtttcataagtactgttgtctgaagcttgttgattttgtgattactgattagtactgaaacgtgtaaattagcaacttggtataagttacagagttacagatggtataaagcaattcagcatagcatagctaattgttcgatgaatgttaaacaagtcaaatttaattacatggaataggtttctcattgctttttttaaatttgattcagcctagttctgaacaatagcattgctgatgatgtaggaatttctgaaggaaattaaaaacatttgcttaggctgtgatagttttgtacaataaggctacagcctacaaggaatgataatgaccaaatatttctgctttttctagataattgataattcataccaacatttctgctatgctgcgttattacatatatatcgacattattaacccttgctttgatgaatgcagttggagggttccttcataaaggatgaagtgccttattacttctgggccttctttccaaatggagacctcacaggtacaagctacctcctgcacctttctcatttcttcatacaaaaattgctgctttcttgctgagaataccgttgggaggcataagcaggacaatacctcaatgcattcacataacctatatatttcataccttttgaatttttaactgtaaactactatcacttgatattccgtgttctgaaggctgctatgtagcgtattatttaggtataaatccgcattctgaagactacaatatagtgcatctaggtgtaaaagaccagttatgcagagtacagagtacttaagtaggattgcagaagcatattttgcaagttgcaacactgcatcatcatcaaagatatgggcgcatagcttattgaatagcttgaaatgtttacaccagtatcattcatctcgacgattaacgcaggaccgaagggcttcgcgctgtcatcgtatagcacagaagtgagcaccatcgagccgttcctgatcgacgagaagagagcaaacgccaagtatgtggtgttctgggtttacaagaggctggctggccaagggatcctccctgtctggaaggaagaggagggtgagggtgagggggagggggagtcttcagcgtagccactcaaaaacacacacacatgggcacaggctgctctgaatatagtacattgtgcaattcctaattgtgaatgttgtaaagatgtaaagttcatctgctaatatatcacagataatcttgatgttcttttttggagcgaagatgatcatgacgtctgaaccttgcatctatctctttggtgccgtgtcaagtatcagtctatcagcagctgaaaaatggtctcttgctgagtctgcagggtagccactgaaaaaacacacacatgggcagtacaggttgctttgaatatagtacattgttcaaagcctaattggacagaattttataaagatgtaaagttcatctgctaatgtatcacagaaaatcttgatgttctttcaggagtggagataatcttgatgtctgaaccttgcaccattctcttctggtgccatgtcaaatatcattccatcaaaagctgaaatatatatatatatatatattcaacaatagaacttattggatcggagatgtaaaccattccattattaaaaaacagcagctggaaaatggtctcttgctgatgttcagtgccagtgtgctgtgtttggttggggcgatctttctgggctgggccgcaagttcaggttctcttgaaatgcttgtcacaatcatagagtgaatagtacaagatcgagctatggccatgtgtcatctgaaaggtatggtatgtggagtttatcatcccttagtcctagctgtcgccctccgtctcattcagtcctcgccattatctgatgctgagatgaccatatgcatggctcctccacagagaaggacaaaacggaaattgaaatgtagatattatattcgtccttcgcaacctaaggttcataaagtgcaaatatataatatatataaagcaactttggcattttaagagcacttggatggtcttatacggtgcataaccaacctcgacagcctcctatcgcgtttcctataatattttctcccttaatattaacaatattattgtcctttttatgaccatcctagcttatttttaagatcttactcaagtatcttttttctttacaaaacacttcttacatgtagataattttgtgaaattcgtctcatcttcaacatgtgtgtcttttttttcctttacacctactccatccgttccgaaaaaacgaacctagacacggatgtaacattttctagtacaatgaatctagacatgagcctgtccagattcattatattaggaaatgtcacattcacatctagatttgtttttttatagaatagagggagtatgtatgagtcttccgtgtaacgaaagatggtttgcaacctccatgtaatgatagaaagatttggatgagctttgcatacaattttcactttttattaaaagttcatcaaaatttataccacaaattttttttggaggaaacaaaaaatctttttcttcttccactccactgcaaccgtgcaacgctgacactcacttttaaatcgcctcaaaactaactgaatcactgaacacccgcacgcaccgcagtttagccatatcgccgccgccgccgccgccatgctcgcctacctcctccacgcccccgccgccgccgccgccgtggtgcccagcccgctctccctccgctcgccgccgaagacgcccttcctcccgacgtcccccatccgcgtgcccacgccgaggcggcgccccgccgcgttctcctccgccgccgccgcggtggtgcccatcgcggcgtcgctgctcgagggccccgtgctggtctgggccgggaggctctgcctctactacgcgctcctccacatcggcctcgccggctccccgcgcaaccccttcctcgcccacggtaatctgcattagccgcggctggtttcgattcgggggaaaaaaggctgggggttcttgatgcgcctcgtgtcgtgttcgtgcagagattggcgatgatggcgccggggacagcgacctagggttctcgaagtgggcggacaagctgcgcggcggcgcgccaggtttcgtgcagtttcaattcaaaaatcgatttatctctccttctcagttaattttatccatgatttattagaacgcgaaaggtgtgtgggattctgtaatcgttaggagaatgtggatcttggataagatattcctctttgggcatctggatagcgagctttctgctagctaggagagagtgcatgcaattgcatctttggatgggtttagatttgggaccaaaaaggtggagatgcttatgatatgatattgtgtgaaaaagcaagttttccgtcgtcgtttatagtggactataatttttagatgtagaaaaagtaaaagttgatgacttggtggatcgataccattatggaatagaaatgtattgaagatttgtttgctacggatatgggaatcagattctcttggatgtttacagactaatcacagaacatagtgcagtgcaggctttaaatgtgtatagaggtttccctagacttagttattgtattatgcaagaaactcatttctcaaactagaacagtttagcatggatgtgtgcccaaaggtgttatcaagcatttctcaaacttatttagtctgacactttgttacctattatttggtggggttaatccaagttttctacttctggtgtgtatcacctttggtttattaacgaagaatccattgtgtcaattctcactatgccaggatcaaccatttttttatcagataacatgcttatgcagttatgctcaccagctgaatttaacatttcaagtgtcaaattctgtaagattgtgtctaggaggaaagaaacataacattacccaagtggtaggcttaagcagttcacaaggggaaccttcatcattttggtaaatagaacgattttggatccaatattgtagatgttatcattgatatcctgatgaggacatcacccatggacatattgttggctaaacattggatggtggttctagatttctgttccattgcttcgttatgtattggactatggttttgatcaaaagtacttccattttcacacacaagatggataaatgatgtgcgtgttcatctcattcaggagaaaacgaagcccaggataagaggaagctagttagcaaatggaaaccaacaactaaaggcacgctgaagaggacttaccgagttcgttcagtagaagaaggtcggcggattcttaaagaaattgctttggttctctccgaagatgaccactttgtggacgcctccagtcacaaggtgatttttttcatgatccactgcaaatacactttctagccattatgtttagtgtttaataatttaacaacaaggtgcttcagaaaaaatactgagatatttgccatgtttcttgctcttattgtaaagttgatgctcttctaactgaatgttgttgcttacaatcagggttgtcaaataaggagggaaagtgcgcacggcgagagtgtgtgctgctataatgtgagagctctgttcgatgagcttcctacccctcacctagttctggagattacagctttccctgctggacctctcactgataatgactaccgcaaggccgagaggctcgaaatggtgctgaggatgagtgcttccatttaatttcagaacacccattttccatttcagcttacttttgcccaagctgtaaattttctaccgatggggctcgaaatggtgctgaggatgagtgcttccatttaatttcagaacacccattttccatttcagcttacttttgcccaagctgtaaattttctaccgatgggcctgtaaattgattcagtcttgctaagaagttaagaactacttgtaaaacctgagttctgctcaatctttctagaattctaatatttgtgctcagtctttctagaactctaatatcaagaagtctttgtcatagaccttacatttttatggcaccgcacttattttttttaactttgcaactaactgttggacagtggctaattcatgtgctatatctgtttctgttatgtcccaaaatataactaattttagcgttcaaattttgttaattccacatataatttctttacctattttcttatctcaacccaccgcaaccatccctcatttaatttacatttctgcttaatccccattaaaaattttagaagtgttttatattttgggaaggagggagacacattaaccagcagaacgtgttctatgactcaaatttgggaccattctaacttgttaggtcgtcacatcgaatgcaaaagctgataggaactaaaaatcagataaaatgcaagctacaatattcacggggaccatcagtttcagggtttcaacttagagttcagtattagatacagcaagtacagatataagcatccacaaacagaaccaacagtcagttgatcattgcagtgcttttagttacaggaaaacttaaaatggagccacacatgtttggtccatttgaggatgaaactacttttttttttcccataaggtattttcataagccaaggatgaattgccaccagcagggagagagccaaagtgatggtgctgagctgaacccacttcacccctcttcacctcacctcatcatggaaacgcgctggtgaatggcgttcgcgaccagcttcccatctccgccattctgcgctctgaagctcattgtgggaaggaagccagctgaggggaagtggctctgctcatggttaccaaggaattctctgctggttgagacgctcgcgatttcagagggagaggaagctgaaggcgcgctaccggtgccattctgaaggcatgtcctattgccagagctcgcgccaccggatgcggcctcctcctcctgttgctgcttctgctcctcgagctgctttgtgttgaggaagcgccctccagatccacgagctcgcttcatggcatggcgatgccgagattcatggaggtatggctgagaagacaggagaaatgtttttaacttataacaggggtaattgtaagttaaaatgtatagctgtaagtagctattattttgccttgagaaatgaatcacccatgtgattgaggatggtgatcactttaaacatactgagtccaaatattttgatcaatgaatagcataaagatgtactctgagcacagataactccctaagtaacccaaggcaggataatgaatttttagctgaaagatatgtaaagatgcagtgcagcagtcagcatgtatctaagaaaattagggaagtactaacaggagcatctcttttacagtttcatagcagaaagaaaaaaaaaagggtaccaggaaggattgcaacatttcgtattaccttccgacctttcaccaacttattttgggcctccaatttagctcgtatctgtctcctcctaagaattgcatggtactgctttgcgtttacaaatattggctcttctgctgcaggctcaacaggcaacggcacccgggagttagctgtaccattttgctggggatgaacctgggtaaataatacacaaatgacaaattgttgatgctgtgccataagaaaattttaaaaaaatgtactgcgaagatgcacgaaataagtgttatacaatatatcatctagtttctcaggaagacagttttgattgggtggcatcttttagctgataagcttagaaatggtttgtacgaagtccaaaatccatcgatgaagctacgatctttaatctaaaaaagatgcatgaatcaattgcaaactccccacctttaagttttatttaaaaggactctttgttgttttattttttttccttctaaatattaatgaagttcaacaaaaaggatgcacgagtcccctgcaaattcctctcttttatttcaaagcacctgtctactcttttgttttgcttctgaataatactcgactgcaacaattgcttaactaccagaatgaataagatcttcgatgctcatcaaattgtaaatggatgaagaggggagaaaaatgatcttatcaccttgaatcgtcaaagattgtacaaatttgatgtgagaacagaaatggtagagtgaactcacaattgcatgtgaagaatatccagtcaagaccccaccatagtatgcatcagctgtataaggaatacaagcctagaacacaacatagctggtcaactgaaagtaacacttgattcaaagagggcaacaatccacacaattgcatgaacttacaaaggattggctatagttgagctttggaggcaaagctcctggattccccaacgatgatactgactttgttttgtcctgatctggcatctgatgaccatcatcattgtctgagggggaaaaaaggacaaacgagatgttaggttgggcaccggaatgattaacagagataatcgatgtaaattgagcactagaaggaataacaggaaaactcactaatgaaatgacagactcatcaaaactgtcacttcagaatatgcaaaagattactcgaaggtttggtgagaagcatagtaataacaacaataaaggaaaatttgaaacgtgagcattacatacaaaacagatgacatggttttgagttttgacgcatatgaactattatcatgtggaaacacatgataatactcttcgttccaatatgggtttcatgtggaaactcaaatgaaaagttcacataatccagaaaaaaggttgcctaagaccacagcagctcgtcacaatttacagctaccataaagtcacttgcactatagcatagatgagcttgcaaataatcattgaacgtattggtatcatgaatacattcaacttggcactacatccatagacaaacgattgccaaccaagaagcagcatctacaaatgtgttttaaagagacatgattgaagcgaagaatatgttgcgacaataagatctgaaactatactaagaccggattaccattatgacaatacttttaaatatcatgcattaccagattgtgttgaggtatgtcgctcatttggactgctatcattcatggcagattcttcttggtgtgactgtccagaatcgcttgacggggaatcttgatcatacatcttatgacctaactgcttcatctgataatctccagagaaaaaatcctacacatgcagagtctagctggtaaatgtgttactcatgggagtagcaaagccagcaattcccaggttgcaccatcaataactactacttacatagttgggcgtagtatgggctcgatgatcttccatttgtcgcaaaagcattagcattatgagatggtctcactttggtccaggcaccatttttcttcgtgtacttctataattagccttcaagacaagttgataacattaacttaagcaaattgaactgatagggcttttaacctgacctcttcagattggtggggattttgttgcccatcaaaggattagctctaatcctttctatcaaaagatgcctattaaaggtttctactcattaactggaatatgattatgcatagttactttcaggtgttgaattatctaaaaaaaacgacaatagatgttgtaatactgaatagagacagtaggaaataactgaatcatgagattctgaaccataaaagcaaataaattatgatattaccttaatatcataataaggtaatacttaatagtggtactgttcagtaggaacagagtaggcagagtaggttgttaagtgcttgttgcaagagtaggaaataactgaataaaaaaacaaataaatcaacctaaaaagagtaccactacaaataacacacagcatcctaccctaagtagacagacagaaaattcttatatagaaacaacctgatcaagaggaataagcacaaaatgcacattaggtagcttacatcagcctctttttctttttctcgaataagaggtagcctacatcagtctcaggtttacatttattacatgcagatcataaagagataacctacacaacttttagtggattgttctcgagtccaaattgccaatccatatgcacagaagaagtcccttgtcttaatcagaataacgattgaaaagctaaaccactagtaaatcagaacatatcgcagcaagttcacacattcagaatcttatcagagacacaatcgcttgataccgtcacaaattcacacggaatttagcttcaagttaccaaatcctgcaatggggaagtcaaatttccacccactccacggcctaaaacacaactcacagtgcattcgatatacagtggtcagctaacaacaggggatgcattgacttcctcgaaaggatgcatcttgcgatgtctaactacaactccgaagcaagcctaacaaagaa

SEQ ID NO: 7463 - DNA, 25070 bp, Oryza sativa
ccacttgcgggcgcgcgcgcgcgggagatgtggggggggggggggagagcggcaacgtgggctcgaggtgcgggcgcggagagggacggagaaggcggtcggcgtggggaggtggggcgccggcggttggggctcggctccaaccggctagaggaggaagacgaccgacaggtgggccccacctgtcggcgcccgaaggagagagggagggagggagaacttcggggaggggaaaggggaacgggccggcccacaaggggaggccgagcgcggccgacgggtggactgggccgacggcccaagaagaggaaaaaggaggaaaaaggaaaaacaaaaagaagaaaggattttcctgggattaaaaattgcactttggtgatttttaattggtaaaaattatttccaaggctctgaaaattccactaaaaatcctgttagcattatttgacatgtagaatccaagaaaaattccacatgccgattccgattattatttgcatttattaattagggaattagctctaggttaattaagataatttcttcggacgatttatttagccaatttttaaagcaagcaaaggggggaaaacttcagggcgtgacaaacctaccccccttaaacggaatctcgaccccgagattcggaagagctggcgaagaggtgcgggtgggtggccttcaactcatcttctctttcccaagtggcctcttcctctgagtggtggctccactgaaccttgcagaatcttattactttgtttctggtccttctctcgctggtttcgaggatacgagtcggcttctccatatacgtcaagtcttcctggattttgatttgatccggacttgcctgttcctcaggaactctcaaacatttcttcaactgagagacgtggaacacgttgtggatgccaagcatgttggagggaagctcgagctggtaagcaacttcacctctacgttccaagatcctgtatggtcccacaaagcgtggtgccaacttccctttggtttggaaacggtgtactcctctgagcggagtgacacgaagatacacataatcccctgtttcgaaagcgagctcccttcggcggttgtctgcatagcttttctgccgagactgcgcgattctcaatctttccctgacagctctgactttctcttctgcctcatttaaaacttctgtaccaaacaactggcgttcccctgtctgatcccagaagagcggagtacgacaccttcgtccatacagtgcttcaaatggtgccatctgcagactagcttggtaactgttgttgtacgagaactcagcatacggtaagcttttgtcccatgctccaccaaagtcaagcgcacatgctctcaacatatcctctagtatttgattgactcgctcagtctggccatctgtttgtggatggtaagcagtgctgaaattcaaccgggttcctaattcttcttgtaatttctgccagaactttgaagtgaattggcttcctcgatcagacacgatcttcttaggtacaccatgtaaacacataattcttgccagatagagttctgctaatttcttccctgagtaggtagtgtgcaccggaatgaagtgagccactttggtgagtcggtcaacgactacccaaatagaatcatgccccgatgacgtcctgggcaaaccggtgatgaaatccattccgatttcttcccacttccattctggaatctgaagtggctgtagcaatcctgctggcctttggtgttctgcctttactcgttgacagacgtcacagagtgctacgaattcagctatttcccttctcatgctgacccaccagaacttttctttgagttcttggtacattttggtactgccgggatgaatggaatattgagtttgatgagcctcggttagtatcaggtcttttaattccttgttttcgggtacacacaatctttctcccatccagattgttccttgttcatcctcaacaaaacctcgggcttttccaactctcatgttctttttgagctctgctatttcaggatcacttgcttgagctatgcgaacctgctccaccagtgtgggctgtgcctctagggcagccacgaatccgtgctcaactataccaaggttcaaatgttccaaatcacgttgtacctcacagcatagttcctctacccatgcgacgttgcagtaactcttcctgctcaaggcatctgctaccacattagccttgccgggatgatagtgtattcccatatcataatctttaattagctccaaccatcttcgctgtcggggattcagatcaggttgggtgaagatgtactttagacttttgtgatctgtatatacctcacaacggttactgatgagatagtgccgccaaatctttaaagcatgaacgactgcggccaattccagatcgtgcgtcgggtagttgccttcatggggacgcaactgccgtgaagcataagaaaccactttgccatcctgcatcaacacacatcctagcccctggcgagatgcatcacaatagacctggaaatctttcgtctgatcaggcaggattaagactggtgcagacaccaaccgtcgtttgagttcttcaaaactcctattgcattcagcagaccagataaacttttcttccttcttcaatagctgtgtcattggcttagcaattttagagaagttctcaatgaaccggcggtaataacccgcaagtcctaagaaactccgaacctgagtgactgtccttggtggggtccatttggtaactgactccacatttgctggatccacagctactccttgagcattcacgatgtgaccgagaaactgaacttccttaagccagaagtcgcacttgctgaacttggcatatagctggtgctcttttaacttttcaagtaccagccgaagatgctgctcatgttcttcctcggacttggagtagataagtatgtcatcgatgaaaaccacaacaaacttgtctagaaattccataaacaccttgttcatcaaattcatgaagaaggcaggtgcattagtgagtccgaaagacataactgtgcattcgaacaacccgtaccgagtgatgaatgctgtctttggaatatcctcttcgcggatcctcaactggtgataacctgatcgcaggtctatcttagagaacacagtagctcctttcagctgatcgaacagatcatcaatccttggcaaagggtacttgttcttaatagtgacctcattgagtgcgcggtagtcaacgcacatcctcttggttttgtctttcttctccacaaagataaccggagcaccccaaggcgacgtgctcggacggatgtatcccttctgtaactgttcatcgacttgcttcttgacttccgccaactcgctggctcccattctgtaaggcctcttgtggatcggtgcagttccagttaccaagtctatccggaactcgatatccctttttggtggcattgttgtcagatcgtccggaaaaacctctggatactctctgactataggaatatcctctagtttcttagtggttttctccactgctacctcttgttcttcaccagcagcctggtttaaactaatccctggcttctgcggcactggagactggaagattaccacctctccttttgcattggtcaacttgatggtgcggctggcgcaatcaatcactcctctgtgccttgccaaccaatccattccaagtatgacatctaggtccttggattcgagaagaatgaggttggctggaaaaatcaacccttgaatttcaactgtcacagatgggcagtagtgagttgtggtcatgccacctccaggagtatgaactcgcattggtatcttaagcttcactaaagataacccatgtgcaccagcaaaacgcttggaaatgaaggaatgggttgcaccagaatcaaacaatattactgccggtgtcgagttgacggggaatgtgcccaatataacctctggtgctgactgcgcctcctctgcagatgcatgattaacacgggcctgaacgaacttgggtccagcacgtcttggcttcgggcactttccaaccgtgtgtccgggtttgttacaattgaagcagagttcgggtttttctcccaacctcttgggctgttctggcagagctggctgaactgattgagctggaatctttagtgaactcggagtagggttgaggctgtgctgctcactgttgttgtgactatcactatggtgggtcttattgaagctacccgggtggtagggacggtgctgtcggataatcatggtggaaggtccaccgtgacgtcccatcgtgtaacgaggcttctgacacttcccctggggagtcctgaactgggctgccttcctcttacggttcattttgttacactgctcctcttgacgaatagccttgtccacaagcttctcaaagtcctcatagtctctagagatcaactggttggtcaattcatcatcaagaccagacataaacttctcctgcttctcggcatcggtacgcacgtcctcaggggcgtagcgcgcgaggcggttgaactcatgcaaatactctataactgttctggttccttgttgcagggaacggaactctctcttcttttgtcccacaattccctcgggaacctgtgctttattgaaactatgacgaaactctgtccaagtaacctctgccccagccggacgggtcaccatgtagttgtcccaccaaatagaagcgggaccttgtagctggtgtgtagcaaaagcaaccttctcctgctcgttgcattgcaaaagattcagcttcttctcaatggcatgaagccagtcgtgggcctcgattgggttggtggtgcttgagaaagtgggcggcttgacacgaagaaattctaacagtttggactgaggaggtggaggaccaaactgcaggttctgctgctgcagctgtgcttgctgctgcacctgctgcatcacctgatggtactgttgctgcatctgttgcatcatcattgtcattatctgagtctgattgtccaacacctgagcaattgttgggttctcgggcggtggggacggactgttgtcagatgcaccgttggcacgtgctccattgatcggctcttcgctgccactggcgttgttcgagtcgcgtgaaccattccttatctccatctgaaggggataggtagaaatatgagaaaaggaagaaaaacagggggctcagaaactaatcttgcttatgaatttaagtgcaattatcttaatcttgattaaaacactgaaaaagaggcacgcaactcctaattgaggcagtcataccactgacacatgatatcgaccgccgactaacccacaagcaacaaacctaaacacgaaaactagcaagcaaacagactaagaaggcgataaagctaagggcggcgactctgaagctcggggcggcgcttgcaaacgagggataggactgacatctaaagtagacaagggataggaaccaattcatgctcaaatccaaattaaacaaagcaaaagaagactcaaataaataaccgagcaggatgatttttatgcatagaacatttttcatgaactcaaataaagacactaatgcaactaaacaataaattaatgcatagactagttgcatggaaaatgatgcgcataacattgcccccatcgaatatagacacgacctaatgcataacccccaataaattcccgactgactgtcgaataaactccaactaaaatttttctaaagccctagactgagctaattttttttttttaaaaaaaaaaaatccgatccgaaagaacgaccaagatttttcccgcaaaccaaagaggcaaaactccaaattttcccgaaacaattccaggtgcaaaaaggcatatgcagatgaaaaaggggttcagagggctcttagggtttccagttggcttgtcctacggtcaaggtcggctctgataccaacttgtcacgcccagaaattctcgaaccagaatttctaagctgaatgtgcattaaatccctgtccaggaccagccagggtacacaaacgacaattgttgacatacagatccacgtcttacaaaaatagaaaagattacaaatgcagcggaaaagataaaagcgagctaaaccgggaagcttgacttcagcagcgggcgactccactccacaggcaatccttgacggcagcgacgaaaccaactttgacaaaacagctccaactaggaagatcttcagctctggtgtgggggaaaagagagcaagactgagtactacccactgtactcagcaagtcataccggaagaggaggtatgatgcaggatataaccaaaggaggctagaggttcttttgcataaagctagcatttaaaagcagtagttgaaggcagtaaaacagttgtagtaattaatcaatattaaccaaacactgtccaacgctacaccacgttgcaacaggcccaaccaaccacctgaactacaccagttcattaagctaaactaggggtgagactaatcacggtgaatctggttgatcgcccataaccgcgggcacggctattcgaatagttttactctggccagaggtgtacaactgtacccacaagacacgattccacacatgtcgccatgccccgaagtatcaccatgatactgcaaagggggaaatcgtgacaagaccctccacataaccctcccctaaccatccacaccacgctaaggtttcacccccacccctcaaaaggcagtgggcggtcccctcttgcgccgcggtgaatccggcagctggacaaccggacaccccggccgacccaactccatcacgcccaccctcgccaccggtgcctaggaaagggtcgagctatacttcagatcaagcagttacccactcccgcttgtggtaagcacggtaagtctcccagggtttcccgtgaaccggtccttaactgccatgggtgcgaccagcataaccatgcacccacagcccaccattcagtgtattttaattaactaacaccattgcggtggcaccaatctaaagctataccaatagacaaagtctatgtaataaggtgatccccatttgtgtgctagttgaactaagcatggctaagcatttcctaaaccaacatctagtcattttgatacccaagttatcaatggcataaggtaaacaataaatggctgagtattaggacccatcccacatgacattgtaaaaggatgcaacatttaatagaaatgcgggatatttgtaaattgggtacaatatgatcaaacgtattgcatgacttgccttgctctcgcactgatgagatcacagcaacgtcttcgagaaactgcggatcgacgaaacggccgaaatctacgcgacaaacaaagcacacaagcaaaacaggctataagactactgaagcaggaaacaaaactatttttaatggattctttgcatttttcttgatttactgagacttgaatggacttaaacggagctcggatgaattacttatgaattttagaagataaactgtgtttttactaataaagaaaagtccttaattaattattgcgcaatattgccccagggctgacgtcatccaagggggggggggggcggcgccgacatgcgggccccactggcagcggcacaaggggagagggagggggcggctggcaggtgggccccaccaggcggtggctcaaaggggaggcgagggaggcgccggccgggctcggctcggcctcaaagccgaccggcggccatggcgaccggcggcgacacgcgcggtcaccggcggtgaccggcggcgcgggagacggcggcggccagtgcgaaggcggcggcggcggccgaagatgacggcacacgcgcggagggcggcggcgctcatgggagggagggaaggaaggaggaggagaggggattcctcaccggcgaacacggcggccggcgcgaaggaagaaaacggcggcgacgaccggtgatgccgaggcgcgaacgggcggcggcggcaccctaggagagagcatagaggggttagggaagggaaggcgaccatggcggcttgaattgccggccggagacggaggggagagagggtctcaccggcgcgcgaggagaaaagggctccggcggtgattcgcggcaatgaagcggcggccgaggtgcgggcgggctcggtgagcgcgacggcggcgactgcgtggcgcggcggtggctatagtggcggcggcgcgtggccggagacggcggtaggcggcggcgcaaggggcgagcggcgcggcgacgataggaagcacgggagggcgcggcgagtgcgaaaaacgagagaggaagacgcggggagcgatttataggtgcgggagggggcggacgtggccggggaggtggccgatttggccggcgatgtgggggagtggggaggaagagagagagagagagggattcaaatcccccaccacttgcgggcgcgcgcgcgcgggagatgtgggggggggggagagcggcgacgtgggcgcgaggtgcgggcgcggagagggacggagaaggcgggcggcgtggggaggtggggcgccggcggttggggctcggctccaaccggctagaggaggaagacgaccgacaggtgggccccacctgtcggcgcccgaaggagagagggagggagggagaacttcggggaggggaaaggggaacgggccggcccacaaggggaggccgagcgcgggcgacgggtggactgggccgacggcccaagaagaggaaaaaggaggaaaaaggaaaaacaaaaagaagaaaggattttcctgggattaaaaattgcactttggtgatttttaattggtaaaaattatttccaaggctctgaaaattccactaaaaatcctgttagcattatttgacatgtagaatccaagaaaaattccacatgccgattccgattattatttgcatttattaattagggaattagctctaggttaattaagataatttcttcggacgatttatttaaccaatttttaaagcaagcaaaggggggaaaacttcagggcgtgacagcccgaagacccgcagtgcgaggatttcgaggatcaagctccagatctcgagcaaggcaagctacctttgaacatcttgagcctatatttgaaatttaattatgttgcttgaaaaatattatgcattgataggatcgcacttaatctgtttgtcccgtctgcaaggcagattggcggacctatctaatttgttgtatttgatccttcttttgttaattgttataccatgtccccttgtaaccatctagttgcgtctcgatattcgtgcaccctgtgcgagtatcgacggacgccttcaaacttaaaatctgaataacaacttgcgtaaaacttgggttttacaaaagatttggaaaacccgacacctgggtcggtgcttgcgaactaaatgaatttccaaaaccgcggaccggggaacgtaccgggtgtacggtttcccgctctcgcacttaaggaccgatttccttggaatttcatccaaacataagacaagtacgaccacatgggtggaatgggacacccttggctgagtaactagcttatcaggggagccttgatgccgagagacatgtggattcgccggggtggtgtcggggaggacccctgggcttcttggcacagtatggtctgggacctaacctgttgttggtctgggactcctctcgtcggcatatggtaaacctgtgtcggctttggaaatgccttgtcatgaaagcttggaggtctcccgacgtggctgatccccacgggctgggtgatccgggttagtaatgtcgtgtgagtaaagtgtaccccctctgcagaggttaacaaactgttcgaacagccgtgcccacggtcatgggcggatgtgaggtgattcctagcgtagttttgtttgactactgcttgtgaaattactgttgtgaaaaggggttcaatgtttgaaaattctgcaggtgatgggatcagctaggcccgggtggccgtttgaaaagtggttggcccgggtggccgtttgaaaagctgttggccgggtgccaaccttgtttcaattctaaagactgatacattgcacatactccgaccggacgagacgcactgtctcatccgtgtcgtttgagaagcactcacctagttgttttagaaaagagttcaaataaaaacaattgcaaaaacaacagcctttccttgaagcctgcattaaacacttatttcccatggcttgctgagtactcccgtactcacccttgctctatataaatgaccccccccaagttgctgaagaagatgaagcggaagctgctgatgaggagttcttccaggagcaagccggctacgatgagttttagggtttcggcctagttcccaagtcgcgcctgtgttgattggtccaagtcctggcttccgtttcccttttgtaatgcagttgtgagctcgggatctgtccgcagcccaacatgactgtacctctactctataataaagagacctctgatgctatgatattctgtctccctgtgataccagcactgtttcctgggactggtatcgattaacaggttaatttggaacgtcacgggctagttccggtcgggactagttcggggcgtgacatggacccccgagattccttctatatgagcggctagatccgtttgaaattgatggtgttaggagagctgaatccgaattaaaaccttatatcttattatcttctatgaactaaaagtgacgtagtaatcttcaaatagacttggggaatactctgatttggtccccaatcaacgttctttttatcatttataaatttttttctcaatctgtttttctttaattaagctagtatccctataaataagaacacacaacatacatttatagtgtaataatgtttgtttaaatatataacacgtagatctcacgtgtaaagcatacaaatttgattgatgataacatacgagcctgccgtgatctccttcgtcaccgtctctaccgatgtgatgctccttggagcgccgcccctaccgatctcgatccctgtacgcgtgtcgagtagacggaccaggtaaaagtaaaaaaccaggcaatatgcatcccacacttctgccacctgtcccgctgtccgtgcaccctcgccccttcccggcccttccggaggaacccagccaccatgaacagaaccaccagcaacttagggccctttgattaaaaagaattcatagaaattttagatggttttattcctgtaggattttttttctatatagccctttaaattaaaggaattgatcctataaaatcctatgaaattcctatggattatctttttccatacaagttttgcaagttttggaggaaatttgacatgagatagaacctcatggaaagaatcctttgagtctttatttctcctcaaattcctatgtttttcctgcggcccaatcaaacagtcatttctatgtctttcctgtgttttgcaatcctctataaaaccagttaccactagctttaccaccagtggccgcacctttcactctgcttgatctcttcgtcgatctcctccattgttcgttggtctccacgcgcgcgatctggaattacaaacttgtagtgccgatggttgcggcgccgtcgatgatcgctgccgtgcccgtgggcgtcgggtcgaccgccttcttgtacttgctgtggccggcctcggcgccggcggcggcgatgatatgatgaaggcgccgggcgccgccggctacgtcatctcccgcgcggcgttcctggcgaacccgcaggtctacttccacctcctgcgcacggtgggcgctgtcacgcccggaaattcactagtaatttccgaacttatttgtgcataaaatcctcgtccaggaatcagccgaggtacacaaactgacaatttaatatacagattcatcaaattaactaaaacgataaatacttacttaagaggcactaagtcctcaccaagaagaaaactgcagcggaaaataaaatctagcgaagctccggctccactcccacaggcagctcaactggggtataagccaaacgtcttctccttctggattctttttcttcaactgaggttgattgattattgcaaggtgagcatatgacatactcagcaagccacacagcaaatatgcaagtgcacaaggataccaaaggatggcataatataggctcatttgcaaaagcagcatttagcaaagagttaagagtagtaaaacagtagagtaattaattaaaaattttaatcaacactgtacagcacacccatgctgcacaggcccaaccatcctgaacaaccatacccggctgtacagatttaactccaaaccaggagctaagcaaattattaccagttatagcatccataattattgtgagaggtgtgagactaatcacgaaaaacattgttcaactcgcccataaccgcgggcacggctattcgaatagttttactctggccagaggtgtaccactgtacccacaagacacagcctcaacatcatgtctaccatgcgtcgcgatactggaaagtacccgaatagaggctgtgacaataccctctgcataacacaactcaccacagtgcaccattcctggatcataatcacccccttataaaacaaggcatggactccccagcgacccccgtgggcttatttccgccacttctcagtctggtgctccgcaatgaaccatgctatacaaaaggtaaagccgttgcccacgctggcttgtggttggtacggttaatgtttcacaacagtacctcgcgaaccggtccttaattgtcatgagcacgactctcaaaaccatgtgctcacaacccaccattatcaagttttagttggcaagtaattaattaaccaatcacgtttgaccatcgtgagctaccattaaaccatcattaaataataacgaatcataagttatcccaatagtgtgctaatgtttctaagcatggctaagcaatcacatctaatatctagctgaactaatatataaagctcaactagtcaaattataataacccaaggtatcaaggattaaagtaatcaatgcaagcaggccataacaaaggaataggttcacaccacccagtgacattcgaaaataaatgcacagttgaaataaatagagaatttaaatataggatcaacatgctcaaaggattgtgtttaggatctgtgtgacttgccttgcaataatcggtcttcaattaatcttcttgaatacttccggcgcactcgcgaaccttcgcaacgacggaaacgacaagctaacacgcaaaacgaagaaaaagactaataaaaaccaaataaacaatacataaaaagtaaacaaacatgtagatcataattttagatgaattatgagacttgaacggcctcattctgatttcatatgaatttattatgaattttacaagattaaattccaattaaacctattaaagaaaagactattccaaattaattaaacaatttacaaatgatttataacggagacagaagattaaagcaacctccggaaaagattagattatattggtagatgacatgataaaaagaaaaaggactaatatgccattgaaaagatagaacgaatttatattgattttggacggctgagattaatcttgaccgagagttgaccaagatcggatggcttagattgatctggcaagcgggcctcacgagataccgactcaacgagtcaattctacgtgacacgggatcacccaaatgatcaaccgaaaccggcgaacggaaccggcggctctgaactaaaggacgactcaacacggacgaacgaacgaagcacggggaacacctcattcgaacgaacgagcgaacgactcaacaacggctgcggctaaaccggtggactagaaacgattcatggtaaaaccccggtacgacaaacgatagaccggtaggaacctagggttgcacctacggctgcacaactcgactaaaagcagcggctaggtttaagcggcacacaactgcgacacggcggcactagggcgacttggcttggctaggcggcagctcagcggatacacaaagctagggttagggtgacggcacagccggtagcaaccatgcacggctagaacagcagggctatgagcaaaaacgcaaccggcacggctgcggctgtggcaaagcggcaagcagctgcagctaagcggctcagccggcacacgcgcagcagcggcacggcaagcagcagctacgacacagcgatgacgacacacacggagacgatgatgacgttagggccaaacaagattagattagatcggattaaggccctagggaaaacctcacaggtgaacggcaaaggagcggcggttgccggcgaaccacggcacaaacgcaaacggagggcaccgggagcgagaggggatcaaagtgacccttaccaccacttatgcgacgacagacggcgagggagatggcaggcgacgagctccaaaggcggcgaccttgggttgacgatggcgacggcttttcggcgacgagaggcaacaaccgagggcggacggtcttcacctcgctcctgcgatcccgagggtggtgacggtgaatgaaggcggcgatggacggcgacgaacggcgcggctgaagatggaacggatcggcttcacggtgacgacgggcttcccggggtcttcgacgacggggaagtggaggccggtcttcttctcctcctcgcgaacccaacggcggcagcggcgaccgaaggcgacgaccacagcgacggcgcggggctgctggagcggcgccggcgaaccacgatacgacctcgccggagatagagcggccggctgcggatttggagggcatgcacacgtagaggacgacgaggcgaacccaacggtactcaccacaacgacaatcgacgtccgacgacggccggcgacgagaggaggcggcggcggcttggaccttaccgacgacggcgagctacggcggccggcggcgaagaaggacgggcggccgggcttctccaccccttggcgcacctcttggcgacggcggcaagcggcggcgacggcagaagcggcgcggcggcgcggctgcactcggccggcggcggcgacgaactaaacgcgcgcggcgacgaggctacgaggcactagagagctcgggagagggggcaaacgaaagaggaggactagggggtcctatttatagccttggaagctcgggtccgggcccaaaacgacgggaaaaactcgggaaagtttatcttcgccggaaaaaggaaaggatttgatccgcgaaattggaaaggatttccatataaaattttggggatttcttggggaaaaggaagaggagaataagaggaatatttcccctcaactaatttggaaagaggagcaacgaggaggccggatttggtggaagaaggcggcactgtgcacaggctcggctggctcgggctctgtccagagctggaagatgaacagtgccagggaggcaaactagacttttttcggttggctgagaacagaacagagcacttgacttgggccggcttgggctgcacagcacgcgcgcaagggagagagaagaggaaggaatgggccgaaaatggcccaagcggaggaggaggatttttattactttcccaattaaaataatcacttaaatgatctttgaattgttaaaaatacttccaatgctcaaataatttcaagaaaaatcatgaaaatacttggacactcaaagtatttaacaatattaaaaccagaccatttaatgattaatttaatatgtggattattactgaaatgttctttgtatgattaaaaattaggaattgagctccgaaaaatttgagaagatttcagagagttgacttaatcatggagaatttaataaaaattaaatccatccatgctttatattagggaaattttatttcccacatttaacttcacttgtaaattaaagaacatttaatataaattctattaataatttattaaataatttataaatcctgaaacgaaaatcaggatgtgacaggcgccaaggcggccgccgccgcttttgctgtcgccgcctgacgcgcgcgacggcgccggcgacgtacgtactccactccgttagctattgctgctgctggatagacgactacacacctataggctatagctagctagtaagtactatgtagctacactagtacatagttatcctccacgtacgtacgggaaaaagctgctggttttgttgtagggtaagcagtgtggttgatcgtgttggaattaatgaatgggtcttagcccactcgaagattaattctttggaaaatcacaaaagcccacctcatgggatggcatgcatgtggagtttagtaccacttgcttattctaggagagggggacctccttaaaagggaggataccctcccagtcacttgaagcatgtgtggtggagagaagaggggaaacacgcgcgcgctcgctcgcctcgcctggcctggcctggcagggcagggcaggcggcgcgcgtgcacgacgtacgcgtcgaatggtccgaaaaattggctcctaacccttgcgcagatgcagcctctttttgcagttttgttttgctgcaaattcggattcgtttttgttttcgacaggaatcttgttagtggctcccgtctgaccagagacggatttaagttggtttttgagtctaataaagtagtcgtgtctaaacatggatattttattggtaaaggttatgagtgcggaggcctgttccgcttttccctttctgatttctgcaataagtctgtgaaccatatttgtggcagtgtggatgatgaggctaatgtttggcattcacgtttatgtcatattaattttggcttgatgtctcggctttccagcatgtgtttaattcctaagttttccattgtcaaaggttctaagtgccatagttgtgtgcaatcgaagcaacctcgcaagcctcacaaggctgccgaagagagaaacttggcaccactagaactcctacattcagatctttgtgaaatgaatggggtgttgacgaagggtggaaaacgatatttcatgacattgattgatgatgctactagattttgctatgtgtacttgttgaaaacgaaagacgaggctctagactattttaaaatttataaggcagaagttgaaaatcaacttgacagaaagataaaaaggcttaggtctgatcgtggtggagagtttttctcgaacgagtttgacttattctgtgaggaacatggcatcatacatgagaggacgcctccctattctcccgagtctaatgggattgctgaaaggaagaatcgcacactgactgacttggtgaatgccatgttggacgccgcgggactgcctaaggcatggtggggggaggcattgttgacctcaaatcatgtgttaaatagagttcctaacagaaataaggacaaaacaccatatgagatatggattggtagaaaaccatcactttcttatttgcgcacatgggggtgcttggcgacagtcaatgtaccaataacgaagaagcgcaaacttggacctaagactgtggactgtgtttttctgggatatgctcatcacagcattgcctatagatttttaatagttaaatccgaggtaccggacatgcatgttggtacaattatggagtctcgtgatgctaccttctttgagagctttttcccaatgaaggatacacatagtggttcgaaccaaccctctgaaataattcccagttcaatcacaccaccagaacaaactgaacatacacatgaacttgtctctgaggaggatgtcagtgaagctcctcgaaggagtaagagacaaaggacggctaagtcttttggtgatgatttcactgtgtacctcgtggatgacactcctaagtcaatttcagaagcatatgcatctcctgatgcagactactggaaggaggctgtccgtagtgaaatggattccattatcgctaacgggacttgggaggtaacagagcgaccctatgggtgtaaacctgtggggtgcaagtgggtgttcaagaagaagcttaggcctgacggtactattgaaaagtacaaggctcgacttgttgctaagggctatactcagaaagaaggcgaagatttctttgatacttactcacctgttgctagattgaccacaattcgtgtgctactttccctagcagcctcacatggtcttctcgttcatcaaatggacgttaagacagcttttcttaatggagagctggatgaggagatctatatggatcaacctgatgggtttgtagttgaaggtcaagaaggcaaagtgtgcaaattgttgaagtctttgtatggtctgaaacaagctcctaagcaatggcatgagaaatttgacaaaacattgacatctgcaggctttgcagtcaatgaggcagataaatgtgtgtactatcaccatggtgggggtgagggagttattttgtgcttgtatgttgacgacatactgatatttgggacaaatcttgaggtgataaatgaggttaaatcattcttgtctcaaaattttgatatgaaggatttgggagtagctgatgttatcttaaacattaagctaattagaggtgagaatgggattacactcttgcagtcccattatgtggagaagatcttgaatcgctttggctacattgatagtaagccttctccaacaccttatgatcctagcttgttgcttcgcaagaacaagagaattgctaggaatcaactggaatactcccaaatcattggctcgttgatgtacctggctagtgcaactaggcctgatatctcctttgctgtaagcaagttgagccgatttacctctaatccgggagatgatcactggcgtgcgcttgagcgagtaatgcgctatctgaaaggtactgtggaattggggcttcactattctgggtatcctgcggtactggagggttatagtgattctaactggatctctgatgtggatgagatcaaagccactagtggatatgttttcacactgggtggtggtgctgtttcatggaagtcttgcaaacagaccattttgacgaggtcaaccatgaaagcagagctaacggcactggatactgctactgttgaagcagaatggctgcgtgatctattaatggatctgcctgttgttgaaaaaccggtgccggctatccttatgaactgtgacaatcaaacggtaattgtcaaagtgaatagttctaaggataatatgaaatcgtctagacatgtgaaaagacgattgaagtctgtcaggaaattaagaaactccggagttataacgttggattacatccaaacagcgagaaatctggcagatcccttcacgaagggactatcacgaaatgtgatagacaatgcatcgaaggagatgggtttgagacccatgtgagttatactatggtggtaacccagtctatgtgatcggagatcccgtgaattagatcctgggaagaacaaaccattaataaactagaggagagtaccaatatatataccctctccaagtgaagatgcatatactctcgtgagctgcaaggcaggttggctatgccttaatgagttctgttggctttaattagcgaagatgttgtcctgcagagtattcttgaaagaactcacctttgtgagcttgactgttggtcgcagtctatgaagattttgggtgaatcttctaggaagcttactaaagacctaggagtatgacttatacgctccacccgaggggtagtctacagacggtctagtaccagataagactttgagtgaaacttgcttgcacaagacttgcaattcaaggcgtagtccattgttcaagttgtgagtaagtgtagcttggagttctaggtggatgttcaaccttaattggtctccatcgaaccgctggtatataaacagtatattggaaaaggcaaatctcagtgggattttgagatttggtgggggattgttggaattaatgaatgggccttagcccactcgaagattaattctttggaaaatcacaaaagcccacctcatgggatggcatgcatgtggagtttagtaccaccttgcttattctaggagagggggacctccttaaaagggaggatgccctcctagtcacttgaagcatgtgtggtggagagaagaggggaaacacacgcgcacgctcgctcgcctcgcctcgcctggcctggcagggcagggcagggcaggcggcgcgcgtgcacgacgtacgcgttgaatggtccgaaaaattggctcctcacccttgcgcagatgcagcctctttttgcagttttgttttgctgcaaattcagattcttccgaaaaatccggtgcgtgcaaacggcgtggagtccagataagttacgcgtgacttatccggttcggttacgcgcagtagagatcgtgcgggcgccctgatcaagcgacccttctctatataaaccgacctgccgtcttcacgcaacacacacgaaatcaatctagggtttgcctcctactctgtactgcgccgtcgctcgtagactactccatcccgctcgccagcgtgcaccggcgatcgggagagcaggtctccggaacctttgctttcgacgtcctgcaccgggagaaggcggcaataagttttttgggaagcgcttcgcgcgactgctccctgttcgttcgcgacggctcgccttcctcttcgctcgcgtgtttcgtgccttcgtagacacctgcgaaaagtttcgaccaagcagccggtctttctgtcacctcggtacgtgttcaatatgttgcgcatatttgatctgtttatgttatactgtatagtttacatatgtagatctaatgatgcgttcatgctagttttcatctgtaatgtcatgatttatttatggaataaattaaatcattatatgtctataatctcaacagatcgtgcatcctagctttgcatggatacacgcccaaatagtatgttccattcgaattggtcatcgcgtactcctttagttcatccttaaaaaaataaactttaatcccttcatcctataaaatatatcaactttaacctattataaaaatcaactttaatcccttcatataaaaaaatcaacttaaagtcattatgtggatgcacgatcgagcaatttattggtgaagtttattggtgaagttagggcctgtttagttcttccaaacctctaaaatggtaaaagtttttaccgttttgaagcatattttgtcaaaatgaatctaaacactagtagtaaaagttatcaatttaatatttgtcatttgaaaatttgaaaatctagagtagtaaattttgtcgaaaagtgcgttgggagtgctctctctaccagaaaaatggtagaatatgcatctaaacagtaactattaaaacttcaacttcaaatgctaatttttttttgtcaccaaaacttttaccacagaaaattgatttaaacatgcccatagattataaaaatcatgaacgaacgagtctgagtcaatgttaacggatctatcgatctggataaaaaatgcatatctaattttatttttaaaagttagatattatcgttagaagttaaaaggtccacggatgtgagtgacaacttatttagtgtgagtgaaatttagttacaaatgttggtgatttttaatttttattttactatattctaaaccaaccaaacaagcttcctttccagatttttagtgctatgttgagtttcatatgttactatgttgttactagcctactactacctacatctatataggatttttataaatgagaatgttctagattttttgtgctacgttgagtttcataccacttcttccgtcctatgaaaaattaatcctttcatcccataaaaaaataatctagtattgaatgtaacacatatagattagttgtactagagttctagattcactttttgttaggatggagaaaactagggtgttactagcctactatactattacctacgtctatgtaagagcaattacaatagcacgctataagccagctataagcatattttaaatagataaaggaagagagaagagcagcgggctataagtctatagccagctgtagcacggactccaaaacggaatgtgtgtatgataggtgggaccaggtattaatagtatagtaagcaactattgtatgaattggctattacattggctatagatgatttaaaactagtagtggactatactattaaacttgctctaagattttttataaatgagatggtttatttgggggaaggagcacactactactagaatttatcgtctgctcacagatttagggggtgtttgggagagaggggctaaactcaaaaccataagtccatatcctagaaacttatgtttttgagagaggggctgaagtctcccaaacacccccttaattactcgggtaaacgaaacgggcatcctctcagtgctgcttctcacttaattgtagaactttattgaaggatcaattaccggccggagtcccaaaaaagcgtgggaaaaaaagacacggctagatcgcgcgcgctagcggcatatcgctaaccagcgacgcccttctcttaaacagttactagtacactcaacagtacatgccttttttttcttcctagagaattttctcctaaattacttatccgatttataatccgattacaccattatggttgttgtaattaaatctttacaacaagatcttacacgaaatatctatgttgtaaattacttttattatatatgtaagctacttttgtcctatacataaattacttttagatttaagctctttaataacttatatcttttaaatcacatattattttcatgatctatttacatcattgtactctacataaaatatgagataaaaaaatccatgttgaatatattcaaacatttcattaatttaaaagtaatttatttaaattgtagtagtaacttagctatgcaatagatgtaacttagctatgcaatagaagtaagttagcacaaaatagaagtaagttgttacaacattagaagtaaattcgagagaaaaatattttgtatctaaaaattaaatttaaagtccataaattatagaattgactaaaaactataataaatataatcgacttaaagcattatgaatatataaaaagtaattaattaaatctaaaagtaatttatatatatgataaaagtaacttaagtatataacaaaagtaatttacaagtataaatattttttcatcgtagtataatcatgtaagatctagttttgaagatttaattgcaacgaacacaatggtgtaatcggattatagatcggataattaatttgagagaaaactttgtaagaagggaaaacaatacatgatgtgtaatagaaaaaaaggcatgcatgtgcgctggcttctccacggcttctatggttggcgtcgcccgataagacaatatcaagaggcctcgctgattagtttttgcgaaaaaaaaaaagcatcgtcccatcgtcttcacacattttactacgagccgtttgatctataccgtccttcaaattgtgatcagcttccaagttccaacccatccccttcccgaggaaaacaagcaaattaatgcagactaaattgcctatatataccacgtctagcactagtcatctcgatcttgggaagttcagaagtagtcgaccttgggaggttgagaccgcgatcgatcgagagctagccatggtgtcgctgggattcgtcgtcggagcggccgccgcggccgtggtcggcgcggcggtgagcctgctgctttggccggtggcggcgccggtggtgatgatgaaaggtccaggcgccgccggccacctcatctcccgcgtggccttcgaggccaaccccaagctctactactacctcctccgcaccgccgccgccgcgtgacgacgtacgacgacgacattacgtacgcacgcattgtgatcgttgcttgtggttctacttctacctattaatgctagatgctttcttgcatggtcgagtatgttcgttcgatcgatcgggatggctgcttgtttccttgttgctctgtaatggtttgaaactaatatatatataaacggaggagtatttcagaaaattttctgttctctagttctctcgttcttgtattgaatgaggccttcttgcgactctgaacgtcgatctatatcccatatcctaagcctcatcttaactatgagtctagacacatattcttagttataaaatttatcttttttacagagagaggagtaatagttgtgatcgatattgtcatactctgtgatgaagccaaagtaactttttgtacatttggagcttagtgtaattttctttttatattttcttatgtgcgacaaatggtttttataatggtagaatgattaaacgtcgataataaaaaggccaacaatgaagcaatggaggcttctcttgaagtttcacagagctgcaattgtttcatcgagtagtagaacaaatcgaacaaaaaaaaagttgacgcggttgagatcaagtaaacaaagagtaagcaaaatcaacgaaatcttgcgtgagagggtcaagattacctccgtaaccaaccaaattcaggttccacctaaaacacttctggatttttattttattttattcgatctcctcttatcactactaggaaaactatttttcgtggcggtcattttgcgttttcgctaacggtatttggagccgccacaaagcaaaggccagtgaagatctaagattttcgctggcagttgcgatccgcttgcgaaaataggattttcacaggcggacgcttaagaggaccgcttgcgaaaatagattttcgctggcagacccttaagagaaccgctgcaggcggatccttaagag

SEQ ID NO: 7464 - DNA, 26518 bp, Oryza sativa
cacagaggagtgattgattgcgccagccgcaccatcaagttgaccaatgcaaaaggagaggtggtaatcttccagtctccagtgccgcagaagccagggattagtttaaaccaggctgctggtgaagaacaagaggtagcagtggagaaaaccactaagaaactagaggatattcctatagtcagagagtatccagaggtttttccggacgatctgacaacaatgccaccaaaaagggatatcgagttccggatagacttggtaactggaactgcaccgatccacaagaggccttacagaatgggagccagcgagttggcggaagtcaagaagcaagtcgatgaacagttacagaagggatacatccgtccgagcacgtcgccttggggtgctccggttatctttgtggagaagaaagacaaaaccaagaggatgtgcgttgactaccgcgcactcaatgaggtcactattaagaacaagtaccctttgccaaggattgatgatctgttcgatcagctgaaaggagctactgtgttctctaagatagacctgcgatcaggttatcaccagttgaggatccgcgaagaggatattccaaagacagcattcacccaacctgatcacaaaagtctaaagtacatcttcacccaacctgatcaaggttgctctggtttttggttgggttttttgcaggtgcctaacatcaattgttgtctctttgggaaggtggtggcctctcttttgtattctttatatctcctcccctttttctgtttaatctgtaatggcttgccgctggtatagcccaatctctgtaactcagaactatctttctttggcaatgaaagatttaggtgaggaatctctcccctccggtgattaatcaaataaaaataccgttacaaatcggggttgaagtaatattcttgctatgtatcagcatcttaacccccttcataatacgtttgattagttgttctgttgttgattcctcttgattgaacacatggtggtttctctccttcaatgttcccacgtcagtagaatgaaggttgtttttagcccttgcttgtggaggcgtcgatgtgtttcctgttccatattcccacggtcccaacaatgcagtacaccagtagtgttgtcactaattctagggacatttaactatttaccactttttagattaagcattttactatttaacacccatatatcaataacacatgtgtccacatgtatctataagatatgggtttagtgataaataattaattgtcccatctaaaaataacaaatagtttaatatatcgcttctcccagcgccgcgttgcctccccatcccccgcgcgcgccagctgcgccttgccgcttctccttccccagacgccccaccccctacgccgccacgctgccacccgtctgttcatcttcgtttccaaatagccgatgcttctattaatttgtttgtcgcctcctcatcccatcctctcatacatgtcacacacatgttgctgtttgctgctaatgatgatgcaggacgaaaagcagtgcaaaccttggtgctgtcactggtggagaaatcatctttggtcggtcgaccaaattcgacaatagtccaggttccatttaaaactgggactaaatacgattttttagtcccagttaaaaaaattttgatctttagtccctgttggtattaccaaccgggactaaagatgatttttggtcccgattcatcccctgtcagaggcatgtcaggaggccgaggatctttagtcccggttcatactaccaaccgggactaaagattaccactttagtcccggttaccaaccgggagtaaagatcatttagatctttagtcccggttggtattaccaaccgggagtaaaattaaacacgtagtatataatctatagtccttatcctctcctctactcgcaaccactacctcacccacatatcgatcctcctctcttctacccctcctcccttctcctatcttatacagatcctccccttcctccttcattcccctccccttcctcctccctcacctggagatggatcttacacagatccttccctttctccttccttcccctccccttcctcctctctcacctggagatagaggaggccgcgccgtgcggacgcggtggacggacggacgcgcggcgtgcggcgcagacgtgctttgcaggggaagcacatgcgcgcagtagtaacgatagcggcagccggcagtagtgggattcatattttgtgattgatttcttgagtagtagcacatccgacagcttgttttctctctttttttttttgatattttgtgattcactgagatgtataattttgtgattcattgtatggatttaagatgtataatctgtgttatatttgatttgtgtgtaaattttttaggatttgtgatgtattatattggtgtgtataagtgactttaagatttgtgatgcggatttaggatgttactttgatttggggatttggtgtttgatttgggatgtgcatgccatccgattcgggagaaaataaaaaagtaacaaaaaaaataaaaggggaccatccgggactgtccctatcctctccttagtcccagttgataacaccaaccagaactaaagatgcctctctttagtcccggttggtaacaacaaccgggactaaagattgatctttactcccggttatttcaccgatctttagtcctagattcatagtcccggttagaaaactgggactacaggggggagtatagggggtttacaaatcgggagtaaagacagtttctccgccagtgtggtgcccatctgagcacgcatgttattggatccatctgctgggccaacagggaggttttttcacttcatgttgatctctattgttctgggttcatccctaatccagataagtttctctttctaagcaacattgattggcgtagtctgagcagcaaactaatctcttcgcaattaagctatcaatttcgaacagaattaagtatccccatctagctcgctcctcttttttttttctccgcacatacgtatttgctcccgcgattattcactcccttcattttcttcacaggattaatttatcatattctttacatatttattgctggatttagtagctatgatgttgaattgttggggcaaatttcttttcacggtatgcatacattatatcttttttcgcttgatgcatacattgtttttttagataattgaaaaaaatatctttttttttcacttgatgcattcattgtatttgattgctaactacatattttttttccaattttgccttgcagctgtccaataactactaatatatgtattatactgttttagtattctgtattgcgcatggagaactctgagtagtgaacatgcctattgaatcagtgaaattatttgatctgcagatcattttgtgcaatgcagctataaaatttcaatgtatagacatgagaaatattatgtacctataaaaacacctcacatacaaaaatgaaatacttcttgtagtgatttttttagcacactatgctaagtggtcaataaagttgagttgataaaatgataaatgataaccattgatatttaatttctattggatggttgtgatgacacatggaactcttattttgtgggtggtgtgattcaatactccctccgggctgataatacttgccgttttaaacaaggtttgaaggtcaaactttagaatctttgattataaatcatttttaaaatatttgtctttcaaatatggtgattacatgtatagattagtcttaaaaagtactttaataaaattatatatttgttaacaaatttatacatattataatgaaaaataatggttaaacttgtttttgataccgtgttcttatctaaaacgtcaagtattattaatccggagggagtagatatgccttgtttagttgtctcgcgggttagtaggagatcagtttcagtgcacatcatgataataagaagaccaaaacatgtctcagtactctctcaaataaacgggacgacgaacgtacgacgatgattaatacaagtggtccacgagcagtgatcagatctaggctacacggtagtaggtgctaaagaaaaccttgcacaatcttatcttcctgacatcatgtgatatctggaagaaatgaaattagtgagtgtttagacacaaagaacttctaacaacaaggcttatcgtaaaaattagaaggcgaagacttgaatcattgtaggagtaaaagcattaggtgggtataatgccttatagccctcctttttttttattttaaacctatatagggcttcactcgttcagttttttcgtgttatatttaatgaaattgatacatctgtgtggggttggataaagataaagaaaacatgggtacctttgcttgcacgacactacagtagtactagtatgtttagttcactagttcacattaaaattagaagtttagttgaaattgaaacgttatgatcgaaaaattaaaaatttatgtgtgtaaaaaagttttgatgtgataaaactgttagaagttttaaaaaaaagtttagaaataaactcgaccttggtcaaagaaaggacgacagatgatgcactactgttacggctgccccctcacagatttttttttggcccggtctagttcccgactttttaaaaaaactttcaacttttctatcacatcaaaacttttctacacacataaactttcaatttttttcttcaaacttccaattttagtcaaattttcaattttggcgtggaactaaacatttgtgtgttttttctgaggctatgggtgtgttaatttgcgaaaataaaattttttgggtgttacatcatacgtttgaccggatatcggaagagattttttttacatgaatgaaaaaactaatttcataacttgcctggaaactgcgagatgaatttattgagcctaattaatccgtcattagtacatgtgggtactgtagcatttatggctaatcatgaactaattaggctcaaaagattcgtttcgtgatttccatgcaaactgtgcaattagttttttttttatctatatttatactgcatgcatgtgcgggtagtaagatatgactgatgtgtaaagcaactattggctagaaatgagagagaaagtgagagatgggagagtttaatattttttatgctcttattactagatagtagtgctattgcctggtataattactacctcctctactacccacccctacaatagtaaagtagatagtaagggggtcttactacccacttttcatccacattgcggacgccctaagaagcgcaagagcacactagacgcaggagactctcaggatgtcaactagtatacaaacagtaagtagctagcaagactggacttgcttgtacacatatatatgaccaaatatgtgggaaagtgttttcatccctcgaggagatatctctcgttttgtgcgtgttatctaaatagttatgaaaaaattaaaaaaatcacaagatagattattatgaaatatatcactccacaaacatgtatgttaaaattcaacatttacaaattgtagcaaaaataactacgaatgtacgagaactattttcaaattaatttgttcttttttgcaactggcagaaatcgaatttggccttacatgctcgtggactgatatatttcatattaatttatattgtcaatttttttaaacttttttttgataaatatttagatggcatgcaagcaacgaggggatatcccctcgtgagatgaaaatccacatcccaaatatgtttatatattgaagtgaggggtgtcacaagattaagaaataaacatatgatatttattgatgtcaccaaattttcccttaaggttgcatatgcaagtaaaagttttacttataatgacgtgaacaaaatctcatacgttcatctttttcttcatacgataattttaggttttcacggtacatggtttacactgtatagtttactattcaagtgggcgtatcagctgcctgttttcctcatcggaggtaaaacttaatactcccttcgtcctaaaatataagggattttggttggatgtgacatatcctagtactttgtgtcatatccacctaaaatcacttatatttttggacggagggagtacgtaacatagagcattgagacatgcgcatgcctgcaccaaacatttaacgataaaagtaactgaacacatacacatcaagtgttcggatcggaggctaaacatacacaaaatgaaattccaaatgcatcactccgcaaaagtaaaccctgatccataaaacttggccgagagaaacttatcaagactatcggccatctctggcgtgacgtggttcacccaatctccgatgactcccttcctaaagaaagactcatgtgggtactcattggccatcatatgtagggagcctgtgctgttggcacccgaagccttcatcttctcaaaactgcaaagctcgatgatgctctcaacgatcccggcttccttctcggcgtcagagaatggctgggacccgatgaattccgtgattttctcgatgttcttcgtaggatcgcgtagaacctcctcgtactttaggaatagcaccttgtccggctttgccttactcgtgttccaatacccaaggatatgctcccagattgggcctcccaagtatgcaccctcacggatggactcccacacatcagataatgacatggtgatggactcccactgatcatcagataatgatgaggtcttagccttagaacagttcatgaaatgccataaagaaattgccatgtctttcggttgcctgcaattaataatataacaagaagaagaccataaccattaagactatgctttgggacgaaatggttggaaaccataaaaaaaatagtcccaatgattttaataaccatattttcttagaaaacaaagtaaaaaaaggcagaggcggatataaaaatggtattggaaatacggaaaattgaaaataaaaagatatggaaaaaaatgcatgtatcgatcggaaacatgactatgtaatatctgaaacaataatctgaaatcacatatttaacttgacatgattatataatatgaccacgtgaattcaaacttacactattctaaaaaaaagaaattcaaacttacactacgtaaatcacaaaccatctcttctttaggcatgtactcaaattaggaattgggttgaaaagttgatgggcctctagtaaaatagagacatggtatttagaaatatggtaattaattacagtattataaaaactataattttcgtgcaaatatggtaaataagaaaatggcaagtagaacatcaaaatcattttcgtttccgtattttcttgccttttgttaggttaccatttccaagctatgttaccccgatacgtcgctgagtgtcgcgtatctgtatcggatacgccaacggatacacgctccgatatgcatcccgtacgtatctgacattttctcgattttcaaacaaatgaaagaattacggatactttgctgattcgtattgatacgcccatattttcacatgactcactcccggtctccccgcatcgtctttgccgtcgccatcgtcgggcgcagcaccgccgtctgtgcagccgcaacgcctccttcgccggagggcactgcgcctccaaccccaccgtcccgcggcgcagccggcgcatatcctcctccgccgctggcgtcaggggctaggggatgctggggccgccgtccccagaacaacgcctccgcgcgcagccgtctatgcggtccgcggccagcaccacagtagcgcctccacctccgagcagtaggcacaagaccaccaagcagtttttcctttgttcccctgtgaggctgtgagtaaatcactgcatgtttgtgtttgggtgtcggttgaactaccattttagagcaagtttaatattatcgcccactactagctctaaatcatctatagccaatgtaataatcaattcatacaatagttgcttactacattattaatacatgccccacatgtcatacacacattacgtcttggagtccgtgctgcagctggctacagatctgtagcccgctgctcttctctctctttctttatctctttaaaatatgtttatagctggcttatagcctgctattgtacctgctcttagtgaaatccggtggttggttggtggcttagtgctggcgtgctgctacttgtgtactccctccgtaaaaaaaatgacaaaccctgagttttcgtgtccaacataaatattaatttttttacgattaatatttttattgttattatatgataaaacataaatagtactttatgtgtgactaactttttttaattttctcataaatttttcaaataagacggacggtcaaacgttggacacggatttctacggctgcacttattttgagatggaggtagtattaaaatcaaaattattatttcttgtgttgtcaactcgtcacccttctccgcgtgcacgctttcaaattgctaaatgatatgttttttcttaaaaaaattatatgaaagttgctttaaaaatcatattgatttaaaaatcatattgatttatttttaaaagctaatacttaactaattgtgtgttaatgaaacaatccgttttttatatggagttctcaccttcacctcccgaatatagcctaatagattgcttttcagtgaaactacgtgcacatatgcatgcataaacgggttaccggcaacccgtaaaaatgattttttttttggaaaaagtataaattaccccccccaactatcgaggtcgactgaattatacccccgaacttgaaaacagacattctacaccccgaactattgaaaccggacaaataacccccgactcaatttggagcggttttggatccacgtggcagtccaatcagcactttttaaataaaaaaaatcagtgggccccttttgtcagttctccaccactctctatctctctctactctatcccagtctctccccctctctctctctcttctcacctgcacggcggcggccgcgcgagggcgggagcaggcggcgctgccggcggcggagggcggctgagacggaggcggagtgggttgccggcagcttcgctgtggtgtgggctagcaaccacctcctcggcgacggccacatcgcggtggtgctcctccagtcgtggtcggagttcgcgcgcacggggacgttcgccggaggcctgaaccttgactggtcggtgctgagccgtccccactccccgccgaggtacagcgccgccgtcgacgggatgttcgtgccgtgggaccacgagcacgagttgaacccgctcacggcgagccgcggaggcgagcttcgtcgagcggctctactacgtcgaggccgctgacatcgccaggctgcgcgaggaggcgcgcgcagcgcgcgacgagcggctctactctttcttgttcgtagctaattttgctttcagtttttttggcggaggattttgggttggaaagacaaggtcgggatctcttttaaagtttgtttttcttttcttttccctcttgatcggtggatcgatgtactatcagtatcagtaatcagccatgccatgccatgttttgtcgagctcacaagattggaatctcccgctagggaatcaattttcaactgtaatttgccccgctttctgcggtgagatttgcaggtgcgcaatatgtaattcaccattttcatcgctcatcgctctcttgctcatttcacccggttgtccgatgcaaagtggcaaagcatagtacaggagataaacatgtctggcattgaaggggcgcccacagccgccggcgcgcggggctcggggtggtgggaggaggggacggcggagggcagtgcttggggcggcgaaggggcgcccacagccaccggcgcgcggcgcgttgaggcagcggaggggatgcttgcagccagcggtgctcagggaggtggagggggcagcgggcggagctccggcggcggaggaagcgcccgcagccatcgccgcgcggctcgtcgaggcgctggagccgtccgctgccgtcggcgctcgagccgcaaccgccatgatttgagagagagaggaaagggaaagagagagtggagagatatctgacaggtgggtcccttcgttttttaattaaaaaattgctgactggaccgtcacgtagaccaaaaccacttggaaaactgctcgggaggggggtttcatccggtatcgatagttgagggtgaaaaacgtccggttttaatatttagggggtaattcatactcaaccaatagttcaggggtagttcgtactttttccttcttttttttaaccagtgtatgaactgagtgagtaactgaatgtgccaaattcaccttgtttgaaacattgtttatggcaaggttactgaaattttgaattggaacattaatgaacagtaaacatttactaattacagattaattaggcttaataaatttatctcgtggtttaccgacgaattctgtaatcagtttttttattagtgttcgaacaccccaatataatacccgatgtgacacgccaaacctttatgccctagatctaaacacccccctgatcagcacttacctgcagatgtagatgattttacagcggtcgtcctcggtgatggaggccggcaggtttgggtacgacgcgtgcgtgctcatcagccgcggcgttggcgcggcgtcgagcttggcctcctcctcgtccaagtagatcccctccaggaacgggacgcactcgtgtgggttgagccggagcagcgggtgccggccatcaccgccggcggcggcgggcgggtacacgccgcgcgccgccgtggcgaaggccagggccttgagccacgtggtgccgcacttgggcaggctcgccaggaggacgtcgccggcgcgcggctcgaagcggcgctggagcgccacgatcccggggacccacgtacgcctcccggaaccaggcgccctggtactcgcgccaccgctgctgcggcgggtacagcctgctcgggagcgccgccacgacgtcgccgtactcctccgcaaccggtcgccgtgcgacggcgacggcggcgatgtccttgaacgggacggggcctgcggcggcgctggtcggctgcatgtctgaattctgatcgaacgaaacggccggggagacggtggagacgagccggccggcacatgagtcattatatagcgtggcagccagccaggcggtcactgatcttctacacttctattttaccaagggcttgtttagttgacaaaaaaaattgtccctgaacatcacgtcggatttatgaacacacatttaaagtattaaatatggtctaataacaaaataaattacagattccgccaggaaactgcgagacgaatttattaaacctaattaatccatcattagcacatatttattgtagcaccatattgtcaaatcatgacgcaattaggcttaaaagatttgtctcgcaatttacatacaatctgtgtaattggttttttcctacatttaatactcgatgcatgtatccaaacattcgatgtaacaacgtaaaaatttttattttgagaactaaacatggcctaagataaaactttcttaattcaccgtatctataccctataattaaccaactcactcttacatgttacatacttcatccatcaaatccaacactctgtattcgtctacatccgatcgaacggttgagattacctcccccatcacccactaagccactactcatcactctgccctgatcccacgcaccctccccctatgcaaccgctctcctttcctcgtcgcatatttcacgccgccctcctcgcatctcctctctcagcgccacaatcaccgggagcgttccatcctcctccgccttcttagccaccgcgctacggaggcgacgcccttcaaccctctgccactcccctcgccctcctccgcgccgtctgcgccgccgaggccccgacgatctttgcctcgacgaccggctctgtgccaccactcctcgcgatcccctctcatcctccttcgcaccactattgatctctgccgagcgctgctgttccctccgccggaagctccaccgctgccccacgccgagacatcgacgcccgcctcgctaatcccgtcctcccgcatatttttagatagacccataatcccggccccgcaaaggaagtcgtgtgaaaaacatcacctttccccgccccccacaggggacccggcgggtgaccggggcctgcatcatccggatggagctaatacttcataaaaatattgcaatacacttaataatattacgataaaattttaatagcccccggttgtgtgggttggttgaaggaaggaaaggaattatggttgaggagaactagggtgttgagcttttatatgtcaattttgaatgggtttattggctctacattattgcaatgagctacttttagataagtaactcacatcggtggcccctccaagtcacgcgcggattaattccaatccccgcccctatccccgaaagtttgcggggccctgtccccactcacccgcgggtgagaattctcctcggtccccaccggatcccggcctcaacggagaaattaccaaccctaccaaacatcacacaaaattgagcagatcatctcccattcagactcatccacccaaccaaacacaccaagttaggacttcggatcgttttgatgggcctcgatctcggcccatttaggttagccagcctaaccggcccgtatcatgcttcggtttcagcccgtttcgcacggggaactcacgcgacgcaaccgccgccgtcctcctccccgcgccaaagcccaacgccggtgagggttccggttccccaactgcggcggcggcggtccgggcgctcccggagcggagcggagcccccgatggcggagggggagagggagctccatgtccgggccctcgacgggcggtccaccgtcgtcgcgctcgccgccgccgcctccgtgcgggatctcaaggccgcgctccggagctccttccctcccgcgcaggtctcccccagcttccacctcttcctcaaggtacgcccgctcgcttctcctttgcgtgcgagcttgatcgtgctggtggatggatgcggcctgcgggatgccgtgtgtttcgtctcgcttcacgctcgcggcattgaggggtttcgatagggtttagggtggtttcaccatttatgttcatagtaatggagctccgaaatgtgctaaccactagtgttctcgtgatgaagggcaccaaattgcgcgtggaggccgagattggcactcttgctgttggtgagggggaatttattgtccttgttccattcgcaaggaagtcgcagcagtgttctccggtggcaatggcagaacaagggcagattactgaatcaccaagatcatcgcaagtgtcaactggggcgaattcagctcggagaggcattacggataacctctcatcaatcccaagcagcccacatgctgaaacggcgtccagatatttttcgagtggggctaattcagcttggcaagaaattatggatgatctttcatcgatctctagcagcccacaggatgattctgcatccaaaaacttttgtgcccaaagcactatcccttgttctgggaattctgtagaggatgtgtcaacagatcaaaggttacctactgggaattcaaataaaaggaggaagccatgtaaggaaaatggaaatgcattcaacgaaatgcctacctctggagcgaacagtgctgctggccagcctagcatagataagaaaagtagcattgccagatctgctgcaacatcttgccatgtaggtcactctgccgttatatattcccctgccaatttcactttttgactttcacattcatagaagaaatccaaattgcagcctttgtgttgcactgttccttgagggaggaggcattaaccacaacatatattacatgtttgtttgttagattgctttgagtaatacgatgaaaattgcagggcacgtgccatttagggcctgctgaaatggttgaccatctgaaacaaggacttggaaaggagggacaggtattcactcaatgaacttctggaactaacaaggccagtaaaaccatagtatttatgttgttgggattatattttcagattgtacatattgaagagataccatgtcgagcggcatcttttgcagaacttcctaatcatctttcagaggctacgagggaagcattaaaaagtattggagtatctaggttgtacagccaccaggtattatagggtgtgccatctatttggtgcattcagttgtagaagctcaccgattatgttgatcatttacttgattgcagtctcgagctatacactcttccattgctggaaggcatgttgccattgcaacatcaacatctagtggaaagtctctgtgctataacattccagtccttgaatctctctgtcaaaacctgatggcatgtgctttgtatatatttccaacaaaggtctagacaggaactttctgttttaggcttgattgtctgaaatcgggcagaaattcatctgtttgttgctttgcaggctctagctcaagatcagctaaggagtttactcgagatgaagaatgcacttcacactgatattgatgttaacatatatgatggtgatactcctagagaagaccgtacgtggatcagagataatgcccgtctggtaaacatgtgcttctgaagatatataattataaacagttcgtttcttttttaaaaagtgcatttgaactcaccatctacctccttctcagttaattaccaatccagatatgctgcacatgtcaattttgccatgccatggtcaattccaaaggattttgtccaatctcaggtggaacttattggccttttgtagttttgttttcttgatagctaatttcatcatctgtggtcaattatcttttaacttttagatgaatgcttattatctccataaagagtttccatttctgcaatactatactcaggtatattgtcattgatgaagcacattcatacaagggagcatttggctgccatactgcacttattcttagaagattgaagcgcatttgttcaaacagtatgtataccatgttgaaccagttcttttaattgttagttgacatgatgcttatatatgctatataccataactgtgaattttcttgtttttgcaaatgtgttagtgttacttcagttttcttctcaattaccaatcatcagctacctaaaatctagtaatccctgcaatttctaacttctgagttatatcttggcaaatttatggaatataagaagtatgatctactgatgcaaattaacatataattcttaaaagcatttgcttgttcgatttgcagtttatggcagtcatcctactttcatattttgtacggctacttcagcaaacccgcgtgagcatgtgatggtaggcttgatcttctctttatgttagcttagaaaaaatggttgcacacaagaaaaaaaaaaccagctgttgttaactactgctctaaagcacaagctatcctccaaatgtgtttcttttttctgaagagaaatattattatcactgttgcttatgttttcgtgcacatactctttcgagaatattggccgaacaacaagcatttttccttttgcaaaattctgttaatcacaggagctagccaaactggataatgtagagctgatcgagaatgatggaagtccttgtggttttaaatacttcctcttgtggaatcccccgctacatatgacgaaggaggggagttcaaaagatagcttattaactagacgctcaaggtattgacactttcttttcccttgaattaagctacttatttattttcattgtatttttacttttcaaatttgcaaagttccagatgattttattatagctcaataactgttgtctttcagatatacgcaaatttgttcactggccatcgatgcaggaattctaagaagttgtcctattaaatagtttcttggcaggatgatttgatagtcaagatagagaatacttctttgccaacctgaatttgaaaattttgggccaggggccatactgctttgccaacttcatctctgtactgtcctgtgatccttgagtggcatgttaatttccaacactcaacaacggatccttttatttgatgagatacagtaattgttgtggacttgaaagcaaaagttatgagttcatcacagtacaaagggacgatgtttaatttttaagccaaaaattgtaaacatataattgttctgtagtggcatgtaaatgtgttagttattgcagtttaacacttcagcattttgtttcttatggcatgccagtacagcagtgtttgtttctatattcataattttcttataactactatgtgtaaagatacactaataatttgtatttcgtgtattagtccaatagttgaggtttcttatctattatctgagatggttcagcacgggcttcgctgcattgcattctgtaaaacaaggaagctctgtgagcttgttctagcatacacgtaagaacccattttcttctctgctattcatttttgtgttgttttttcttgttttacattacttgtattcacttatttcttcatatgtcattttgtattgtaggcgtgaaattcttcaagagactgccaaagaattggtagatactatctgtgtatatcgtgcaggctacattgctgaggtcagtattctgttctgtctcacctaatgtcttctttcattgtacttatcaaattttttattgtttcttagaatgaattttggtttgataaaatatgacctcatttagaatttcatcggtgctctcgaactgtatggattcacacaaactgcaatgtatattaccagcttttgttttcttctaaattccatctagtagaatatatatcatctgaatgctgtagacatatcaaagatggtaatgttactaccttctctacttaaaaagaactaagaacttctgttactaatgttacagtgtacatatgcaaatcaagctttcgttttgtcctcttgaagagtatgctgtttgttatgtgaggggtggtgcattgaagcgcttcccacaaaataaagttgtgtactagccagaaactgactcattttctgataaattgagaaaattctaccttctgatatttgcttgctgaatctgaacattttacggttcttcatgtgttgactgttttgttcctgttcatttgaaaacaaattatttcaggacaggagaaaaattgaggccaacctttttcagggaaaacttcttggtgttgctgccaccaatgctcttgaactagggattgatgttggccatatcgatgcaacattgcatcttggatttcctgggagtattgctaggtaagtgagaggtggtctctccaatggatcctatatttctgtctgaagccctactaagtcatagaaacaatttaattttagcctgtggcagcaagctggaagatctggaagaagagcaaaacaatcattagccatttatgttgcctttgagggccctttagatcagtatttcatgaaattcccacataaactatttggcaagccaattgagcattgccaagtcgattcacataatcagaaggtttgtacatcagattttgttggtaaatttaaatgcataaggatctaaaagcttccttcttaatttgaacatttattacagcttttggaacagcatcttgcttgtgctgcttatgaacatccattgtgtgtgcaatatgatgcggattacttttgttctagcctgaacagtgtaatgatggccctgaaagacaaaggctgtctcataaacaatccctctggacctttctcatcaagcatgtggagttatgttggacctgaggtttgttcctttttatttgttatctttacaatacaactcttttggttattatgcaagaagtattttggttttctgcagaaaagaccttcacaggcggtgagcatacgggcaattgagcatgacaaatacagagtaatagacaagttaaataaccggttactggaagaaattgaggaaagtaaggcctttttccaggtaccatgttctaaactgttcctcaactcaaacgtgtgatgaactgtcatacttgttggatctttgaacatactctaatgcccgtaaagagatagataaatttatgagtttgttgaagaaagtcataaaatttatgaactcataagcactatatactgtattgttacctaattgatatactaattatagactgcatctgccactgtgtgttttcatattggtaacttgctatctgaattttttaagcattttcttcattcttaggtgtatgatggagctgtatacatgcatcagggtgtcaattacttagttgaggaacttgatttgtcatcaaggacagcattctgtaggaaagctgatttgaagtattacacaaaaacacgagactacacagacatcaatgtccttggaggagagtttgtaagtattcaaaaggattgtgcattagcctcatatacattctgcttataatcgtctatcattataatattaatccctgccaaattttattattagcaccatttttttgtttaaatctcttctatcctgattttctaggccttatcctgctcattaaatctgaggattattcatctagtctgtcttagcactaacatcttcttttccatgccatgcttattttgactttttaaaactgttttttgagttgttttaactcaatctagttttattcagcctattttttcatctttgttgtacgttttccctacattttttagaagcccatactctcttgaactaatgaaacaggataggacaaatgtttatggtactcctaccacagtaataggtctactaaaatgttttaccatcatttagtcaagaaactttccttgcctgacatgtgcatgagtgatttccatgctgatatttaattaccaatgatctcttctactctaatacatcttgaaggctcatcttccaccaagtatgtgtaaaactaacggggtgaagacaaccgcccaagcaaatgattgcaaagtgactactaaatggtttggtttttatcgcatatggaaatcaaacaacaaaatatctgatagcatagagcttaacctgcctccatattccttcaattcccaggtttgtatctaaaatatatttgtgtgaaccttatcaatatcatggtgcattgccgtccatgattgataccctcatttttcttctgcgatgcctaactaggctgtttgggtgcgaatcccgcactcggtgaaaactaatgtcgaggaaaggaaactacagtttcgaggtggctcgcatgctgcttcacatgctctgctgaacatagtgcctctgtaggtttttcagttttagctgcatcataataaataatcattaatgcagatagttgaatgtgcatacatttgtgcaggcatatgacgtgtaatgcttctgacctaggaacagaatgtgcaaatcctcatgaaacccgtggtattccagacagaattctgttatacgataaacaccctggtggtatcggcatagcattgcaggtaaaatgtttgatgatgtgtagcatacccaggaacctagcgcggttgtaaatatttaccagcaatgctacctctgaactatattatctcgtttatgactatgagatgatattgttcgttgattcggtaaaggttgaagtctagattttcatttatttaatggtgtagatcaaatcactctttggggaactactacttgctgctttagaacttgtttcagaatgcaactgtactagttcagccggctgtccaaattgtatccaagtaagttccaatgctgtactaaactcaactgttgatggaaaaaaacatcttcaagatgataagtttctctcttttttttcagacactaacatgcggtgaatataatgaggttttggacaaggaggcagcaattttgattttgaaggttaataatctgtgcttgctaaagttacctaaccatcttccatcctacacctttcaacgtaaaattcgcttgctctaagatatatattcatgtgcagggagtaattgaatatgaaagatcatattttgaaaaagaagatggttccgaccaaggagtgagatgaggttttaacttttgacgtcttcgtgaagacgagtgaatttggttgacacaggagccatattaatattttcttcacaaggctttctccattggaaatggtagaattgtttggttatcatacggaaatgtagctctaaccagagttcccattcaattataaattatttctggttcaattgtatattttattttgttgccatcctgtaaccaccacctctgtttatcctgaaccaggtcatgggatccccaaattgcctgccacctgcgatccccaagcttctgtgaagaaatatgtcgaaagatttgaacctgtgattaagatatctgcagttttcccttctgatgagatggaagaaaccatcaatttctgctgcgggtactgcaagaaccacatcatcacgtgtaatctaaacaagcctttgaagagttggttgcaatgtttttataagttccatgtttattatctggttcttttaatctctttttgggaaatctgggtgttataatctaggagattaaccaaccacagcactaaaattcaaacttctcagaaggataatacgttgattgctgattaatgaaggatggcgaaaaaccatgtcatagagcgggtggacctgttgcttcatgtggtttctgcacggcagtgcccggcaagaaatgggcctgttcggttgtcgtactgctgcagctgttgtcgatgctgtagagattggtagcggctggctgtattgccgccacatttaggcctatcgggcaggcccaatatatactagccgtttaatagcaagatggttctggcatcaaagtttgtaaacggacgatgtaatgggttaccactaaataaagcaaggttgaagcatgaacataaaacaaatattgaagcttagtattcttagtttactacctttcatttttgttttgttgtattcctcaattacgaggcttcaagtttaggtaatatttggctgtatgtatagaggccagatttctatatattatgatcgcaaacaatgttaagagaattgttttagttggggtgcaccacgcttaggctgtagcgcaatgcttaaatgacactagaggacgctccctctcaaaaaaaaaaaaccgaagtaagcatatgctctctccgtcttaaaaaaaacctaacctattataggttaggtttttttagacggagggagtagctcacatgtaccgataagaacatatgctccctctttctaaaagtctaaatcctatttatttttcaccaaaaccaagtgtagttaactcattcatcatgtgataaaaccaatgaacatgcaaacaataaatactaaaatgacttcttggtttccgataaaaaatttaatatagcacagtgactacagataggacttagacttttggaaaaaccaacaaatgaaataggtcttagacttttaattaaaaggaggagtactacatttgatcttagtgaaaaggccgaaaaagatatgagtggtaccgtgtaaccacacggcctcttgtagtgtgcccctccctgcttgaatcgtcgatgtggtactactcatctccgcattgtccatggatgcgatacgcgatacatatacgacccgtgtgtgacgcgtgacgatgcgatgcacctcctctggtttttcctttttgtttcttccttgggttcctggctacagggaactaggaattttttctgattccaaacgaccggccttgccaggacaggctaggctcttggatccaaacgcaccctaagggaagctcgatggcatatgccactaccttaatttgcatgcagcttttcgcggttcttcgttcgttgacctccatcgatcgaggcgcgacgtgttttagttcggtcgagtaaatatcatcggtcggccactgataatatggatgcatgaatgcagccacccagacgtatccgttgcatttgcatttgcatgcatccatccaagtttggctggcctagctagctctccacatacgcattcgatcattttgcatattgttcgtgcaaccactgcatatgcaccgagcatttcatttgatttgatcgatcgatcgatgtggtgcgctgcccattttgccgtatgcgatcgagtattatatgcttcgtccaccacccaggccgtgatcgagtgatacgaccgctggcgctacctagctagatgcaatcacacaactgcaagctaatactccctccattctagctagttccatcatcatatttcaaaaaaccgaattttcaaatttgaacgttacattcgtagtcggcaagccgttgcatctcgatcgatctcgtccgacgtgctggccgtttcaattcgcacgcgaaatgggagcactccgcgcgcagaagcctgttgcatatgcatgcgaaattaatagcatttatagttgactacaagatagttggttctgccgcgatcgtcatgcatgcatgctggaccgttgacctgggagatgatatatatgtacatttgttatccttggtctttgcatcaagtcaaaatatgatgatcaaacttaaatacactagaagataaaaacgagtgaaaacggcatcatgtctataaaagtagttcttggttgattgggaattttccgtatgtactaatctactagttatttagggacaatatcaatatgacaccgatagatttttttttaaaaaaaaataaagttagcattcctcagtttagaaaaatactacatgacggtataccgttaggacagtataatacctctgagatatcggccaatataccccgttcagacgggataatacgtctgaggtatcgctgatacttgataggtatcggctgatacccaaatattggacaatatttctgaggtatcacgttcaaacgggatatcatcacgtagcattttccgagttacaagcctttgcacaattcgcctctgctctcgataaaacaagtcagaatcaattggcaaggggtcgacgattacgagaattgtttagaatcggagatggtactacttttgcgaaacgacagtcggttggtggagaatttcctccggtgttccattacgtgcaagctaacgttatcgttggctggatgaattgagcactagctagcaccaggctgctatatagcaccggagcagctggtgtttttctgcgctggatcgaggccgtgcagtggtcaaccaactcaaaggcaccggccactgatctatagtacttactttgttgtgctcctttgctactagcatctgccactgctgatgatcgatgcagttatctagctagctagtcctctcttgaatatctcgtcaaattacactgttacagaaggctgaaaatgatatcgatcgacgtcgtcgtcgccatcaaaatggtctgccgtgtactgttcatatatatagtggttgacctgtccatttatttttcttatggtaaaccgcaacccccttaattttcgggggaaaagatatacgtgtacaaagaaaatttgcaaatgttttagatgttgatgtatcacacactgtaagtaaaatcctgattttctttattacactttcaactaactaaatcgaactgtcaagatctttgtttgcaagaaattgttcaagtatatatgtatatcacttctcttaattttctccctggatcaactcaagcatgcttgcttgtagttgtagaaagtctcggatttttcctttgctttgtacttcttctacctctaaatacaaagaattttaattataattacaaatatgcacatgtccagattcaaaaaaaaggtgggcaagcgaaaattgctcttgcaagagcaacatcaagatataggtaggtggtggcagtcaggtaaaggtaggggtgaaaacattatgaaaatttcccgaccgtaccgatacctttcctgtaaataatacaataataatatttttatcgactattacagtttctaaaatttagtttttctaacttctatcaatgttgcgttgaaatcaacactaaatagtaaaattcataaatacatatatttcttgaccgtttcggacttctcgaaaaaaaataatattgtttccgaccgttttcgtccataggtagaagcccttgctcagatctgactcaaaacaagccccagatgctgccagtacaagcaagcaagcactattacatacaggtactgtacctgtcatccaattagaccggggagatctttccctggccaatggaatccagcctcacttgaccctgcccccaaaagcccagtggaagaaacttccacagtacacatatcacacacactagtgctcactcaattcaggcttcatccatccttatcctccctgcctttttgcctggccctttcctgctgcctacttgtctgtgactgatgaaagctaagtgcaactaactacttactactctatacttacttgctgataagctgattcatgccatgctatgacagggaggatatacagcaacaagaaaagcaaagaaaacatactgcatggtgacacctagcttgagaattatatatataagtgcttaattaagcagcattaaacttttatgttagcactgcataaagtatatgtagagggtcaggtggtgactgatcacagatcagcaatttggatgtcatgtcattgcttgcgcattaaggatgtgcatgcaggtagcctctagcctctctggatattttattttatgctctcactagtcactaatactgtatattagcagtagaagatagtactaggtagtaaaatttatttattcattttccaaaggttatctgtgccgacacctgagatcacacagccgacactctgaattccagaggaatccaaaacagcatatatatagcaccaatcaagcattctactaatatcaattataaccaagcaaaaaaacaaaattgggagaaataatgatggagaaaaaaaaagcatccatcgtctgtttggtcaccacagaacatcatggatacctactcatcagtaccatgccaaaataaactgcaccatcaagaaaagtcacccaaattaactaattaagcttgtttaatcatcttagcagcccaaacaaatgaaccatgggatcattattaggagaatttaagaagaagtcaatggaagcgaattagtagagaatttagccatataattgactcattttagcacattgagaaaaggaaagataaaagagagagaaagaaaggtaaaaaaaaagagtgaaaaaacagagattaagattaattaacccgacatgtcctctgattaattaattaccaaaacaccaaccaagaaagcaagctcatagcctgtcttgccggccgtatcccgacgacggggagggcccgccgccgccgccgccgccatggccatacgcacctttccctcccatcaccatctggtggtggtggtggtggggcggctgcggctgcgcgtacccagctgacgacgccggcggcgagccgtacataggctgtcccatcatcatgatcatgccgccgccgccgccgtacatgccgtatccgccattgttccgggaagcatcctggtggtggtgcgagccggagccggagccggagccgccggaggaggcggcgccaccgccgccgctgccggcggcgccgatggccttctcgccctcgagctcgcggaacttgtggaggtagagcttgagcgggtcgatgtagtcctcgaagccgagcgtggtcatcgcccagaggaggtcgtcgccgttgatggtcttgcgcttctcccgctggcacttgtcggaggcctcgccggtgatgaaggagatgaactccgagacgcactcctgcaccgtctccttggcgtccttgctgatcttggcgttcgccgggagcgccctcttcatgatcctgctcacgttcgcgatcggcaggaacctgtcctgctccctcgccgacgcgtactcccccgcgttgctcggcccccctgactcgttgtccgaatccggcatcgcaacctcgatctcctcgatcgaagcagtcgaagcgaagcgaggaggaagacgaagaggagaggagggcgcgggggatgcagtgggatgaatcgtggggataagaacgcatcggggagagcgacgtggcagaagcgaagccgtttgtttttgtcgataagcggtgtggg

SEQ ID NO: 7465 - DNA, 66687 bp, Oryza sativa
ccgtgccacgctggatacgtcgcggccgtccgttagccacgttggatggcctacgtggtggggcgggggtgctgacgtggcctgggtttatataggtaaattaaggtcatggagccgtcttggcccggttttgttttggtgtgaggaaggagatggttgtcgtgttttggtgcctgcactgacacacctttccagtcacatctcaatcaaaattaaggaagggaatttatattggtttaatgtgattattctccatggcatttgtttctttttttttcttgtcagaaaaaaaatcttatatgagatgaccttatgttagttagtactcctaccgtgttcaacatttaaccatcgttttattttaaaaaaattaaaaaatcatgtataaaaatactaatcataaagaaatttcaaataaaataaacagtcaaacgttaaatatagaaatccataaccacacttaaaatgggacgaaggggataatgtattatagttttcaatgaacattttgctaaggcaataatagtgtacatttgctatttactcctaatcaaaaaatggtaaacgttccatattgttttcttaatttaattatagatgaaaattcaaaagacttttggacgatttcattctttttctccggttcttctaagtttatcaacttttagataactaccattctcaaactacgatttcttcacaagctttccgcgtcatcattgttttagatttcttgaagttactttaggtctctggcatataatatttgattcatctctacaaacaattatacatgatacgtccaataataacgtgacctaagtccctcctagacaatttcagatgttgaataaatacattatgtcccaaaaaaaccatgtttagtcatcacttatatatttaatagaagtatggaattcttatattaaatctgatcatcgataattttttaaaatatatatgttaaaagcaatggattaagatcctctgcagtcgactgcaccgcgcttttattattgacatgcggtgcagtcgactgcagagcatcctgatccgtaaacagccacatcggtagatataacatcactgggtctagataggagtaaaaaattgtgatgggtgacactaagttaagcacatggacagcgcaatcagccaacaaggttcactatcttcagatattggcgaattcagcatgtctccatccgagcccttcacacgtcagccgggtcgtcttaggccactaattaagcaaaccttagatccaaaaataataaccttggcctttcgccactaactaccaaccactctgaaaagaagccttctcgagtgatgcgaaagcagaaatcacgttgccaaagcacaaggtcaattaggctgtctccaatgggcagctcttagctagctcatagaggtttttaagcgatgaacaggatgcgctagctcttcttcaagcgctaactcgcacgctcaccaaggcggtgccctctcacaggcatgctcgcccaggcagtggccggcactgtgccgagcgcgtatgagctagcagccggctcataccgctggtgaaggccttggctcgcataagtactactgacaagtggcatcgagtcaagttcccaagtgccctctcttttgtaatgccttttttttttaagtagtatctagttttatttttttgagaaaatttttcttatctagttgtagaaaaaaattaagtaatatatactctctgatcttttttaaactcctcttttaaggtgcttgctccactagacctacatgacatggcatttatacctacaacattgtgcaacttcatcagaattttttagataatggacttcatcagacttgaactctgtctggttgttttcttagataaggaaggtgccagatcctcaatagagttttttgttttctttgcatatgaaaaacatggatgcataaattgctgaaatttgtggctttacattaactgaatatgtcatgaagcaaaaggtgacattattgcagtgatgctgatgcccatgatctacctagttaatgagaagaaaagggattaagagatgcctgccttgtgtataggggttacacttaacaatggcctgtccttgatcgatacatataggagctgattgggatgtgaaactgacactgttctattcgttaattgtcgccatctttgctcttaatcttcgagttcaagatctctgacggtgtttctttctctgtagattacagtgccatttcgaagctcatgcacatgttaattgttgttattaagctacagctagcttgatcttattccgatcatacagataacgagtggtcaagatgcgatgctcctgtctgtgcaagaagaacttgtactgcaccaatttgcagttgatctgtcagttcttcagatcttgggaaccattcatgcttagccacatttgagtcaatgggaatgttgcttaagtagaatctgtactctgttgctgcaaaatggattcgagcgagattgatgctatatatgtgggcccacatgacagcagctacgtgtccaaaggtgacagaggtggcatatgcaccaggaatctcctccaacaacggcacccatatctgtcatgaggattacgatcaaaaacagaatattgagtggctaagggttaaggtctagtaaccacataactccttttcaatagttcatttgttgttctacatatcgagggctcctttgattgaaaagatgaaggaataaaaaaagacactgtgttttgataggaaaggatcagaagtgtaaaacagagattacaaaacacacaaaaaaaacatgaatgatcatttaaatcaaccgtagaaaaaacagagtaatcatatgaaagagatagacccaaaaagattttttttctaataggttgaataatttgttaattttcctctaaaacccctatagaattgaccattccatgagaattcaaagaaaagggtaattaaggtgcgctctgttgttttaaaggcattccttcaacatttccttctaggataaaatccttgaagtttcctatatatttcttacaaatgaaaggggacctaaatagtctaaaggtttatccattctatgccctgtagatcattgtgtcatttaatagtgccttgatcagtcaatagttgactgaaaaatcagaatctttttcaccctggaaagagggaaaatatgcatgcacatcctccatccctaatacaactatttctagcatttaaaatttctcataaaatataaatattttagaatattaattctcacccctgctcgagtattgtgttactataacttaaccaccctcctgttgcagtatattatttttttccctttatgatcagaattccttatattttagaactgatgaagattttccccacttgttggatggtagagggtcatggtcaggctagctagtagtgttaccacacatgattgtgaaccttgtggttaattaacacaggttaatttccctatcaaactggctgtttttgctggctgatattttctgagactcaccatggactgactgactgactggctgattgatttttgttttagataataatgggactgactgattgattagtgagttaattaattggtgcttggatgtgtttcatgtgtgaggtgactgtgccaatttgacaacttgagatactacggcgatcgatcgacgtcgtgcgggtgacggtggcggccggctgccggacgaccggtgtgaggccgtgcgtgcgtggccggcgccggcggattaatggcggtgctgtgcgacgacgccggccggccggccggttgaccggtgcaaccggcaactgcagccatgcaatgatgccactgcattctttgcaagaaaacgacttgcattatagttgatgtttggggttgggacgttgggttgacttgcttttcgatggatgtgataatatatttttttttttgggtgacgatgtagcgatagcttcaaccttaaatatcccaaatgaagtcaactttatcgtgcaaaaataaaaacgcaattctcatgagaattgaatttcagtaatgtagtagtacgtattttagctgatctagcccttttcatccatgttcaacaattgacctgatactctgataggtatatacagtgtcctgcttctgtggtcttgtacattttccatccgattgtgatggcccatccgatcaacggctagcgacgagccgacgaccacctcacaaaagatttttccagtatcaggccacacagccacacaggggctatagctcctagacctgatctgtgttaggggaaccaaacattattaaatcgttagtttcttaagtggagtggaagaatttgctctagaaaaatatatacgaaggatgaagctaatttttttcaagctacacaactctagcttgggagtactccctccgtcctataatataaaaaatttaatattttatttacactgtttgaccactcgtattattaaaaaaaattgtgcaaatataaaaaacaaaaaattatgcttaaagtactttggataataaagtaagtaaaaaaataaataataattctaaaatttttttgaataaaacgaatggtcaaacaatacaagtaaaatatcaaaatcccttatattagaggacggatggagtagtagatttggagccctaccaaacatgtctcccttcattctaaaaaaaatacaatcccaatattaagaaaaagacaaattagtacaaaagaaaatgtcctatatacccctcattaactcagagcatgttggaaataggagtgtgtttagggtaagatagggaaattttgaatgaggagagcggttggaggaaaaaaaagaaagagtacttttttgacaaaatttatatgtttggattgcattctttttaggataaataagtattttaagaaataaactttaataaatatcttagaataagttgtgagaaatcatactttcaataagttgtgagcaaataatatgcaacagttatttggtaaaaaaaaagcttaaaaaactagggcagaatgaaaagaactttatacgatttgacaaatgtagtactacagtaggtctatatattcgggctgacttctttcattggtttttccaactcacctccctcttttcccatgcacgtttttcaaactgataaacagtgcatgttttgcaaaaaagtttctatacgaaagttgtttaaaataattatattcatccagttttgaaaaaaaaaagctatcgcttaattaatcccgcgctaatggaccgctccatttccagtgagcaggatatgggttccaaacccaaatcaacgaagacagcctcaaaagtcctgctttctaaagaagcccctatattgccactctctctacctctctgatcagcgtagcatatatttttcctagaaaaacatctactccctcttttttataaaaaacctaatcttagatttgaatatagatatactcttgtccagatttaaattcagaattagatttttttatgggacggaagaagtaccttacaagatgtagtgacggccatctgacgtacgtctctttcacgcccggccgatcgatggaggcgtggtgccctaccaagttggaaggctgaaaaacaaaaggataaaaggataaataaacagagagctttatcgaagacggcttaatgatactaataatcgataagtaatggagcccaacgggcactggaccgaccaaaatagcgatgctcacacgactcgttgccgtcgccaatcatcataacagtgacaagggcacctccttcggcctcatatccttcgctccgccattggaatggtgcagatcagagatattcagagctaattaagctcatcattgccaaaattttgctcacctgccattatacccctattggtgtgataaaaaaaaagaagagagagaagaaagacgttaatttggtcgtgttcgttgtaccaagacgattcacgtgaaaaaagtttaagctggtgagaaaagacgggcgatgactgtcgcgctctgtgaacacatgggtttaggccatgtagaaatcatcatcgtgcatcatggcgtgtgcatcgatcgtttgctagctagctagctagtgcacgaattggcgccctgtcggctaccatgtgtaaagatatgtaggtgatggttgacttgcaaatttgcaatagatcctggcacttgcaagccacccaagcttggttggtggaagaccttttttttttgtttgaaactatatacttagggtgacctatctaaatggtacaattgtgaagaaatcgttttaattagtcaagtgtcggatcatcagtggagaggatgtgggcagtgggccccctttttttcttatcggaatgtagaattagttacttcctcctccgtttcataatgtaagtcattctagtatttctcatattcatattgatgttaatgcatctagatagatatatatgtctagattcattaacaacaatatgaatgtgagaaatgatagaatgacttacattgtgaaacggagggagtagcaaattgagaatgcttcattggtaattcctccgtttcagaatgtaagtcattctaatatttcccacattcatattgatgctaatgaatatatctaaattcattagcataaatatgaacgtgaaaaatgttagaatgacttacattgtgaaacggatgaagtggcactaaatgaacttaggatttagcaagtggtacagtccgatcattagtggaaaattttattagttaataattaagagtgcttcacaaaattaatactccctccggtttcataattcttgatgttttggataatgatatggtattcaaaatatatgtttgaccttatttttatattacaatatatacaataaataaatacatgtttacttttattatagaattttgaaagacaaatccatatgagttgttttctagattttttatatttaaagttattgatagttttgagtgaattatgttttgatgagatagtccaagggaagtactgtacttcagtgtactgttcaccactatcgcagcattatttatcgttcaaaagattagagatctttaaggcatttctacatcatgagagggctataacacaaatatcccccagcaatgggtcaactgaacttaatttgaaccgtccgattgagatccaaaggccagtgagcgttgagccctatcaatccaagccgtcaaatctcgatcgagtggcagtcgtacgggtttctccctctataccaaaattaagatacagtgaataattgagttcaaaaaaaagatacagtgaataatttaatagagagcgagagcaactccgacttcattgacgaaggtgctagagatgatggagaaggtgtaggatttagcagtcgagtttgcgactacaaattaaactttgtttgataatgttttagggagtaactatatttatggcgccatatttttcaccaaaaaatagtcggcatgtatttacattgtaagtccctaaattacatatgtaattttagtgtatttacaatgtaagtcctagaattacatagaattacatatgtaagtcctaaaattacatatgtaaatactaaaattacatactaattacatatgtaagtggtgtgtaagtgtggtgtaacttgtataagagaaggtatcagtgcaacgttcaacgctaatcaataaagaagattagggcttgctgcaatgccgccgtgcgtgaaaacatccaacgaccatcgaaaactcacggagcaatcgtacggctagcgacaccgactaaaatcagcccaaaaaaactggcgacatatttttagcaattccgatgttttattgttgttcctgctctgacagctggtcaactggtagatcggctgttgatcgactgactaattaacgggccatcatcatgcatgaaccggcaaggagcagtcgccagagaagaacaccaagtccgtcttggtcacaatcacctgaactattcgggggaggatggcatgattttttaagttatatcggtcttcttttgattttctaataattataagttgttcgcatcctaaccatacagaagttagaagttaggagtgatattagagtaattattatatcatcttgtaatcgtctgatatcgataaagctttctttatcttaaaaaataggggcagtgtatgagacatctctaatgttgagcaagaaattcagtgtgccaaaagaggtaagattcagagcagcaatgggaaatgggatggagcaaaattgactgaacaaaattgttgaacaaattcgccagaactcttgagggtttgggctagaaaccaatctgatgcaggcgcgaagcccaacaatttgacatggatctattatcctttttctggatcatatttgttccagcctcatttggacaagatgtggcagaagcccaacatatttcatccatgatccaaccagttcccagtgcaaacatcttcacagccttttggcccttattaattcggagcccacttcaggggaaaaaaaaaggaaatatccaccaagaaacctgcaattttctccaaataacaaaacaactagtgatttattaaacgggtttactatagatttctatcgacaaaaaaaagagaattctttttcattttttttgaccatcagatgtgcttgaagattcatgaagggcttgagagagaaaaatcatgtgaaaactcaaataggcttacatagggatggaaccccgatctactccattcgtctctaaatataagatattttggttggatgtgacatatcctaatacgacgaatctggacaggagctatgtcacatccaaccaaatttcttatatttagggacggagggagtattactcacaagtaggtttacatagggatggaagcctgatctcttattaacaagccgcacgcactagccaccagagccatcaaagtggttttagaagtggaaaaggtacaaattacatccttgaatcagaaaaccagacagcgcttaccttgaactttcaatacaggacgaattatcccccttgacataatcccgagcgattttattctatatggcatacgcatgacaatctagtcagtattttttttaaaaaaaatggtggagtccccttgtcatactctctcacctcctcccctccccctctctctccctctctctcacgcgcgtcatcgggcacacgcgtaggtcgagcggcggcgggcggttggcgcaaacggtatcgcacggggatgggtggtgagcggcagcccggacaaggaagcaagagctgtgaactccaagagggagccggagttgtgggaggccaccacgaagtacctgaactgcggcgtccggttagcctagacgacaagcaaccgccccctcggcgcgccaagtgtgattgtataatacaattacaatatgattgtatttggaagattttgaaaaggattttttaatagaaagtttaactttcaggtaatccctcattaaaatttaccatccttaagatggatcagcacatgttgttgtcgcttgaaagctgcaaatctccaaatttccagcgacacacgcacgtcgctgcggttggacgtcgcgggccacgcggtagaccgcgacaaacacttgccaccttctttgtgtcgccttatccctcgccacgccgtgcgcgtggcgcgcccggaaggcgagagacatggcggcgatggcggcggcggcggtgccgagcgacagaccaccgcttccgtggcgcgcgcggctgctcgtgggcgccgtctccgttctgcactcggcgtcgctccgccgcgacggcaccgtcaaccgcttcctcctgtcgctgttcgaccgcgtcgtgccgcccaacccggcccccgacgccgccggcgtggcgtcctcggaccatgccgtgtccgacgacctccgcgtcaggatgttctttccgggggcagctgccagggatggcggcggcgatcatctgccggtggtggtatacttccacggcggcggcttcgtgttccactccgtggcgtccgcgcagttcgacgcgctgtgccgtcgcttcgcctcggccatcccggcggtcgtcgcgtccgtcgacttccgcctcgcgcccgagcacggtttcccggcgccctacgacgacggcaaggcggcactccgctgggtcctcgccggcgccggtggcgccctcccgtcaccgcccgccaccgtcttcgtggcgggcgacagcgcgggcggcaacgtcgcccaccacgtcgtcgcccgcacgccgagcagcgtgtccgggctcatcgcgctgcagccgttcttcgccggcgagacgccgaccgcctccgagcagcggctccgcgacgcgccgttcgggtcgccggagcggatatcctggctgtggcgcgcgttcctcccacccggcgccacgcgggaccacgaggcggccaacgtgcccgccgcgctccggcgcgacgccgagcggcgccgcgcgttcccgccgaccatggtctgcgtcggcgggtgggacgcgcaccaggacaggcagcgcgactacgccgacgccctccgcgccgcgggcggcgccgaggaggtcgtcgtcgccgagttccccgacgccatccacgcgttctacatcttcgacgacctcgccgacagcaagaggctgctcaccgaagtcaccgccttcgtcaaccgccgccgcgccgccgccgccgcctcctagtgctccacattcttgaacttgcagtagccgacattacagtttgcttcactgtatcgctagctcgtctccactcacacaatttctcatttgatttgatttgatttgattcatacgatgaattcaacgagacgagctgttcatgatcgattctgtccgtgaaacgaagataacgagttgaggaggccacgtgaaagcattgatttttagactgattgccattggcaaatggcaagcatcatgtgaacgatttttctctcgtcaaaaccaatgaacgtgtagtggcgacaacgccatgaaaacccaaatgaaccaaaccaatcgtagttatccactctactctagtatttggacggaattggggctggatggtctacactgagtctgtgaatgaccatggttttgcagatggccagcaattcagcatggttctgacttgcaagtgcaatgtataaattgttcctctataatgctctctctacgcaattaaactgtttacacatgtcctttgattgctgttgactgatcagcaaccaaagtaatatcttttgttcaatgaatgtggtctacagaagtgttaattaggacacgtaatctttcttattaattcgatcgtctgtctggcatggcatcaatctcactggccacagtagtagcagcttgaagtctttgcagcatcaagcactactagaaaagaaggcaacatttattcacaacagaaaagcttctttagcttctgaacaatggtaaagaaggggtcccatcccaaaacatggcagcatttcattttcattttcatttccataggataggaatgttctgctttacgcttcccagaagccttctctctgataatcagagcttctagctagtgtagtgttagccgcaggtttttggtttagcttctgctttcttgctgtaccaggctgtgagtctgattaagctaatacaatagctaattgggcatgagttcttgcttccgagaggaggtaggcagcagttgcaaactttgcattctcctttttgtactgattgattggccgtttgattggacacatatgatcgatcgacaaacgaatctggccgaccaaaacacattgcacggacagcctcatccatgcacgtaccagcactgtattttactgtactccacataggcatctcttctcttctcttccaacttccaagttccaacaaatggacagaaatatgggtccccatgtttctatacagtgaaaccaatcaggtacatcactcagaaatcagaacatgctgacagctgatgagcttatctatgtactactaggagtattctgtattaccatgcttttgatttttgaactatactgtacttttcagaacagatggctgatggctctgagctaatgaacaaacccaactgatcatggcttgctcatgctaattaatcattagtcaacttgctccaactgaatgtactgcttactactagtatattatggttctcattgtcatttatcagatagtcataaagggaagaagatccaactagacaccaagaacatcacaactcaactgttcacatgcacaactcaacaccctaaataaacaaaaaaaggcacaggcataataaacaagaagaaggcgacacccaaaaaaaaaagaaatattttcttcttctttttttttaccactggccatgagctagtgatgagtgagtgtgagcgagagtgatcacacgcactgattgctcccgtcgtccatggcgatggcgatggcgagatggccatcacatgacgctgcacccgccggcgttggggtcctcgtagcattgctgctggtggtagtacggctgccggttgccgtagtaccatccctggtggtcgtagggcgccgccggcggcggtgccacgccgtagtacccggcgggcgcctggaacgcgccgccgccgtagccgtagccgccgccgccgtaatatgacgactggtcgtaggctgctgggttgtagctgtagcacgagagggagccggcgggcgccggccagatggacggcacggcgacgccctgcgccgccggcatcatcatcggcggcgcgatcggctcgccgcgcgggggttcggggccggcctgctgctgctgctgctgctgctgcttggcgatcttgagcttctcgaggagcggggcgaggtcggcctgtgtcatgccggccgggaagggctgcaccttgccgggcttcgccgtcgccgcggccggcggcggcgcgtcgtcgacgtcgaacttgaccttcttctccggcttcgcggcagcggcggcggccttgtccgccttcgccgcctccttctccggcttgccaccaccgtccttcttctccgccttgtcaccgccggcggcgtccttcttctccgccttcccgccgccgccgtccttctccgccggcttcgccttgtcgccggcggcgtccttgccgcccttgttctccttgcccttgacctgcatgtccttgatgatcctgccggccttgcagcacagcttcttgcacaccttgtcggcgtcgaacggccccgacaccatcaccgcattgttcttctcgtcgtacgagatcgtcttgatgttcgccttatctgcacaacaccacagatcatccatgaaaaccatcagccattagccatgatgaacacggtcgtcatcaacctcaaatcaccaacatttttatcttttcacactccatatgctacagtgcgcagcagcatcgcacgagctcacagtaactaacacaaccatctgacatgtgggcccacatgtcagttgacgaaacagagacaggtccgtgcctttgcagcttttgcattggtgactgtggcgatgaattgatgatgcgaatgcgatatgaaaccatatgatagtgtactagcttctaccttggatcctgcaaaggactcttctgatcttcttgtagcatcgatcgcattcgaggtcaacgttgagcacaaccgtggagatctgcagcgatgtgatcgagggattaaaagataggtaaatgctgtactaatggagtacttactagctagtggtattattaacagcagatccggaagctgttggtacttccggtgttactgtgtggttcacttggcaattcttaattgagagttaactgcagagttgcagatagcagaataaattagtgacttgcctaattcttcaacctgtgggttcagaaaggatttactagtattctacaattctgctactacctagtttttgttctgtccttaaaaaaaacaaaagattaggagcataaaaatgaatcttggagttttctcttgcagaaccagatgaaatgaagccagtttctgaagaagaaattcagtgggcgaacttgaactaggaaatcgagtgggtgcttctttcgagagcatcaaaagaaatatgaaaaggacactagctgggagcgtgtatcttttgtatctttgttcaaaagattgtttgaaaacgaaaccacgagctgggaaaagaaagaaaaaaagaacgtgtgccttgatcttcgcatgaaagtggcttgcgacaaggaaaggagttttgggtggtcagagatagagatatttttgcttgctctgcacttcatttctgcttaccaccatgcttgttttcttgcgtgcctgacactctgtttagctacacaagtgaacgccatcaggttgtcaacattctccatttctccaataaacctgaagtgcttctctaccaaacttgactcaggttctccaagaaaaatatttctaccccaagggaagaaaaaaaaacgattttctttattttgcttaaacacatcaactttgttctgactacacatgcacacacacacacacacacacacccaactgaagaaatgaaggaaagatgcaaggcaagaatcaatactgaacaacagaatcttcagaccagctcatgaaaggacaccctagaacagcaaagtccggcgaaaagctcttcttaccttgtctgccatgagaatggcggcggtgtggccggcttcgtcgtcgccgccgccgctgcggccgagctggacgccggaggaggaggtcgccggagagggaagaggagaggagggaggcgtgaagagaagagaagaggggagaaggatggtgtatgttcgtactgggttggtggtgggtgcgtggctttaagcctgatctcggccctcactgacgcgcacgcaggtgttgggtatatatcttctcttaattatgtgtgtagtgtatcagtctagtaattagcagtaagcaccaaccacggcccaccgacaggtggggcccaccggtcctcgtcgaccttttgacctctattagctgtgtatcatgtgcaaaaatattgtcagtaggtgggcctctctctgcgttgggcacacacgtttcagagaaaagaaaatagataatcagtctagtagtactagtgctgcagtagtagtagtactgtcctagtacaagtcacttctagaattcagaaaagaattgtggaagcaatgtactgtaatgcttatctcttcatttgcaatgttttgcacattttccccccttaaaccagatgatatatggtgatgaagaagaggagggcgagatataattagcacttgatactaacattgcatggctcagaaaaaaaaaaggtagtaaaaaaggaaaaggaggtgacatacatgacttaacacaggtgatgtaatgttagcagcagtgatgtgtgctttgtgtttttgtgccatggaaagcagggaaatttgtgtccaagcggcaagagcgcatgcatgcatgcatgcgtcccagcctgggaatggcgtccatcgattttgacacctaaatttggcggcgtctccatgaccatgccttggacttttgatgcgtaggcaggcgaaatgccgccaaatttgccaataaattgaggtgaaatgcaccgaactgaactgaaacagacaaccataagaaaattttgggacgccacatactttgggggaattttgtttgttacctttgggcaggtacaatagcagcctattagtcagctataaacatattttaataagataaacgatgagagagaaaaacagcgggctacagatttatagcccgctgtagcacggactctaatatgcaatgtgtatatgacagacgtgaccatatattaatagtatagtaagtaactattgtatgaattggctattagattgactatagatgaattggagttagtagtaggctatactattgaactttctcttacggcgtgatgttttctgtcggcaacgggatgaagattgaaggcgagctacgtacgtacgtcatcaaccatctgtgtatgggcaaccaccagataaaacacaaagatggtcaataaattaatgatggtgtgctaatgcgattgccttttggtgttgggaagttcatagctatctggattcttggactgggggccagggatttaattttgcattccctaaacttccaaagtgctgcacaactcatttgccaattgccattcgtcgtatcgatctcaccagagggaaaaatacttggaaccttcctctgtccctccctccttcccagctactcgctcgccacctttcgcagcttcgccaaggtggtcactcgcaacgccactccagtactccactccccatcacatgaacaagtattcacatgccaatgattgcccccctccccccggatccggatatatgcagtagtagcgtggatttatgcagttgtagctgttgcgttggatctaaatctaacggtaagaattagattgattactgcagtaaaaggactaaaagatcgttcaggggtaccgtagcatgaacactgtagcaattgatttagatcattgatcacaaaaataaatggctgaaaatacatgcagttttaaggtgtagtcgtaattaggaccccaaccaatgcaaccaaaagaaaaaacgtcgtcacaccggacgagacacagtgacaactcatgcagcatgcggcacgtactccctccaggaagtcgcttaggacagcgacacggtctccaaaatacaactttgactttttatttctataaaaatattggttaaaaaatgctatatgtatatttttataaaagtatttttcaagacaaatctatacatataatttttatatttttaaactaaacaacttgaaagctatttataatttatatttctaaggtttgacttaaacattattctaaacgacttcctaggtgcagagggagtacaggcccaacccgcagatcgccccggtgggcggtgaaaaaaatagtaggcgacgtacatacgcgaacgcgaggtcgcgcacggagaattctgccgtttttaccgtgagacgcgcgcgcgagcggcgcgcggcggcgtcgtgtgggcgcgcgtatgtacgaacgaggcgagctgttacggcgcgcgcgcgcgcgcgtacaccaaagtagtaccaaattaacacgttggccgcgggacgttttcttcgcggcttcgcggggttggtggtgtcggtgggattctcatcgggttgggcgcgcggttcgccgctcgcgcacagtggtcgcactagtcgtgcacgttaccccgtcgccgtgcgctcgcgccgttgcacgttcgcgatcgtcaatggagatgctcatcgctgggtttcatttattatttttatttttacgctacctggggtgtgtggtgtgcaaacctggtgtggtggctgccgttgtgctctcgttgtcatgataaatgctactctctgtattttaagtattacaccgttgacttttttttattgatgtttgaccattcatcttaattaaattttttttacaaatataaaaatatttatgatatgcttaaagaacattcgatgataaatcaagtcacaacaagataaataataataatataaattttttgaataagacgattggtcaaaacatcaatggcatcatatattaaaattcggaatgagtacctccttatttcatgatataagacatttcaattttttcctaactcaaactacttcaacataaaaaaaataaactatcaaaatatattcaatacaatattcaataaaactaatttagtgctataaatattgttatatttttttctataaacttacttaaactttcaaaaaatttaactttaaaaaagtcaaagcaatttataatatgaaatggagtgagtatgtactgtaagttttaaaaattaaagtgtagatataatgagtgcacgtaagttttaaaaatttacagcgtagatatatgaaattatagtgtaacaaacatctaactacattttgatgaaaaatatgacatcaaaaataaataaatagttaattcctgtgcaacccgtagctgccgttgcgctttcgttctcatgagcaatacaatccgggttattctgcaattcgtgcggtgtttttgtacatgcccgtcagtttgtcccatccactgactgcacaaggaagaagaataatttatctgctcctacgcaaagaacgtgtgggtttttatttttgtttatttgatcgtatttgggttggcttaatccacaaggtttttagtgctggttgttcgtgatcaacttgtcgtgtttacgggggtttcgtattgtgatgattcatccatgcaagctgcaacaagagatcgagcatcatggcatctcatgcatggctcttggatacctcttcagattgttctattggattggttacaagaccagcaggctgtaggatcgaatcacaagaactaagccaaccaaaggggggtgaatggttggtatacccaaaaaccgaaaacttttagcgaaaataaaagttaccctcaatttcgatgagatcggtctgaccgaagtagattagccggtctgaccgaagcgtagccgccggtctgaccggtgttgatctaccggtttaaccgccgagatcgcctgccgctcgctatcgccgccgtcggtctgaccgccgtgctctcgccggtctgaccgccgtgctcccgccgatctgaccgcccgtagatcgccggttagaccgccgaaacccagtaaacacaaatcgaagaactcataaagtagatgacgactttattgattctctttgtgtttacaaagtgcaccaacagcaatctttacaaaaatttcgactaaactcgaaaccctaactcaaaactcaactctattgctctctaaagcgataccgggaagcctcacgctccccctctatttatacatgaggtaggcagcctaaagccacgaaccaaactcatactaggagtcctaaacaccttagaaaaccctctagtacaagaaagaaactttacataaccaaacgtaccaaatttggactccttccaaattcgactccgcatcctatacgcacacaataactccatcgtatgccatatggaatctccatcaaccacgtgcatcaactctagcctaagtatcccgcatgatctctgaccacaacggacgtcgtcttatccccaagccgactcccggtccatcaccgcaaatactctcccgagacatcgagtcgcctacacatggaacaaacaaagaaaccatattccgagaccaagctatctccaacttaactcattagcagcaaacaatagtattacatacatatagcatccatttagaagtcataatcatgaaaaaaactcggatatccaaataaacaacccgaaaccgaaaccaacacagtgtcggccggtcagaccgcgggctgcgccggtctgaccgcgcattacacgccggtctgaccggcaacccatgcccggtctaaccggacccaaatccagcagtacctgtatattcacctgtgaaatccaataatctccaaaaccacttcgtgaataaattccaaataacaaaaccaataatctccaatacccatttgttcatcacagaataataatcaaaaatacctttgattttacacaggcataattctgggtgatgattggttctacttgattaaactaaggagaaacttccgattggtagcttgcacccactcaagtatcgaaaagagattattgggtgatggagtgagcactgtttccctgtgaaacaacagacaaggaattaacgatttgaagattttatgagaatattgggaagatgaaacttccctttcagataatgaataatgtgttatttgcacactaacatttttgaacttttttgggtacatgtactttattactaaaaaggtaaatagagagaaggagtacaacctaatgccagtacatgtttcactgaatggaaggagtacaacaaaatgcagagagatagctgtatgcaccgtggtatttacacactaacattttttaatacttctctacctatttcgttagggagcgtattctgtgcacataaatttttcgtatacacattatgcacagaacaaaattcaccaaaaaaaaacttagagaaaaggagtacatgtttcaatagcattatatttctgtttaaagtcttaacctcagatttattatattttagcccagaaaaaagatagcttgaaggttataataaaggcaaaatttgctacaggacacgcaaaaaatgtgtaattagctaggagacaccgaaaaaacgtgacactgtccatggacactacaaaagttgtgtaattagctgtaggacaccggaggcaatattttataatttccaacacaaaagaggggagataattttccaaatgaccagattgcccctgacattgcacaatctaaactcgaccgggtctggtcgaaccagtcccagtcagagtccgctaatggggttgggcctacatgtcagcgaggtggtggatgggaggtagggtagcagcgatgtttgcggtgtcgccaacggtgatgaggttgcgtgaccacgacgtgtcgacggctccaagcttctcctcgccctctagctcacccagcaacgtcgcacgacatcactcttcaccccattgccaagaaactgatgcgaggtgttccatctcatcctcctcgccctcatcttctctgccggccgtggtgaagacaaaggccgtcatcgccatcgagtcgcggtcgtctctatcttttgcccgttccatcatctcctttcagtgccatctccattccatctaatcacaccccatttcgtgcagtgacggcgttggaacgcgacctcgccaccagagctcgggagcatgctccgagcaccgccgccatagcgacctcggcgttccgaccaccgtggagcattaccggtcaagctgcctcgccatcattatcacctcgagcacctcttcaaaacgccccaagaaccgccaagatcgatgaagcgagaagggagatcaaccttttcttctccggcgccggtctaccgccatcttcgtcaaatccgtccacaccagtgagccattgcccgattccctatacacgtgctgtccctatgacctcaccacgctcatgcatgccacaagctagcggctcatcgaccctttcgcgccatcatcgtcgtcgtgaagctctgcatcgccgcctggagactttctccatcaccatcgatgtctagaccttgccgaaccctgtgtgcgattcggtgagtactctagagcctctacaaaccacatgcatgcattcccttaggctaaatcgagctctaacacgacatgcaccaccatcccgaacttggccggcgcccgtaccgctgacaccactgattccgttcaccattgcttgcaagaagactatggtagcttcgccttggacccctctacaaattctcttttgactgcaacctcatccaagccgccgttcactgccggcgacgccgcaaacctcgccgttgccctgcctggctgcctcccatccaccacctcgctgacatgtgggcccaacccgattagcggactccaactgcgggtttagatggtgcgataccgggggcaatcaggtcatttagaaaatcctatcccctctttttctcagaaattataaaatattgcctctggtgtcctacggctaattacacaacttttgtagtgtctatgggcagtgtcacatttttgcggtgtctcccagccaattacatttttttgcgtgtcctgtaacaaattttgcctataataaatcggttagatttttttgttgcttcatatacatagtgtgtacacgagattacttgtgcggataagatatgtgtccgtttcagaagaggtacaacttaatgcagagagcaggtagctgctacaatagatgtatgcactgtgtagtgtgagtacgatggtacagtcaacgcaaagcaaactctgagtctggacgagctttttgtttctgactgtgactgtgtttagtttctgaaaaaagttggaagttcgaggaaagttggaagtttggaaaaaaaaagtttaaagtttatgtgtgtagaaaatttttgaatatgatatgatgtgatggaaaattagaagttaggggtaaacacggcctctgtacaagtacttgacaatctcaatgcatgtaccacaaaagattagtatggtcttgttcgtttctccaacaacatggagataaactttttatactcgtggcacgcttttcaaactgctaaacggtatgtttcgtgtgaaaactttctatatgaaagttgctctaaaatatcagattaatccatttttttaagtttgtaataattaaaactcaattaaacacacgttattaccacctcgttttgcgtgaaacacttaatctttatctttaggagattcaaacaccacctatgtgtcatctttgacaataagcagatagcaagatcccgggaagaacactataggccctgtttagttctaaagttttttttccaaacttccaactttccatcacatcaaatctttcatacacacataacttttcagtcacatcgttccaatttcaaccaaacttccaaactacagtgtgaactcacagcctatgaatcaacggatagcccgcaaagtggtgggattcagtcatactaatgaacaacaatgccacacccaaatgacagatggacatcctaattatttctcttgtaaaaggcccaactgttttgttgggtcaatgggcattttgttgggccgatgaaattgttgtacacagtatgaataagtccaccttgaatccttcacgtagggtttcaatcgtatttctcaaacgaaaaaccaggtacaatacattgctcatcttctgaaatcagtcaactatagttcaaagacagtattgactaattgagattgttttcgactcatgtgaccccatgttgtgtgttgactcggtcatcgtcctacgtggcactcatatcaaaggaaacaaaaaacagtggagcccgcatggtgcccactcatcacataagaagagacagagagcccaaacaagaggtgagagggaacgaggatggatggctaagggcatcaccaatgtttactgttggaattaatgaatggaccttagcccactcgaagattaattctttggaaaatcacaaaagcccacctcatgggatggcatgcatgtggagtttagtaccaccttacttattctaggagagggggacctccttaaaagggaggatgccctcctagccacttgaagcatgtgtggtggagagaagagggggaacacacgcgcgcgcgtactcgctcgcctggcaggcggcgcacgtgcacgacgtgcacgtggttcgccaaaattggttcctcaccttgcgcagatgcagcctccttttgcaattttgttttgctgcaaattcggattcgtttttgttttggaaacgttccagaaaaatccggtgcatgcaaacggtgtggagtccggataagttacgcgcgacttatccggttcggttacgcgcagtggagatcgtgcgggcgcccttatcaagcgacccttctctatataaaccgagccgccgccttcacgcaacacacgcgaaatcaatctagggtttgcctccgactctgtgctgcgcgtcgctcgtagattactccatcccgctcgccggcgtgcacctgtgatcgggagagcaggtctccggaacctctgccttcgacgttctgcaccgggagaaggcggcaataaggtttttgggaagcgctttgcgcgactgctccctgttcgtccgcgacggctcgtcttcctcttcgcttgcgtgctgcgtgccttcgtagatgcctgcgaaaagtttcgaccgagcagccggtctttccgccacctcggtacgtgttcaatatgttgcgcatatttgatctgtttatgttatactgtgtagtttacatgtgtagatctaatgatgcgttcatgctagttttcatctgtaatgtcatgatttatttatggagtagattaaatcattatatgcctataatctcaacaatccaaaaaccttattataggcattgtgattttactatggctggttttgccgatgcactgaggccggataaattcaccggtgtgcattttaagagatggcagatcagggtcactctgtggctgacagctatgaaatgcttctgggtgagtactggcaaacctgaaggagttcttattgctgaacagcagaagcaattcgaggaagccactactctctttgtgggatgcattcttagcattcttggcgatcgtctggtcgaggtgtatatgcatatgaccgacgctaaggagttgtgggatgcactgaatactaaattcggtgctattgatgctagcaatgatctgtatatcatggagcagtttcatgactacaagatggctgacaaccgttctgttatcaaacaggctcatgagatacaaaccatggctaaggaactcaaactccttaagtgtgtcttacccgacaaatttgtggccgggtgcattattgcgaaactacctccatcttggagaagtttcggtactgcactcaaacacaagagacaggaatactccgttgaggggttgatagcgtctcttgatgttgaggagaaagctcaggaaaaagatgccgtgtctaagggcgatggtgggcagtccagtgccaatgttgtgcacaaggcccagaacaagagcaaagggaaatacaaagctcagcagaccaccaacttcaagaagcagaagaagaacgacaacaatcctaatcaggatgagaggacttgctttgtgtgtggccaacttggtcatctggctaggaagtgtccacagcgcaaggggatgaaggcacctgcagggcagacttctaagtctgctaatgtgactattggtaacactggagatggaagcgggtatggtaatttacctattgttttttcagttaatcagtctactaattggtgggttgatactggggccaatgtacatgtttgtgctgacatctcattgttttcttcttatcaggacgcacggggttccaccgtcctaatggggaatgggtcacatgcctctgttcatagtgttggcacggtagatctgaagtttacttcgggaaagatcgtgcagctgaagaatgtgcagcatgtcccttctatcgacaggaatcttgttagtggctcccgtatgactagagacggatttaagttagtttttaagtctaataaagtagtcgtgtctaaacatggatattggggcgcgcgaggcgtgggcgcgtggagtggttggtgaatggtgagagagagctcgccctcgccctcaccacggcgtgcgccttttatagcgaacgaaaggcggtttcttaattgtgatctgtggtgttaagcaagtgactaatggtactgtgatcttaattagtgtctaatgatgagcgtgattatgctttaatttctgtgcagctctccctgcgccctgtggttgggccgttttagctaaaagcccattcggattttggacgtgtattttcttagtttatccctcttttgggttaaatttggtttgatgccaaaatcaaatactactactgtagcatttagcaatactgaatactagatatttgaattgctactaatatttatcaaatcaataactataaattgatagtactatattctacgctaccgaaaacattggtactcctgttttgattggtgtgatttttttgtgtatacgaaagaaaagatatgcatggatggatggatgagtgaatgaggtgtcgttgcgtcgagtattaattttctttttctactgtaccacacagttcgcaacgtatcatgtactatagcgctctctccgtttcgaaatgttcgaaatgtttgacatcattaactttttagcacatatttaaccgttcgttttattttaaaacttttatgagatatgtaaaattatatgtctacataaaaatatatttaacaatgaatcaaatgataggaaaagaattaataattacttaaattttttaaataagacgaatggtcaaacatatgataaaaaatcaacggcgttaaacatttcgaaacggattgagtagtatatagtcgttgcatcgcacgtctctcctgcaggctttttcccttgctggttttgcggaacaaggaaagcttagggtaaatcacattatcacacacacaaatttaaatacacctgtacgttcaaaagagaaaaagtagaagtatagttggctgggtcctgggtgggtccatttcaggtcaggtgaaaactgaaaatactgccagctacgacgaatcctatattcaattcaaacgagcttgctctagtttgggacctctcagaacgtttctttgttctaaaataaaatataaaaaataaaaagactagcacttagtagtaactttctttggcaatcccaacgatgatcatgcaataatgtatatacagtacctccgtcctaaaataaacgtagacatagatatccatcttcaacatttaaccatcctcttatttaaaagatttatgcaaacaataaaaaatagtcacacataaagtactccttccatccacaaaagttacacctatttcacatttgagtttttctaaataagttgttcctatttgtagtctttatgcattcaagacttgaatgaagagataaattaaatgttttattagaactcaaggaatcatctaaatacttattggttgcatgcttgcatttactacttgattttgtaacatccaagatgatttaatttttccttggtcttggtgtcaaaagtaatatatgtaacttttgtggatggagagagtactattcatgtcttatcatctaataataataaaaatactaatcatattttttttaaataaaacgagcggttaaatattggacatgaataatgtaaagttacatggatggagagagtactttaccggaatgactacgcatacgactggtcaatacgactctgtagtccgtacgatcataacctgaacccacagaggtaattaatctaagcaatgtgattagtttgatgaggtgagacatacgttagtagtacgtatagcacttctcatactctacgtgctctattgcccgctcgtcagaaaaaaataataattaattttaaataatctaggtgtttctttagtgtgtataaccagttattcagacgtggtttctaaactgctaagattcgtaagtagtccaaccaattaatcaaacgtgcatctcgctctatgaataaccagcatagttatgcaaataaaaaactttgatctcaacttaattatcgatgcgcgattatcataaaaattcatgattaacacgatgatggtatggtcaaagtctgttgacctgatgttaagtgacttttttttttgcaagcttttcagtccataccaaatgccacgagggcatagtagaattattagtgcaaatgcagtcaaacatcaaaacagaaacacacatcacactgatatggttcttctccgttaagatgaaaaaggaaggtggcaacagaagatgaagacaaacaaaaataatgcagggttgtggtgtgtatctcttgctccggtgcatgttgccaaaaagcccaaacaaggcaggagtatacaggtacagccagctttatttttttttcctttcagggagggaaaagaaggcagctcacacgcaacacatggacgttctgtgcttgcagcatcacagtagcttttgttggggaatcacaatgcagcatgaaaccaacacacacagggaaacatacggttcagcaatacaatgctgcaatgcagttgtgcaagcaaggcagcatttacacttgcacgtcagatcacgcaacacaaggtagtcggagcaatttagaccaccttactcttcaaccacaatataataacaatttagaccaatagtccttactcttcaacaatacaagtatataacccttaatgttgcgttggataataaatcttttatacttgtactcttaattgtcaaaaaccaagcctaacaaataagaagtggggaaagaaaagagacatcctaaattaattcttgactagactaagggggtgtttgggagagagaggttaaactttagcccctctctcaaaaccataagtctctaggggggacttatgtttttgagagctctctcccaaacaccagtaggcagggcagctatgcatctaagatattatgctcatttaaactcggttccagaagattaacatctgaagcaaggcaaacacacacacaaacggttagctttggtcttcagaagtaccaagtatgctcttattcaggcatcgacgatttcacgttacttagaggcgggctgtttgcttctcaagaaaagttccctgcgcataaagataccagcaagatgacagcgatcgttagtacaataacaggctactagccagctataaacatattttaataagataaacgataagagagaagagcagcggactacagatctgtagccagctgtaacacgcaatgtatgtatgatatgtgggaccatatattaatagtataataaacaactattgtataaattggctattagattgactatagataaattaaagctagcagcgggctatactattaaacttgcacttacattgatgagaacctaaacattgcaaaagcagactaattaaacgtgtgcagagaatcatttaatttaccgaggcctgagatagaaggtaatgcagctctccgacatttaaccagatcagaaacatataattctgtattaatcacaccatgcgagactgtctcattcacagaagtatagtccactacctgtttgacaataaagactgaatttcaggatattcggtgcagtgacggactcagaaagatcacgttgggtgtgcacattcatatctctcttacagcgataaatgcagaaatgaaaatctaagctacgggatattacaggacctgaatatcaaattattatacatacaaatagtatgcttaaatgcagataagattgtcaaaaatagtgcttaaacagttcaatcatcatctcatatatagtgaacaaaaatagaaaattacaaccaagaaatttaattggttggattaaaaattctgcacaacaatataaatattcttgaattgattcccatgatccttatcatttaaatggttccagagctaatcagatgtttggaaagtgatctaagcaattagaaattcaaaagttgacaactaaaggctaaaagggaatctttcaatctaaccttatttattagtgctaaataagctagaaatccttatattttggaactgatggaatatatatggtagcataacgaatatgtggacaagaacgtgtaccttgtatccatcaattcttgtttcccttttaaaattgtctttcaaaatgttcatctccttatcaaacttatgggaaagtgcatccagatcatgggtgattttcttttttaaaagaccattatggagcttatccacggtatcttgaaccaagatatgtgttattgcccctaagcctccaagagcatcaagaaaggatagaatattttccattgtgaccctattatgatataactcgttggcaacctcacaaaagatagttgtgtacgtcctcaccatctgcaattcagaaacgatcagtaagccgaacgaaattttagaagtacaatagaaagaaactttagaacttaattacctgatctgctgtacgttgagaaatttcggttgtaccaagcccgaaggcagcaacatcctagaaatgttacaataaaattgatgaattaactttagaagcaccaactatacatataacaaatggaaagcgtacacatgacatcataatttaccatgacctccgaagctaaatctagagctaatcgtgctttcctgcaaaccgttgacaccatctccttctcgtctgcattctgtcatagtgtcatcgccaaattaaaagagaatgaaatgcatcaacgataagctgcaacacatttattttggtagatctttgttaaacaataagagcatgcttgtcaaaatttcaccataaagtaatgtgttaacaatgaattcggtgcattagcaaaatactagtgaacttgacataaccccaaagattggtcagctagtgcaaatagggaaaagatgtgcgcactaattttttttaaaagaaccattacaaaagcagatgtttcacattgtgactgaatcttgacttttaataaaggcaaattgactcaatcagttaacatttttgttagtaagaagtttgtaaagaaatttttagtacatgtagcattgctcttgcaaatacatatcaatggaaatgttattattgtggattttttaattagaagttttttcccaactgtttcacagacagagtataaacaagactaaccagaatcttagaactggaagaatacatcttctgcatgataaccgcaattttgtacttctccttacggaacatatcagggggcgtacgcttcaaaagatcaaaattagaggcattaggaacaacaaatataaatctaaccgcaggaaagtttgctaataatcactgactcaccttataaagaaaatgatctcggttacctctgtccctagagtaataaaactaacacagtagtagattgctttcaaaattccaattgaagtttaaatttacattgggaccactgtttttagaaaaaaaaaaacttctgaacttaaaagcaattttagaactcatacagctgatggttgacatcataagcttgggactttcatttgtaacactctggtttacaagaagaaatcaaacattggcaaatgccaaaacatctacttcctccgtttcaggttataagactttctagcattacctacatttatatagatgttaatgaatctattttatgtctagattcattaacatttatataaatatgggcaatgctagaaagtcttagaacctgaaacggaggtagtatcattagttatcatattactcctctgttgcttataattcccactgctcatctatatctcgagggactagtaatctagtattacagcatgaaccagattaatctagattaacatctgagatcgagacttaccaggcccaaggctgctctgtaatcatccaggaatttgtctaatctctcctggaagatgattgctggatgctctgatcttgcagctgcatcctgttcgagcaagcaataagcttacatcattattagcacaaaaacatagcgggagatcgaaggctcgccggaagaggagacgatgccgctgcgtcggctagcattacctcgtcgtcggcgccgtcgtcctcgtgctccggctctgactccgttgggctctttgtacagtgggagcggagctgtatcctcctcgccggcgccggcgaggggaggcggcggcgttggctaatcagagggaggaaggccagggcgctcgtcggcgcggcggtcaccgcgagatgaggcggcgaccaggtggggcggagcgccgccatgtgttccggagtttcgcggaggaggaaaagggattagcgatggatttatctgttcgttcgttgcaaccccgcatcgtatcgcgcacaaattagttaccataatactatcgcgcaacattctaaacgataatttcaaatcctagtttagagattcactggtcaaaaactcggattaaatcctccaatttcgttcgaaatttacaccaaacacggctacatttgccaagcaaaaacttgatcacatcatcatcacctgttctagctgaaactgaaaagcatattacacgtgaaaaaggattgggatgttgctgttgttctactactggtcgtaggtgtagatgaagtcggagttcccgaccatggcgttgagcacctgggagacgaggaacccgccgccggcgaggacggcgacgatgagcagcgccgtgacggggttcttgagcagctccacgatgggctgcgccagcgtgtacgcgaacccggtgctcaccgtcaccacgtacagcgcgtaccgccgcatgttgtcccagaactcctccaccagcgggccctccggccccagcgccgccgccggcccggccgccgccgccgacgacagcgccaccgccgccgcgatggccccgatcagcgcccacgtcgggagcccgcacgtcctgtctgccccgccaccgccgctgacttctccctccgctggttcttggagggggtggaggagctgctgctcctccgtcttctcgggctccggtggtgcggtcgtcacggcgaggaggcggtgctggttcgttcgctgaggggaagggaggcgagcttggaagacggtggtgcggccatggaggcggaggtggcgggggtggtggtggagtacgggggagaggcgaggtaggtggaggagcgagaggtggtggttcatcttgcgccgccgcggctggcttggccggcggtgaggtgaggacggcggcgatgagggaggaggagtgtgtggtgacgagttcgcctcgcagtcgccgtgatctgcacccgctctgcatgtggggtggtggggatgcgggtggttgttgggccgagtggaatgttgttgggccgaagcaattgttgctgatggttgggccgtgggcttggttcgtgtccatgggcatggttcgataaatgggccggtttggtgtgcgctttggcttgttagcgcttttctacttttgtgcggcttgtgtaggctaaagtggctaaccaaaagtttgatgacatgttagcgctttctacatcttttaatctgcgcaatgatttagcaaattgttttgcttttctctgctagaaagaggccgtctcgtaattcgttttagctttcgtgaataacgtggcgaaatcgtgtttactaaagcattttatcacggtaatgatacgttgtggctatattttgtttcatattgtatctttatctctaaaaattgaagatgtttttaccggtatttttggtacgttattcgtgtatgagtcagtttttaaattcgttcgcctttaaaaaatacaggatgagtagtataaaaaatctctttaaaaaaactcgcatgctaacatgagatgatcagacttatactacctccatcccaaaatgtttgatgccattgacttttttaaaaatgtttgaccgtttgtcttattcaaaaaatttaagtaattgttaattttttttctatcatttgatttattgttaaatatacttttatgtatacatatagttttacacatatcacaaaagtttttgaataaaacaaacggtcaaacatatttaaaaaagtcaacggtgtcaaacatctaaggaagaagggagtaattgcagctaatgattttctagaaaattatgcagcgaagcaaattttaaaattgaatttctccttactaaaccgtataacaataataaaaattaaaatattcttcacctgttgtaatgtacgggtattttttttctagtttgatctaaattgagaaatatttaggcattttctagctagaactgaactgaattagaaacctcaccccttctttctattttataataatgtaaagcgtagtaaatactaccacagaggctcttggaggttgtctgtactccttcattcttatctttcaccatagattatattcgtcaaatcgatcaatcggtagaaaacactatattttttattaggattcaacgaggtcaatagtattgattgataatatatactcgagataattttatcaatttactgctgattttgactttgtacattccgtttaacagtacatctttacaagtagtaacaaaaaaccgaaggcgtaagccgaagaagactttctttcacgccctcctccaaatccaagggcagcagtagcagcaaaaggaagtcaccaacccttccttcgtcaccctaccaccggtcaccggtaaacccgcccccgccccgcccgccgcaaccccagcgaaccaaaccaaaccaaacgaaacgaaacggagtagattcccccaaggccccaacctcctcctcgccttcccacctgtccacctccccccctccgccgccgccgccgccttcttcccgggggcggggcggggagaggaggcgcgggggtgcgggggtttagtatctcctctcgccggtggccgcgcggggaggtgacggcctgagattctcgccgcgtccgcccgtcgttctggtggtctcctcctccgccgccgccgccgcccgcgtgttgggggagagcggtttggcgtgaatcgggccggggtgagcggacgccgccgccgttggtggctgcttcatggagtgcttcctgctcagcctgaacccgttccggttcaagccgatttggccgccgaggaccgcgcccaaatctccctgaaaccctagggtttcccctcctccctgcccggggatttcgagaaaaaggaagtcccgggcggcgcttccccccaacccctcgtttttttttttgggttcatctcgtgtgttccgtgaaattctcgtcttctcggaggtttctgaggggagggagaggctgggctgaccggctcaaggtgttgtgaaaggacatgagcttgctgcgagaggctccttgtctcgtttagtttgagttcgggctgggcgtcccttcttctataggtgacggtggtggtggtgctgctgctgcgagggatggcgaaggaggaggacggcggcggcggcccggagttcgtgaggtggagggaggacttcgtgtcgcaggagaggggcagccgcgtcgtgcattactacctcgaggacgccgcgggcgcgtcgcacctcgccgtcgtcggcacggagcggagcctgcgccacatgctctatgtggtctcggaggatttccgggaggcgcagggtgccgatggcggcgggccgggggtgtttgcgcgcaagtggcggtcacgccgtgaggtggtggattggctcgcctccttccttccggcgaagtccctcgcctcgagtaagtctcgcctcctttgtttatagtgctcatacacgagttcggctgatactgaatataccaatagctgtttatttaacatgctatatgccatgtagtgactttagaacctaatgaagtaaatagctggtttggagtatgtctgttgttcacagtaggctagccatgaattcagattagaccttactagtaaaattttggatttctagaagatcctgtgcaacttgctgtgtaccctattttcgtagtgcataatcattttttctgcgatggatacaatacggaaaatttagccttaaaggacctttaggactaaaagttctacctgaaagacctatacagattagacattatgtggtagaggcctttggtttatttccacccatcatattagacatggtaacaggcaatatgtgctaactggtaacatatgtaactgtaatcacaacatttgggacttgagagtgcttatgctttgttcaagttcaaagagaagccctttcaaacagggaaattacatgaactttttacaatagcttgttagtgacagttgtccttagtaatcaactttttctttgttccctttcttaccacataatggtctgattaccagtttgttcaccctgttaagcatataacatgtatgatcaacatatgaaccatttgttaacggtttggtcatttcagaactttcaaaatttggatcacatatgggtaatgacattggattggatggatacagtgaacctgatagctttatgggtcacaatctggtatgcaattacttgtaactttgcatacagtttgttctcatctttattagcgttttgattttttttatattgttaggggaaagcctgtagctcggacattatgtggtctggttcgtcctggacttgtggcaagcagctttaccactataaagctttttgtcgtaatggtaccacaatatctgtaagtattttgtcatggtcatggtcatgtgtgtatacccaattgcccatattgttttctgagcttcatgtgccatcttctttgcagacccactcttttgtgcttgtcatgtctgaggaggaaagtcgctatcttgcatacttggaagatatgtacgaagataagaaggggcagaagaaggttaaagtgcgatggtttcatcaaaaccaggaatttgcttgcgctatacctcctccccctcctcatccttgcgaagttttcatcactccttattctcaagtaatcagtgtggagtgtgtcgatgatattgcaactgtgttaactcctgagcactatgaaaaatgcgtcaatacattgccaaattcttctatggtgggaatccgtttctgctttcgccaatacagtaaaaataagtttaaacgttttgacctgagatcattgcgtggatattttagtcaagctgttgttttgtccttaaaacttcccccagagcaagaaaaggatgatggttctgatatcataaaaacttttgagcaatggacacctgggaagacaaagtttcctaagcagtttgagaggctttactcaaaatgtttgggaactaaaatctgccgaggcccacaagaagactccatagcatcttatcagaaaccaagcagtaagcaatctcccagaaaacatctctcagtcaagttcatagggccccagaatcagcgtatgccaacctacaatgttggtgacagaatagaggtcttgtctcaggacagtgggattgtaggctgctggttcaggtgtacagttctcaagtcatgtactaatcataacaaattgaaggttcagtatgatgatctccagaatgctgatgatagtgggagattggaggtatgactactggtcttagtttgaaatttaagtggtatatgtatttttgaaaggcagaatatgccataatatttggtattttgttgttacttctattctttttcgtaatgccatgatttattttattaactctgtgtaaaatgtatgctttcataagaggatgagattattctatgcttctttgtaggagtgggtacctgtatcaacattggctcgtcctgataaactgggattgagatgcccagagcgacgcagagttaggccacgccctcaacaaaatagtttggctgacggaactaatcttttacctggagctgctgttgatgtatggcaatttagtggctggtgggaaggagttctagtcagtgcagacaacatttcagctgatagcctacaaatatattttccaggtaaatttcctttttgaatttttttttctggtcctttcttccaatgaaaaacaacaagttgttttgataaaatagatccttctgcagtccgtatctaattttgaccttccaagctaggggcaattgcaaatttgctgttggattgaatcgttattgcaagactgccactagaaaaatgcaaaaatgacacactgtcattcgagtggtatccctgcaaaattgaaaaaaccattggcaaatttgcaaatgccccagtggtattccttgcaagcgtatggaagctaaaccatgttccttatcatcaaacaacgatttcctatgttctttaatcctctatttcatctgcaacatgttgatatttctattgtttttacaggcgagaacttctttagtgtatgccagctaaagaatttaagaatttcgaaagattgggtcaagagccactgggttgatatagaaatgaaaccagatgtgttatcgaaaataccttcggttggtgttcaaacaaggcaacctgataatctgacatctgttgagaggccggactccagaaattctgcaatgtctgaccaagagcttgcagccatacaaacaaactctagtgaagataaacaaacaggagctgatcagccagcagaagttagtttgactgatatggcctctgcttttgcagaggaccagaaacaaacagttctaggaaagcgacctagggatgatgatgctgaacaacattgcaatggggaagtaggcatagatgttggcaaattgtgaagtttgggaagcgcaacctcattagacgtatgtacatagctatagatatggtaattggaccccagcagaggggttttttactaggttgctgatatcagtgagcatcgacatcttttttcatacacgtgttcccttgttttactgttagcttcccactttcaggctttctgtcaccagatacagaggttgcaaactaaatattacccttaccagtcatattgtatagcagtctgattgatcattgcttctcttatgttttcctccggagtctggactatagtttcagtttattctcaattgttaatatagtttaagttcatatgaataacattcttgtcctagcttgcttgtgctacaagagtatatctgcatttaagctgttgtgaagattcaacgactaacaatcacacattgtgattgggtatggtgtgcaattgcacatccatcaagtatgaactgcacttgcgcatgttgatctgaagaagttgcaaaatgagtggttttttctcctcctcaagttctgtatcatctatttgtggcatcctgggatctgaagtcaattctacctgatgccaatgccatcccatgatatcattatcttctgttatgttaggcctgatgtccctggcacgagcatgtcacattcatatgatgcattacctagttcctttacacatgcaaactctcatctgctatgattggctggtctaacaaatctccggtcccattatatcgcaaactttgaattctataaaactcaatctttgaagttgattttatggtttcatcgtggtttattttacaacattttgcttttgtatcattaaattttacctataaattactttttgtttgctaataataggcgatacgaataagcataaagataagtgaaatgatggggctgctcatctcactacatatggatgtatgtcaaagtttgttacatggtacatcgttacatgtcagctattatatctactaggtacatgttctatctgcagactgcagtggagaaggaaccagcagcagtctgaactttctgaacttgtgaagaatcggcgatgatctacagccggagccactgctcgccgttgatgaagctccggccgatgaacggccgcgcctcgtcgtaggtgagcgtccgcgaccacggcaccctctgcttcgtgctcgcccctggccctttgcagttgtactccccgaacagcaccgtcctgtcagaagattcagacacattctctgtcattttctgacggatatgatatggcagtatcgtctctaggatttcagaaaagaaaaggaactcatttggtaacagccttgtcacatgtggtaactgaattcccctatcaagactgtttggtgagcctgcaatgcaactcccaaccacttcctatgccatttgatcatcgaggatggtaagttggtaactagtaaaattcagctaaaatataatctcttcgatcaataatattaatatgccatgtgaacctgacagagtagctgcaattataattgtaactgtaattttaatcaagagcagcaaattgagtgtgtgattaaatggcaggaaagttgatcactttgttcttgattgatcaccccagtcgctccatccctgggggacgatgatgccactgaggtcacagtaggagtacaccactctggagtacttgccccatgctcttcccaggtagagcatgccggagccggtgagccggcagccgacgaagctgaacccggactcctccgacggcgagctccgctgcgacgccgcgatcgcgccgtagctcgtcgccacggcgtgcagcgtgcaaccctgacaaaaagaaaaaacaaagttacaaaaattcagactgccaagaagctaattgtccattttaatcatggcatattactgcctccacgtgttacagttgtatattgatctaataataatatattgacgtgtaaggtttttgcatgttcgtgaaaaaaataaattgatcatggcaccacattgccatgtaatgtcactctcattaacactcactccggcatttttcattcagtgacagttgtgccgaaggtagaaagagaatgtgaccactaattctgaacaccgatttgtgtaagagcattggtggcattggtgcagggctaagtgcctaaccaccttatcccacttagctatatagctaggttaagcaaggtgctaatctaggtgcctcaccagagtgagaagttcttttgctgtaaggtataaaatggaagagttggtgaatgcctgaattgtgagtttgtgacagctctgatcggaccaacaggagacacagcataaaaggtatagtactactagtctagaggacaactagagcaaagtgtgggggacagagtgtccaaagattttatcatgctatacataaacatattcttaaaaaatataaaatacttcctccatttttatttacgtgacattggttagttcaattttgatttgaccaatgtcaaatagaaaaaacatatgttgtattaaacatccaataagaacttagtgagattagggatttgcaactgctctctatctctttaaacgagtattcagcggtcatacttgttgtgtgtagtggcgtatgtgcgcgtcccttctaaatagaaatagaagtcggtttttcttataggattatttctcatggtaacagtacactactgatccttaccaagaattaccacaaaaatacctgtggttaatttgggcaacatcctgacttaattagacagtagtaaaaggcagcaacagtagtagtaacagcagctgtggtttaattttatttatttattagttacctggtacaaggaccttgcgttgccaaagatgaaatcgatggagccctggatgtcgcagttgtagaggtagtgcctcccgatgttgtcgaacagcgtgtcctgcgtccccagtatcctgcacttgtacagcaccgtcttgtcgccggacagcctcagcgccaccgcctgctgccccaccgcccccggcgccgccgccgccgccgagttctgcaccaccaccacgcttgttacatccaggaacacgtttcgccgccgccggcgagccggccggcgacgacgacgacgacgacgtgcggtgtgtgtatacctcgaaggtgatgtggctggcgcagaagtagtcggcctcgacggcgacggaggcggagtagaaggtgcccacctggtggcccgacgcgccgacgtcggacgcgcgcgagtgccacgtgatcaccgtgtggccggtgcccatgccgatcagcgacacgaacggcttcgtgatcggcaccgtcaccttctccctgcacggcacgccgtcgccggcgaggtcagcgccattgcagcttcaattccagtcttaaaaagcttcgcgagataggacgacattaactcgtccatggcggttacgagagggacaggtagtggggaggcgatcgatcggtcgaacacccacgtacctgtagacgcccggcctgacgacgatcttgaccctcctcgtgttgccggcggggaccatgtcgacggcgccctgcacggtgcgcgagtgccccgtcccgtccggcgacaccacgatcgtcgtccgctgctcgccgccgccgccgccgccgctcctcttgccgccgccaccgccggccgtgtcgtcccacgtgctgctccgcgccgccccggccggcatgctcaggtcctcccacgtgatgaacccgccatcacctcctactccggcgccgccgccgccagccaccgtcacggcgaacacgagcgccacaacgacgacgagcacgcccgtggcggccatgtccaactagtcgagagctaccgatctctagctagagctaattaaccacgcggattaatttggaacacacgagagatcaaccagcttagcttaatggagtatatatcgagctcgctgatttcacattacacacgccatggatgatgacgacgacgatgtgaagaagaagaagaagaagaagaagagaagaaaggatggaatgcaagaagacgttggaggcgtgaggaagtgatgatgccattaaatatggggagcgccacacacaaagccatgggtgttttggtgtgcccattggagatatatcaaagatttttaacattttagggcacaaaagtgggtgtttttgcttatggagttgtgtacacggtttcgtcgaccgcgaaaaaccatttttttttcatgagactaatttcgtccacgaaaaactttagcggtttgtcgctcgaaaagccgctttcatccaggttgcgtgatagtggggacctatttgtcagtgactgtttcgtgatggttctttaagagtggattgttggtagagctagcacgatggtgttgcattgcatggacttgttttgtgggaagggaactcataagggtgtgatagttattgcatagtattttttttgtgattaattaattaattaattagtatgtcatggcataatggttggtgctttgttttattgattacaagaattggaaaggttgttcatgagttgtgcacgagagagaccaagatttgtttggggaattttcgtggtggaatttggacaaggtaggctgatcaaacggggtagttagtaggttgttagtgcagaacggttgagtctagcatgcacgtcccactttctcaaccctttttacctagctcttgtgaattgtgatggtccatagttaactgcttttcttgacctaaatggagaaaaattagattggcaaaaatgttttctaaaacaaagcgctaatgcttcagatgagaagaatggcaagagatcaatggtcaatgccattttgtttcctattgctagttataatggattaggcgaagaagcattatgtaagtgcgagcctaacactgctgaaatctgtcaaaaggtcaatgcactagagctatttttgacgattaggtaatcttctgcagaaacctgcagttcaagtaaagccgtttactgtgcaatcaaatgaacatgggttgtgtaggatctatgcccaaattactcaaaaattcagcaaatcgacacgcttattcgtgacaactttcatcaaaatttcgtttacaaatgagcacggtgaaagcaatttttcagaccgcactttgtcgttcaactcaaaatcaaagtcagcctataaagtcagacaactttgtacaagtgtgaacttaaaacgagttcatgtccttggtcgtgccaaataaaaatggactgaaatagtccgtatttgtatgagggattgatgaattcaatataggctctagtactttcaggctcagccttgcaacaatgaaatggtcctgtggtttcagcccatggactggttactggttagagatttcgtaattgtcatgctgttctgtggaaatttccagaagcttctagaatcaccatatgcacaaacagatatggcatatatgtatgcatacaaaaacagtttttgttcatgggtgattaaaacatgggtacaagtgattcccgaattccaaatttattgtgattgatcttttcacaaatcacaatatgttcaggagattaccgaaatttggtatattctcatttgggttactctggatcccaaaaaactttacaaggaagtgggattttgctgtgtcatcagcatatgcttaagctttgcatactgcagagaagtggaatttttgcattggctaacaaaccaagtaaactgtgatcatatttagcaagtgatcttcaagtgggatattaaatttttacataatcctaaatacttattcaggttccaactaccatctccacttcaccaaatgttacacatttatttctgcaaaatagaaaagcatatattaggaacaaacaaattcagcatagacagcacaaccagattgctacagattggcagttttttggcaggggatgcacaaatgcaaggcagtatttatatactgaggcaagtaagcgattgagtaccatgatattatatcccactagcctaagcgattgagtgatatactgaggcaagtaaggtttggaaaccggagcggaatgtccctagcccactacaccagtacaacatggtactctagctaaagtctgcaatgatgaccatgtgcttcatccttcatgcgttaagtcgttatgccatagcccataatattgtttgttaacatctacgttgagacatccacagatagaaatagtacaaaattggaaatgctaacaaccaaaagatgccttggatgatgttatagtttattaaattgaaattaacatgtggcatcttgttttacatccctttccctcctaaataaacacaggcacgtcattagtcataggaactttctatacttgaaccaatagtcagtggagaaaatacagtaccaaccaagaagcatacaaatgggaactaggtatagtgaaaggcacacccttaacggcttaacagtaatgggatccatgttcgataagagaggcctcacagccctgattttgttgcatccacgcttgaaaaaattctcaaacttcagacttaggtattagaattccagaaatttagaaaatattgcgtaagctagcaactctagtctctaagtaacccttttttcattaagttacaaaagttggtaaccatttcatatctgataatcacacttatgaccagcataatcctcacagcgaagcaaacatagatatttgattatataaataatttaaaagaaggaaaatctatctccatgcagcatcaagatcagggataggatcaatttgttcatacctaatacttgttcgacgattgttcaagttcaggcctgtggactgacatgcgagcaatctcagatactgccgtctcactagcctgcgtatcatcaccagcaagctcctcatatgcagcctcgaatgcttcttgccagaaccgtggaagccgtacccgatcaacaccggtgcgtgtgtacacatcccacatccggcgcactagcttctctctgtcctccatctcctactcattatttaaaaattaggcaaaacttcagtacaagatttcattcacaactaaaaaatgcatatagttttgctcgtctatgttttagcttaggattctgctggtcatattgactagacaattatgcagatgaagcttgggaaattaaaccgttaacacaaatagcatatgttccagacaccaaaatcaagaaataaaggtgactgctttctcgtccatgtaatggaacaacttaaaataccatcagaccaaaaaaaaaaaatcatcatgtttccagcagagcgtgtacccttccttagcatttttttgataatgagcattttcttagcacagaactaaacctttcagaagagaaaatatgcaatgtatgtccaaatgaaactctataaacagagaaaattactagattgcagaatgcttagtctactatgtgaatttctaataaaataagctgtttgtgactttgctgaaacaagtacccatttcatccccactatgaaatctgaaatcaaccaataatgcatctcctttttcgcaatgtcagaccgttgggacttgggaaaaatgcatgtacacatcggacagttgaggaacaatggaagagattaggcaccgaccaccgagtggcggcaagatctggaaggaaggaagggaatgttggggtaggggagacatacgagggggtcgaggtcgtcgataagcgggtcggggaggtccccgaactcggcggcgaggtcgccggaggaccagcggatggtgacggaggcggcgaacatggaccagagcgcgaggagcgcgatggcggcgagcgcccacgccttgtaccgccccttcccgagcagcgccgcctccgccccgccggcggcggccgagatggggatggagatcttggtcgccggcggcggcgtggaggagtggtggtggtggtggtggtcggcgggagccttcatggccagcctcgagtatggcggtggcagtgggagctcagcagctgggtctgggactgggcgatgtgggcaattactctaccttttgatgagatgatttgagcaacgtgtttatttttctttgatagttgtagtgtactccctacgtccaataaaaaattaaaccagtattaaatataatatattctaatacaataaatttagaaatacatatgtctatatttttaggatgtgtcacacatcccgtactagattcctttttttttttacggagagagtatatggataagaggaccaagattttaatttttgatgttgctgccaatctatttttgttaatgatggctatgattattcactcaaggaaaagaaagagaagtgctaggagagaatgtgttaaatatggcccaatagttaaaagagataggatgagaattgagtatctagacacaaaaatttagaggaacgataccacttgtatcaacatacttagacttacgttattaccaccttttagaaaagactctttgttttggctatgtaagttctttagaaatcgtggtttgcttaacgataccatccacatatctattaagaaacaagtaactatgtttctaaatacagtaggggacagccttagaaatagattagttatcactaagtttgataggtctggagaaacagttagacgttatttcaacaaagtgtttcttgctgttggtgagctacaagatgaactaattaggcctcctttattggacaccccaactaaatttgccgggaatcctaggtggaatccttacttcaaggcgtgagattcatctatgtctcattttcaattttatatttaaataaactagtatgaatggtgaacagttaacagtgatggatagtatatcatcactaactgttgacaccaagaccctttactagaagtttttagcaactgctccctccgtcctaaaatataaagatttttatggttagacaccggtattaaaaaattatgtggaattaaatgagataagattatgattggttgagaagtaaaggtagatgagaagattgaattgtggagggttgtgattggtttagaagagaatgttgatgaaaaagttattgtattttgggacaaaccttaagcgctaaaagctgttatattttaagacgggaggagtacaattccttttaacatatgtagctctatagattctcagtaaaaaatatatgtatagttatataatccacgaaataaacaaaataaacaagaagtcaaaaactgaaaaatccaacctttgtaaattcttataagccaagcaattgttaataagaattttaagctaccgagagctttaagccttttaactcgaagttgccaaacaactgtaaatcttggctaaaccgctaacgcatgtgaaagtaggcctggtgatggtgggccttgggcttagcatgatctgtattaaactaattaaaactgctaaatcgcaaaaaaaaaatagaagttgctctaaaatatcaaataaatctatttttcgattttataataattaaaactcaactaatcatatgttaataccacattattttaaaacacttaattttcatctttatttacatgagtttcaaacaccacctacctatatacttaaataaacatctcaaacaaaattggtttaattaggagttaggtggccgtgagagcctgtataggtgtccaaacgggcggcacggcccggcccggcacgggcacgggtccggcacggcccgtttcggcacggcccgttaggcacggctgatgaaacgggccgtgccgtgccggcccacgtgccgagccgccggcccaagcacggcccgtggatggccgggccgtgcccgtgccggcacggcacgcctgcggcccacgggccgttcggggcacggcggcccgtgaaggcaggccggcagctgaggcctgaggcccagtgcacagtgtttttttaaaaaaaaagcaaaggaaatgtataaggaaaaaaaattaaaaatggaaataaaatgtttaaaaaaaagtaatgatttactaatgttaaaaaatgaaaaaatggtatttaaaaaatggaaataaaagtttttaaaaaaagtaatgatttgctaatgttaaaaaaaagaaaaaatggtattttttttgttgtgttgaaaaatttaaaaatatagattgtgattcattattttgaaataatttaaagataaatccacacttgcgaaaatattgcaaaagaatttgttaaaaatagtaatgacctttattgatgtttatatcattacaggatacaatgatacatgctgcctcgttaaaaaatttgtcatgtaaaaactcataggggaaaatgagaaaaccatgacaaagaaaagagtacagctcaaaggtcagaactacttctaacaaaattctactggggttggtctggatccaggtagagttgctcgaactgggcggccaattcttggttgtccgcagtgtattgggcatgttgtcgagcaagctcccagtctttaacgcttagtagcatttcgatgtggtcgctgcgcagagtcgtcctccggtcttcgatgattcgggcgcatagactgaaggccgattcggaggacaccgtcgacacgggcaccgtcaacacatcccgtgctagttttgaaagcacaggatatgttatcttgtggtcattccaccacccgaggacgttgaaatcttgtgcttcgtggtggatggcgtcgctgtccaaataaccggacaactcttcggccacaacatgcgaagaggcgtctccacttgtagccgacgaactgccaccaccttggattgaagacgatccaccccaaatcctaccccactgtatcttcttcttacctgtagtggggataggagggggtctctgctggcgaacttcctgaaactttacttcatatcttccaaaaacctcatataatttacgtctaacctcagtataaaaagaactataatctacacctatagtatctccaacaagtgataaaatagcagacaatccccttaatttacacctaggatctaaaacaaaagcaaaagcatacaacataggtatatttttccaatatttcaaatatttttgtttcatgtgaaagacaggttcagttagaacgtcatcattttcgtattctttaaataaattagcaatttcaagaaggttgtgcaaaattatattagcagttggataataaacttgtgataaagttagagtacaatcataaaaagtttctagaaattggtgaaatttttggacaattgcccaaacatgctcgttcagtactgaagacccgtcactgtttcttgggccaccacgtgactgaacaaaatcagaaagtaaactactataaggtaaaacaacttttaacattaaatatgttgcattccaccgatgctctgcatcggtggcaaacttacgagctttcacaccggccgcattgcaaaacctcttccatgcagcaatctgcgggttagaagcagttaaccacgcgattgcttgacgaacagcatcgatgtggtcacctaccctcttcatgccagtcttaacaatcaaattaattatatgacatgcacaacgctgatggagtagaaaagattgagcatacacacaaaataaaggttacaatatttcaatagccctagaattagcagatgcattatctagggtgacagcaaatattttatcagcaagattaaattcattaattacttccctaattctttcagctatgttttctcctgtatgtgagacatctattaacctaagccctaaaactctcttttgtaattgccaatcatcatcaacaaaatgaacaactacgctaagataatcctctctagctctactactccatatatctgaagtaacactaacagagaaagtacatgtactaaacagttccttaagtgcagttgcttccttgtgataaacattctctaaatctctagttgatgtttgcctactcacagctttaaacctagggttatgagattgctgaatgtaatgttcaaaagcaggggactccccaaagttcaggggtaaatcttgcctggcgattaaccggacaagagattcccgagcaaccatgggatcgtactcccaactgcgtaccgtaccgtctgggtttaccataagttgctgctgccggagttgtattccttgcttcttggcacacgactccgcatggcgcttgaggtgacctgtaccaccagaagaacgagcagataaaatttgcctacatattctacaacgggctttcgatacctcccttccgtcggggcatgtttcctttatctcgtcgaagttttgccacacaccggaggttctcgatctcttcgagccggtgtgtgtcgaaacacttccgctcgcggttccggaaaatccttccgaagctgtcgccgcctgaaccggtacctcctcaacgacagccgtatgaaccggtacctcctccacagatggtggagttggagccgatccggaggtatcgtcaaaccccgacatgtagttggggtcgaaatcacccaaggtgaacgacggcgactggtatggaaagttcggatccattctgaaaatttaaaccgacataaataaattttcgaatatttattgaattcacaaacacaatacaaataatacacaaatttgaatattacttacatctttccaaccgcgagctcttcaaacctctgcgatcaaactgttgaactacgaaactaattttgatttttgacaaaatttgagcaaattttgtcaaaatcaaaaaaaatgcacacttgagaacaaagagagcacttaaaacacttgagagcacaagatgaggagtgtgggatgaggagaaatggctggggttcatgccctatttatagggcgaaatttgagattttttggaattttttcgaaatttttatgaattttttagcctcccaacggttattttcaaatttgaacggtcaaatagccgttagtgccacgtggcgccttcccattcgaccgccgcccgccctgtcagtgcgccgctggcgctttcggcctgacgggccgctggcgaaacgggccgtgccgtgccgtgccgctacagtagccgtgccgtgccgtgccggcccgcgggctcggccagcggcccaagcacggcacggctactcgtgccgtgccggcacggcccgttactgtagcaggccgtgccgggccgtgcctgctacaggttcggccgtgccccgggccgcccgtttggcccggcccgtttggccacctctaagagcctgcaatgagatgggctctgtgcaaaagctgagttaggtggcccgatcccctttcttccccgcaatcaattgctcaccggcggagaggccgccgccgccgccgcgttcttcctcctcctgagccctaaaagggaatccagctcgaggtcgaaccaaccaaaagcttggcggcgtcgcggagacgcggccaacctgctccacatacaccgcccgtttcgccagtgtcttttctctttttactggcgcgcgcgcgggcgcgggcgcgggagaggcgagggagtggtggtggcgcgctgcagggggggctgcttggctgcggagtgcggacgacggctataaagagggcggaaagagagcgcccgatcccgctactcatcagctgccgtctcctctgtgtgtgtgctcgcgcgcgcgctccggttgctcctccttgggttcttgatttgctacacgcgtttgcttgctcaccacgtgtttgatggaatacctgtgaggtgaggtgaggtgaggtgctgtggctgtggtttggttgatgctaatccagctgttatttgtgctggattgattgcttatttgtgcttgttattactagtcgttgttagaaagcttctggctaaaaagtcgtcatttttttgcgaaagcttctttagcctacaacggcatagggatttcgatagctaaaaggtgtgcttatcttgttaatgaaagagaagtgcagatgctttatttgttgtcttgttgttccaaactctagaaaagtatgctctttttgcctttatcccacgagtagtagtatatcatcataaaacttaagggtccctttgaaacgcagaataggaaaaacacaggaataggaaaaacgtaggaattgaagtagcatgttttcctaatcctacaggaatggaaaacacaggaaatatgaagagggtccctttgatagcaccataggaaacaaacaaagcaaaggatagtttccaagaggttgaacctcttgcttattttcctatgaaattgagctataggaatgcaatcctaaggaaaatttcctatactttcctatgaatcaaagggtttcataggaaaaaatccttaggaaattaaatcctctaaaattcctatgacaatcctccaattcaaaggggccctaagtagatgggagaatggagatattcccgatatacacacgtggattggagcccaaccgtgcatagctagccatcatctttgtctcactttgttaggaaatttaagtgaaatcaattaaaatctaggtaaatccaaaggttacgcctttcagtttaactatcaaatactccttgataaaactttactaaatataaagagtttgatgttgtttccagagaacttatatcaaatatcaataatttttggtatccattcttctgaaattagtatttcccttccggaaaacatacttaaaatagcagatatttcctctatttcacaatgtaagtcattctagcatttcccacattcatattgatattaatgaatctagatagatatatatgtctagattcattaacatcaatataaatgtgggaaatgctagaatgacttacattgtgaaacggatggagtagcaatctatagcttctttgtgtatcctgttccaatggcaaacgcttgctcctttttcttgatcagagcaagcaagtctgaaaattttatgtcttttccagtttgcaggcctgatactgcctgttggtccctccccatcaaaatgcttggttcacttatctcttactcaccttcagtggtaagttttagattcatatgcagtgatatatagattaatctcttatgctgaacaagtacccaggtggaaacattattagtcatgtaaagataatcaaagatctgtgactttttttttgtgcttattgctgacattcgctgatattcgtatacttctgttttgcttttttcatttagaatccaaagacggagaaccctgatgagttaattgcgactggtgtccttgcgagtctgcaaaactttatccgcaaatgcatcgtagctgtcctctcatatggcccaatgcctaaacatattgcatttattatggacggtaaccgtagatatgctaaattcaggagtatccaggaaggctctggtcacaggatgggcttctctgctctcattgccagcctactctactgctatgaaatgggcgtgaagtatatcacagtgtatgcatttagcatcgataattttaagcgagatctgactgaggtgaaatccttgatggagttaatggaggaaaagatcaatgaactgctagaaaacagaaatgtcatcaacaaggttaactgtaagatcaacttctgggggaagttggacatgttgagcgaaccggtgagggtagcagctgagaaactgatggttagcactgctgaaaacaagggactggtcttctctgtttgcatgccatacaactccacttctgagattgtcattgcggtcaataaggtctgtgcagaaaggagggatatactgcagagggaggatgttgacagtgttgcgaataatggtgtgcattcagatatttcagtggcagatctggaccaccatatgtacagcgctggttgccccgatcctgatattgtgatccggacctcaggcgagactcgcctgagcaatttccttctgtggcagacgacgttcagtcatttgcagaatccagaccctctttggccggagttctctttcaagcaccttgtctgggccatactacagtaccaaagagttcacccttatattgagcaaagcagaaatctggctaagaagcagctgtaatcacatcctccctgggaggagatagaaaccatcatacaagatatctgtagttacacaataatctgtattctcctttgatatctcctagaatgtgaaatatacaaaaaaaagatagctattccattgtaggcaggccaaacatgtgtatgcttgagttggtccaaatgtgtgaaatgtaataacatttggtctaagcaaagtgccttattttccctgaagcaattttgttcgctgtgcagatgtgctactatatccttcttgttacagtatgcatgcaaacaaactgagaacattataaagcttaaagcatccgtaaattaccaagtgcttcttcacacctttgatttatgctttactcaatcaaacaaattggcacaaaaactgttcacattttatccgggaaacttttgtgcttctctgaatcaaaagaatttttgctccattgattcggaagattttgaactagcatatttcattctaaaaactccttatggaattgctgactttgctgtgttaaggatttatatgattctttaaagcaattttcttacatatatattttttttagaaaaaatcatgcttagcaattcgaaaagcgtgtgagcggaaaacgaaggagtagaagttagaaacatgcactctcttcataaaaaaaaaccctggctatgtatacagacatgcgtatcctaactatgtatctggacatatgtatgtatgtccatatacacagccatgtttttttttggacgaagggtagtacttcctccgtttcacaatgtgttattctaccatttcccacattcatattgatgttaatgaatctatatagttatatatgtctaaattcattaacatcaatataaatgtgggaaatgatagaatgacttacattgtgaaatggaggaagtagtatagaatatgcccttgttgtctatacaatatttttttgaactattttcatactaaaagaaacccatttggaatcaatgtgttcaaagggtggcaattccaaatggattttaaaaccatggatatacatattttgcaacttttgtccccattgatcggcataaggcataagccaataatacaccatataacatattagcgataataataatttgttgataaaactgttatatatgtgttcttatcaagttaaaaggtcatggtgaagaataaactttgatgaaaattttaaatcaagttttaaaattcaaattttagccatggttgatttcatttgggcaaacgatggaggcctctttgcttgttaagcttcaacatggagtcaaatactccattcgtttcacaatgtaagactttctagcattactcacatacatatagatgttaatgaaactaaacacatacatacgtctagattcattaacatctaaatgaatgtaggcaatgctagaaagtcttacattgtgaaacagaggaagtatgagataatattttgcatttatattggtgttgtttattgaaatttcatttgtattggacgttatgggtgaaatagccagtgcctgttgaaaagctctcatctagtctcatcgtttcacctacaactaattataagttgtgatgcttatcagcgactcaaaaaataatttatgagtaaaatttttatatatagttgaaaaataaactagataaaacattaaaatcaaatctcattaagatctaaaaattaaatttgggctatgactgataagtttaaatgtcaatgctgaaaaaaaatacaatgagaaaacactaaaatcaactcaaattaaaaattaaaatttaatttttggttgtagcagataagttgaagtggagctgatcgtctgcttgtcttatcagttgtagcaaaaatttgaatctaaaaacttaatttcaaagttgattttaaggttttctttgttgtagtttatttttcagcattagcttttaaattgataagaacacacatataatgttttgaatataaattttttgggttgcttagtttattttctactgtttattagtggtagatcaacaatcagagcaacaagaaactcacatgcaaaagcacggtttgcaatactattttccttcgatgacaatatcagaaattctgaatttgggatgaattcaccacctaacataaaattaggctctatatttttcctcctcctcccctccaattcggctgcacaacttgtttccatgacaaattagaatcaaatccagcacatataggcctttttctcttttcctgatgaaacaaatagaataactcaggtctattctgaaaaatggtggcgatccaaataggggggtttgtgctaaataacgacatgaaaaaaaaaggcaaattgggtgaccactgtcaatggtttacaaaaccgcgtggttatcgcacggttatcacctgcggtaacctttttagttttgaaaccatggtatatttcacggttttgaaaccacggtataccttgtgataaccatcaaaccgcaagatgatggtaacctatctaaaatggtttggtaaaccctgctcctgtccaatatacgaagtccaatatacgaaaggaaatggatcatctgacgtgaacttttccctgacatagtcactatcatgttggtccatggatgcatggtggagtctatacgtcagtgacaatgtttatctcactttacatccgaggatccgaatcctctatcaaatgtagagtattctaatttagcatgagcgagttggaatttgcttcatcagaagatccaggacaaattactctgtagactatctatctctctgtacacactcctgtatcggcctcatcatttcacttacgtatatatatgcatacccaaacagtttattattaactcgaaaaataatttacaaataaaactttttatatatatgtactcttgacgattcgatataaatgttgtaaaataaaataaagtgtaatgagaaaaccataaaattaacttaaaattaaaaaaaatattgacttataagtataagcatatgagaaacgaggagttcgtaagttcctgacaggagtaacttagtactatctccatattttaatgtatgacgccgttgactttttgtctaacgttctaacgtttgaccgtttatcttattaaaaaaatatgtaattatcatttattttattatgacttgattcatcatcaaatatcctttaagcatgacataaatatttttatatttgctcaaaaattttgaataaaacgaatggtcaaatgttggtcgaaaagtcaacggcgtcatacattaaaaatacggagtgagtagttcggagagctgagcagtgaggccagcagcatatgtgtttacccatgttctgcctccacctgcacacccactcctttgaacaaattcttatccaaacgtgtatttagaagttgggttttttagacagtgagggtatagtttttacttatgaataaaagccaggcttattaatccgtagacaagcacatccttaacaagtactagtatttattcgtctgctagaatgcattaaggggatattggtggtgatacctaagagtgccacgactaagcataggtaaattatagtatgaagtacgagaaaaatattggtcaaaagtgttactccatacaatactttactctaaaattaaggtagaatctaaagttaaaaagtgtggtataacgtaaatgtggtaacgaaggtggaatctaaagttaagaaaatgtgttataacgtaaatgtggtaacgaagtaaagacatgcttctaaaaaagaaagtaaagaacaatggtacgagtgcacgacgactaaagtgtgacgtatcaaagcaaaggaacggaccaaaaatacactgaatcttaacatactccctccgtccaaaaaaaaaagacaaaccttagtttttcgtgttcaacatttgattgttcctcttatatgaattttttataattagtattttcattgttgttagatgataaaacatgattaatatttaatgcgtgacttgtctttttaatttttttcataattttatcaaataagacggatggttaaacgttgaacacgaaaactcagatttgtttttttgggacggagggagtacaaatatacacgtgctaagagaacaaagtcagattttgccagccaggtgatggtgatatcggacatgtcactgtacatcagaaagctaaacagtggattggtgctggttgactcgcagcaggagcataattaaagcagtacggttattttgtgctttgtggcgacgaagaggcgtacgtggaatctcgcttgttggtgcttggtggcaccggtagaggagggcgaccgccgccgccgagatgttgggctcgtgggatttgagcccgagctggatgggccgttcaatctgccggagtgatgggctactgggctagtgcatcactgtttaaaactgatgaagataaaaatgaattcaacgtacgtaaaacgagaaagctactaggacataattaattaagttttaattattattaaacttaataaattaatatattcaatattttaaagcaatttctatataaaaagtagtcgtacggtttaaaaaacgtgctaacgaaaatcgagaaaaaaatatgtatctttatgagaaaaaaacatgtggtggacgctcacatgttcttttgatgtgaccaaatggcacatcactcacgtacaagagaaagtgtagaaaagagggtatgttgaaaatcaaatgtctaaacggagaaatctacaagtatataataatccttccattttatattataacattctttgaccttttctaattcaaacttttttatatttaatcaaattataggaaaataacaatatttacaacattacattagtttcattgaatctaacattgattatatttgagttaattttactttgggccaccttttattaccgatgtttcgctttggaccaccttaggactaatgttttcactttggaccggatatttttacctttatttcactttggaccaaccttactcttttattcatctacatccaacttgtaatatgttgaagaaatagtcttacatatagctgtggcagctcattgacgagtatgagacgatgtaatggagatcgtttatatgcttgagaagagagtcgggtggtccaaagtgaaacaaaaggcaggtttacccagtccaaagtgaaaatattgcttaaagggtggtccaaagtgaaacatcggtaacaaaaggtagcccgaagagaagtttactcattatattttaatagtattttcgttttgggttgaaaaggttgctaagtttctctataaatttggtaaaaatttaaataatattaaattttaaaaataaaatgtttcataatatgaaatgaagggaatatagaaaaagaggggacagtttatctgttagagtgctctctcctcattggttgtcatgagcgctaatcatccttgttagcactaacacacagcaaaataagcatggcatttagctgtccccgggtccattttccatttttaagaaaaaaaaagggaaattccatgggtcctgactagagagactatagagtcctgcgtgcatcgatctagggagtaaacgaacaacaatgtttcaaacgattctgtcgataaaattttgtcacatctacctaacacaagatatataaaaaaaatcacatacaaaatggtttgcaatggagcaattaataatgattttgttgtaaatgtatatgttatcaacatgtatgttatatcgtttgttaattaacatgcggtacccttctactccctctgttccacagtgtaagttattttagcatttcccacatttattttgatgttaatgaatctaaatagatatatatgtctagattcattagcatcaatatgaatgtaggaaatgatagaatgacttacattatcaaacggaggaagtagctcttttatcttttgtttccccctccacattacaaatatcctacgtgttgatctcccagacgatgacatcgtatcattattcttgtccctctgatgttattttcttattaacgatatccatggaacatatttttttccaactaacttaaaaatgttcatcattacgatagtccttaatttattcgaagataaacgtattagagtaaccggattacataatatgattatgaaccattgtaccacaatccgtgcatagcattgtagtggctattatataaggcagtgtacatagcagaagatgtattcataacatatccctaattgttgtggccgtttattttgcctactaatagtcatacattttgacgtgatcatgttttaccaacaataaactatgcccattatatagttttcaataaggagttcctattggaaaatttgtgtctcaccatggacagtacatataactacacgctgcccataccttctaactccactcgttagctcatcgattggactgaagtaacaagtacaccagtcataggagtgtagctagggttgaggaggaagagggagagggagagcacattgatgcctatataaaagatggcataacaattagactatgaatggatgacaaggtaatgtaatagtgtcactgtatgttagacaaaacttaatggattatgggtagacttgatggtgaagctaatatatcttagcaatcagactagagtagcgggtcgattatcgatcacacatcaatggtgactacatgaaggctctatgtgttataaccgtataagcacaatacccacaacgaggttggatacgtgggtggaggcgtaactatatgaagacaacactacgtaactcgtggcagatcagctcaaaaaggaggagaagccattggccaatgcgctagttatacattagccatatatctatatcgctaacactgttacaaattgtcttgaatctatatttattcatgtccaaattgctgcatgatagccaaactaaattgcatctttcagagccatcgtttcacttattcgcggaataagcgaaacaacatagcgatctaaaatcaaagattgaaaaataaacttcaataaaaaaccgtcaaaattagctccaaatttagggttgaaaactcaaattttggttgataattataaatataagtaaaaagatgaggcgctttttctctcaaagaacctttgccatgtctctctcatgcatattgagcccctgcacatcaacgtagtcatagcacaaattgctactactactacacaactttttcaagacatagcaagtgctcaataatatcctacatagaagcgctgaaatacttttgtatgtgtgttttaccttgctatacaacctatttatgtttcttgaatatttttacataaaacaattactactaacacacttgtaatatggacatgttactatgtagtgaagccacacgtaaacatgatgatggcataattttaattgataattaaacgtctaggtctttcaactagccgatctgggtttgaagtattacccattctaattatttgatattaagtcatttcctaatatttgtcttttaattaccaatcaatcaaacatgaagcagtagcgcagcgttaaacgtgatttgagcaatattgcaaaccaaacaagagtagtgcacgactccaacgcgaggccccgggtccaaatcaaacccgtgccagccgcctccggccccactgccagtctgcaccccaactgggtcgcgcctatctcctcacagatcatccgacggtcctcctctccccaccccaaaacggacggccacgaatccacaacaaccacaaaatcgacccacacccctccatcagcctccacgtgggtcccaccgcattccgtccccacattgtcagtcacccacccgctcgaacccacacgtgagaaagcgattccatccattaactaataatatctttgccccttaaaagaaaacgatacgaaaaaaaacccagagaaacaaaagaggaaaaaaaaagaagcgagaaaaaaaagagatgcttttggcatcatccagcccaccacgcctccacgccgcgctccccccctcctctcaaaagaaacacacgcctctcggatcccgccacgtcatcgatccgcacctcccgatccgagccctcccattggctgcgtatacaacccgcgatccccccacctctcccctgcaccgagtccacggtgcgccccgtgaaccgcctccaatggggaggtaaacacccttgccccgtatatatctctccgtttcaaatcctctcgaaaccaaacaccccggaaaaaaataatttattttttataggagaaaaaaagaggagaaaaaaaagggaagaaagagatggacgaggcgtgggagagggcggtggaggcggcgctgcaggccgccggagaggggagctcgtcgccggcgaggagcctgacgctggacggcgccgtgaagtgcctgcacggacggctgcccgcggcggagattctggagcggtaccagagcctggagcacctgtcgatcgccggcgtcggggtcgcgtcgcttgccgggttccctcggctgcggaacctgacgcgcctgacgctctccgacaaccgcatcgccggcggcctcgaccacctcgtcgccgccgggctggcctcgctccgcgacctcgacctcagcaacaatcgaatccagacgtcggcgacctctcgccgctcgccaacctccgcctcgtctcgctcgacctctacgagtgccccgtcacgcgggtcaaggattacagatccaaggtgttcggcatgatccggactctcaagtacctcgacaagatggacgccgcgagaacgagaggccggagtcggatgacgacgacgacgacggggatggcgacggcgacggcgaggaggaggaggacgacgacgatgacgaggatgaggatcctggcagcggcgaggtggccaacggaggcgtctcccacccgcgcggtggcgtggcgtcgcacccggtggaggtgaacggtgtgatcgatgtggacgaggacgagagcgacgccgacgaggtcgtcccgaacgggggagacgaacaccacgctaatgggtttcgggtcgcggccgttggggacgaggatgaatatgtggaggaggaagacgatgatgatgaggaagactatgaggaggaggatgatttgggggaggagatcgatgaggatggtgatgacgaagacgctgttgttgaggtgcatgatgtaccaagtagcagtgatgaggaggaagacggcatcgaggaagaggatgaggaggaggacgaggatgaagaggaggttgaggatgatggtgaggaggctgagccagagagcagcgggagggtcgctttggcggtgggggacgttggagaagagattgatgggcatgagcacggagagggggaagatgaggatgagaacggtgagattggagaggaagatgaggagagattggaggatgatagggtttatgaggaggggaatgatgacgacgaggaggatgtggatgatgaggtataacacattttgcattaatttctcgcaagcgtatcaagatctttgctattcgttgcaatgtttcgtagtaacggtagcatcggtagtcgtttatattcatgttctagtaaaattgatattaaccattctcagttgcaggttcttttttttttcaggggatttactagttcgtgcgttagttatgtgggtgtttgtttagtctacttattataagtgcaacattttttttgtcatgctgaagtagataacttcaattgttaggtttcctttccacaatcacctttttggtgatgtctttgctattcgttgcaatgtttcgtagtaacggtagcatcggtagtcgtttatattcatgttctagtaaaattgatattaaccattctcagttgcaggttcttttttttttcaggggatttactagttcgtgcgttagttatgtgggtgtttgtttagtctacttattataagtgcaacattttttttgtcatgctgaagtagataacttcaattgttaggtttcctttccacaatcacctttttggtgatgttttacactctgaaatagtgtcagggataatcttctttacctcagttacttagcagcagggataaaatcatttttacctcatttactgagtgtgatacataggagcagttcagagacttatgtgtgcgctctatcattattggctaatgtatccgtgtgatgattttatgagttgtgcattagtactttgtttgatatgctgcagctatgtgcacaatctttttgaaaattccagttagacccaaaaatgacaggaaatgtgagaaattagtgtttcagatatgattagatagatactgtatgacagcagagtttagtttcttcatgtagaagaaagagaaggttttagttatctcttttatgccctattttcggatataacaaaagattttgcatctgaagtttttaaatttggcaattgcttaaaagaaaaaaactgatacatctatgaaacctgggattttatatgttctttttaccttatttgatatccatatctatgtatgcttagtaaatcactagtgtttctactctaatttttattgatatatttctgttttagtagtgccagatgttttgtcatgcatttatttcttttggggctatcttaataatgcattatttcattatatatccctgactgtgtaagtgtgtacagacctgtagttcttctatccatgagaacatgctttagtttttgcctatgttatctggccagtagaagctcttctctcatttgtgaactgtgcaatttattcgctgctaaatatccttgtagatagattttctcctgtcatgcttgttatggcccattgttttgttcattgtgtaacgagaaggccttcctttctgaatttcatcttcttaaatccttcgagaggtggttgatactgcttttttactttcactattgttttagtgtgctattcttgcttataggacatttaatttattgttaagttgatcttttgatgtaaatattgctgatgtttactatggttttgaaaccatacatattttctttcagtggtagagacgcttattgtatttcagcaattgcatggttactttgcctatgtttttcattgctaatttattgctgcatgtatgttaaaactataaatcatggagtaatttgtttgactctttgggcatttcacttagtgagctgtttatgatacacatgacttttatgtttgaggtttttctaaaccctgttccagaatgtccttcctgttaatgactatctctaaaagcagaattgtggaaacacaggtctaatgagaattcatccaattttgcatttcctcaggatgaagacacagaatatcttgttcaaccaattgctcaacctcaggccatggcggttggaaacgactttgatgcagctgaggctgatgatgctgatgaagatagagatgaggttgatgacgatgatgatggtggtacggacctgccctcgtcctcgcagggcgctaagcggaagagagatgatgatccatcaggcagtggagatgacgacgaggacgatgatggtgtcgaggacctgaggcccttcaagcaccactgaccaagcagcaatgtacatggatcccttcctccccctcttctcagctagaaagaaccaagcaagcagcagcaggagcatcagcaaacagaaatggtgggtttccccctgttttttcttagcgtttttcttgtaaagactttggattgagagagagcttcttcatccagccttcctcttcaaacatcagattttaggagggaaaatggagatacctgtgtagcaacttagcaagtagccatggcagctcagtttcagtttcagtttcattgtctccctagcctgcaccatctcttttgattttcttttttccctccagaatttcaaatggtagttacaagccccaggtttccctccaccctttcaaatttctgttacattggcagtgtagccgatgtattgccaactctcaaaactgtagtttccctccaaaggaaaagcccgggaaatgccccccctttcaaatgccccctcaccctcagtagccgttgctccccctccaatttgaatttttatacttttgccctagttggttgaactgtgttgctgtgtgtggtaagagtttctcactggggagtgtggacgacggtgccaccaccccggggggggcttctgtacgcgggcgctgcgtgctttgagataggtgaaacggctgtggttgcagcgatgcggaggcgtccgcggccaaccaacgaaccagccacctctgtgggcgagagggcgggcaactgggctcccggtgctcgcagcagtaagagccatttctttaccaatttttggaccgagcagatgcagcagcacagcccg

SEQ ID NO: 7466 - DNA, 31038 bp, Oryza sativa
  unsure (1)..(31038): unsure at all n locations
tccccggcccaacggggaaattgccacaccctaatccggtttcatccaaatttatctcgagtcaatgggaatcatcgttgttgctgaatctgaacttggccttaggccttgtattagactagggccatctcggaagtgtctcccttcagctccacgaattaacctctataaatgtttatgtagaccctctaaaacaattggattttgtttagttgaattttgcaaagtgccattcatcatgtctctagttctcgctcaattagtcggcgactatgcattgagagccgccaatagttggtgtgttgatttgcctaatcgattagatttaccacttcaattacaactatttctttgtgcttaatcacctattcacaatatttagattacatcctatcttgttcttaaaatgttctctcgttagcattgcagggatcatcaaccacgcgtcacggttggtacgatatcgtttgtggggtagcgattacacgacgtcttgaacttgttctggtcgtagccacatcgcaaacgtcgcgcttgatcaaagagaaagctatcccctcaccagaagattgggccacgagagagagcgtcatcaggatcgctccttttccgccactactttctttttagtgtgaggattaagtgtctgtgctgcaagtatttacgctttatttatatttcgatatgtataaagatttatgatattattacctggcttgattcctggacaagaaattatacacaaaatagtctgaaaaatttggctaattttttggggcgtgacacccacaagagatctagcgaacgtcgcatgctcacatcccttgatagggaatgagtcgttgacacgtgggtcccacgtttcgtttcagcataaaaccacttacgaaatcttcaccgattttcgaagatgaagaaagttctcagtccggtttgttttgcggttgagggagaagtttcgattagcagaaacaaataaggaaggcagaatagacttgttccccttgattgctgcgagccgcggttccatacttccatccgtgagcctcagacatcgccgccgtgagccctagcctcgccgccgcggcgcgtcgatggacgtcggcgagggcaaggggttcggagccgtggttgatggcgtcttgccaccggagatgctgcacgaggtcttgcttcgcctccccgccaagcccgcgctccttcacctccgacccgctcttcgccgccgcgcacgccgcccgccaccccccttcacgccgccctcctcctcgccatcggcgtgcagagcttccccagattctgtgtcgatcttgtcgacctgtctggcgacattgtcaagcagctgatcccaaaaccccaatcccaagtggggagaggcatggttgtgagtgcgacctcagacgacctcgtcttcctcgacggtaaggagcatagcattcacctgctcgaccctaccaccggatccatctccgccttacccaccaccgaatccatgtccgctttaccccactatggcgacgtcagtacagactgctcaatgctagcttcttgcctggtttgcatttggccaggtagcatctcccacatgagagcgtaagctagttcagattgtgaagacattgagagatcgttacgtgtccgaggttatcaccgtcagccgccgcggcgtcggtggacagcagcggaggaaggtggagaatccacctgtacagcttgattgtttctgcaccgatggagttgtgttcaaaggggctgcttacttcaacttcgatatcctccaatgttcgccctccgttctagaggcaggttgcctgccttccttcgacctcgcgatggagcagtggagtatgaccctctaggggccggcgaagagcattgttgaggaagccaatgacagacttagctatcatgaccttgactatcattttatgttggctggaattaaagacactttgtgtacagcgcattgggattatcatttttatgtggtggatctatggtttctaactgattctgaaaagggtacatggtccaaagagtacaggattaatgttgatccatctttctatgggattggagattgtgtgaaagtgcatccgttgcttgtgacggatgagggaaatgtagtactctggttgcagatgccatcggaagggatagtgcagatttataatccagtaactaacactttctgggatataactcaaacgagcatctataccggagtaggtgtgtacactggaagtttattatgtcgagggagtgtgtgacaaggtaaagattggtctcacatcatcatatagctcgtatccatggaattgtttggttatgtttgtgcgctttattggtttagccacatcaacttcatttggttatttatttttaaataacaagagcagttttattagttccgtttaaattttcatcgtcttagttgtttttatgatgctaaaaacttccgtaaggtcacaaaaatatgatgatctccaactccaattaggaaatggcctttgatgacctgtttcatcggaaataaaataaaatccatcattaatcataatgattcatattcattgccttagttgcttttatgatgcaaaaaacttccacaaggtcacgaaaatatgatgatctccaactgcaattagcaaatggacctatataggttgatggtctttttcagaaataaaatgaattcagtcagtaattaaacacttgatcatctattcattgagatgtattataattatgaattgctggcaagaggcaattcttgctgaagttgtcgcttaaggaggattgagccgagcgaacatatttcttctccatgcgttgattagaaagcataataacccgggtctttgtgtaactatcgaggatgagtgggaggtgtggagggtcgcgggtctgttgcggcctcttggttgattgttgattgttgcttgctgtatgttcttagcagtgctgtgagttgagctgcctgtgctctagtgttggttgctcagctgtttgcttactgtaattttgttgttacagttgttaaaaccccttcttttcccttaataaacttcagctggctttccgctgccccgcgaaaaaaagcacaataatgggagggtcttttgagtctgttatgatctgtttacaacagaaactaatttgcatttgaaaaaaaaacatacataacatttgtatcagattttcatatattcagttaatatagaaaatggattgttctatggtcttatctcatgtagtgaccaagaaatgctggaagtcacaaattgcttcaccaaatagtgaacttatgcagaagtggataataatacagagatagttgaaatgatcagtcctagattaaattgtcaattgttttctcaatggcataatgctagggagaaaagttattggctcctagcagatagctgtgaggagaaatattcagtatcctctgtcgcaaaatatgggaaaatattttcccgcaaaatatagctacttttaactatgcatcttgacaagcgtgtcataaacatagtgtcaattaaggcttatgtcattatttggggaactgaaaagaacactgtttctttttggcaaaatttgttctatatctggtgatatcatacatcggaaaggtttttaacacatgcctgtttggtatcttgatgcgaaatgctttcagctacgtacattaattccataaaacttatccacgactatactagtgtctcatttatattcatttctttgtttgcaataaagatttgagacatgcacttgaagattgtgtctgccattgtattgggtccaatttgctgtatgcaattcatactatccatggttcattaatgtcaaatccgtactcaagaaagctctgaaggacttgtctcacttggacacatggacgaatttaaaattaattaaccttatgtatcttttggtaatgcagtcaataatgcttaagcacaaaaggcaaagcttgagataagatactatgttaacatgcaagttatccacagttccacaccacctgtttactgtgcctcttcgcttttttttttttttgtctttgcagatggttggatcagagattggtttctctattctgatatgatttatttcacccttcagcacttagtaatacttagggtgcactaactgcagttcacttcgcagtaggttgtcacctagagaagcactgaaattgatttagcccaacccttgctagttctctgttagaatgtctcttttttagagagtgtgagagagttttttttgtcagatttttcagatgaactctgctctgctctctctctctcttctctggagtaaaaaaataattcctccagtttactgaactgactgaagccacaacgaacggtcatgcaattgttaagaacaacaatggcagccaagttgttatcacaactcgaatcgaaattgtggcatctctagcagttgcagaccatgaaattctatggttctaccgaagcaggaaggctggactcttttctatgtaaaggctttctcaaaattggatgacagaaattgcccccttaatctgaagactgtcgctgaaagaatcacggagaaatgccaaggtttgccactggctcttgtagctatagggagccttttatcgtacaaagaaatggaggagcatgagaagggagttgttctataatcaacttaggtggcagctgagtaaacaatccagagctgagctgggacactagtgttctgaatctcagttacaatcaacctggttttacctcaagaattgctttctttactgcggcctgttccctgaagattatcggatcgacagaaaatggttaatcagattgtgaatagatgaagaaactgttcaggacagagaacctgagacaacaatggcagatgtagcagcattgtcacctgaaggaacttgctagtcgatcattgcttcaggttttggaaatgaatgaatatggaaggaaggccaaagagattccagaagcccagatgcatgatcttgttagagaaatagccctaaccatatccaagaaggaaaaaattgctaccatatgggactgtcctaactcggatggaattaccaatggatcacagtgtgcttcttacaaaaggattatggcaatttagtccaagcagcaaaatgttcatctcagcttcggtccatgttcgtgttttcagaggaaatatcatcgtcttggttcagactgctgcctgagaaattgcaatattcagaaagtgccaattgttttacttgcactacctaaacttcgggtacacaaaactgaaagacataccgagattgatagggaagcttagcaatctgcaaatgctttatctcaatggttctgtactggagttgccaagtgaaaccacaatgttaactaagcttcaccacctactcgtagatgggcggtttgggatgtcagcaagtagcaaaataagtcaactgcaacatctacagtctctgagaagcatagaagccaacagctacatggttaaaaacattggatgcttgacagggatgagatcatgaaggtactggagtcccacaacacagatctatgggcctcaatcagacatctctgaattcattgtccgttttcgcagaagatcgcgatcgatatattcttgatctatggacaacttgaaacctctatctcacctggagaagctaatgataagtggcaggatacataggcatctgggcttcaaaaccattacaggtaaaaatcaacccagtcaaccttttctctcttccttcttaatgaaacagcagagctcctgcttcagtttcaaaaagaatagggtatgttcactttgttgggaaaaacatgccaaattttaataatatagaattaaggttgggtggtgtttggtttgatgtcttaacaaattttactaatttttaagagtgggtaatttcaaaattaacaaaatttggtatcttaccaaaaattaataatgtcaaaatttgatacatttgacgttttgtagcattgaatgtttggtttgaagccttgctaaattttgatggagttttttttataaaaaaataccatttttatagggtggtccgcaatcatatagtaggccttggcttaacgtgagagttttctacttccgtgtcctctttcggcaacttgttggtgttaaggaattcgataagcggtgttcactagtcctgagtggtctcgatgtctgtgacgattttgtcaatctaagtagtagccctcgagccaacgtcggtggtgctatcgatgtcgtcgtctggcgaactcttgacggatggactggttaatacttaatactctaggaacatgctggattccaccggctttctcctggaagctcgtcgggtgaggttgtcgacattggtgttgtctttgcgatagacatggcgcacttcgagctcgtaatccttggacaattagggattagagcctccgtaatccttatgcacttggttggcgactttctgagtcacctttcacaatcagtcattttaccctgagtgttgtggctgcttgtagtccagctaggagtccttcgtactcagtagtgttgttggttgctcgaaaatctaattggtctacatgtaaccaagaattttgtaaaattttcttactgaattctagaagagttgaattttccaaaaataaaaatttgggtattttacaatgcggatgctgcagttgtcatcctcatccttgaggaagacatggtcgaaggcggagcacccgatgaacaccttgattgcctttccccaagaggatcagtttgacgatgttgtgggataggtcgacgagatcaagacatagttgttaacgaccaaatttggtaatctgagtatcgaagatgaagatcagatcgaagcggaatccaagtccaagatcgtttcggaaacagagtaaggatcggctgaagttcgaatcggctacgatcaggatcggtagagtccgagttggacagggttagccgatcaagccgaatccgacaatatgacacggcatgcgttgttgggttgggttaatgtgcttcatgatgattgccacgtatggatagagtcctgagaaggcaattgtatctattaattaggatatttcatgtaattcccttagagatatgtttggacaaaagtctgccgcaaagacttatggtatcttagagtttgttagagataaaagtcgtgtccgacacgggcatattttgtaatctcgggtataaatagaccccgagccccatgtaatcaatttaacacatgttcaatacaatctcggcgcatcgccacccttttactttcgtttcgtttcgacgagttcttgctttcgggttgagctgcatcggtttcgatcttcaactagaggtaaaacttgttatggcggcctgcgttctcaggattagtgcttccatctttatgatactctaatcttatttatgtaattcgtcgagttatcatatatctcatataatctccggcaatatcgttatctaacctccaatcggctaacatctgttactagaaggcagccgattaggttaagtagtgacgttgacatagattatataggatatccaccactctatgaaacatccaacggcttgattgtctagatattgtctttcttttcatacttatagttgtatcagttaagtttgaccttataagtcgtgattaggatctcaatctctagcctgcttttggttgccgattagggtagcatcggggtttcagccaatcttacctaatttaactatatttatctcatatgcttgattgacatgttaaatctgccctttatgttaagatcttgctgcatttaagtatattaggcttttgtttggtatattttacttgctttgatatcttaatatagagtggtatcggagtattacccaagacacgctagatctatctgatcggctatgctatgaacatatatagtcttattgttaatatatatttcgatctaagtgatttatactgtctcggcatggcgaccgatctatcccaatcacttgatttaagtatatatcgacataaaggctacatattgttaatatctacagccgatcgagtagatttagttctttcttacttatttatgattgccgatcgatctatatgtgacatcggcttaaaaataaatgatatgtcatcggccactagccgatcggctatcgtttatagatttaaccgcggtttctttgtctttatttcttgttgattgcatgatcaaatcaactggcatgctcacgaacctaaaggcaagcttttggacctgcactagagttaagcagatttctcaggccttgtgtttttacatcaacaatagtctaggaaaggtctgcacgtcgacagtgcaagaagcgatccagggtggcaagcgacgtgtgcggcgatgaagagcgtgtacaaggtgaagaatagccacgcacgggggccggggcgtggagatggcagatcgacttggtagggaggtgtagcaggacctcgagctacatgtctggaagcaagatgcagtccactgcggcggaggatgacgtcattgaggatgaggagttgagactagcggtgaaaacaggatgtgtactttggccagcccgcccgactgactatacataattcaacaattacagcttgcacctatttattccattctaaaactataaaatttgcttaaaacaaattttttaccatgtagaccacaaaagcatttataaactattatattgaagccacatcagagtgttctattatagctgcaagtagtcttggcatcgggggcatatcaagctcatgtagaccctcaatggcccggaccacttcacccattgtcggccgatcagactcaatttcttggatgcaccaacatgcaactttgcaaactctttcagcctcttccaaactgaagtcgtcatgtaatcgtggatccatcaaactatgcacatctcccacatgaagcttgttaattgctcgcacaggaaaataagcaccatgatagctgttgctagcagatactttaggtgaatttctccttcctgatatgatttccaatagtaccatgccaaagctgtaaacatcaacttttggtgtaatagcaactccgctaagccactctggggcaagataccctacagtacctctgaatgtagttagaactcggctaaaatcccttcctacaatcgctgccatcccaaaatctgcaatcttaggaacaaatgattcattcagaagtatgttttctggtttaatatcacagtgtatgatgcattcgcgacaactctggtgcaggtagcacaatcctctagcaactcctatagctatttgatacctggtgctccaatttagaacggtagcattgctctgaaatagatgggcgtcaagagacccatttaacatgcgttcatacacaagtagcctcttatcaccttcgcagcagaaaccaatcagtttgattaggttgatatgttgggtcattccaattgagctcacttctgccctgaattgcttctctccctgacgagcaccatcaagccttttcactgctatagcagtctggtctcccaacattcccttgaatacagaaccaaaaccacctcctcctagcttctctgagaaacatttagtagcacgaactaaaccggtgtatctaaaggctataattccaccatcattaccttgactgccatataatggcacaccacaccacttggatttgttaatccaaatcgttaacaaaagcatgagcattagtaatccaaaactaacgacaatgcttacaatggcaacaactcttggtctccgtttgttgttcttccttaaactttgtgaatctctggcggcgaggcgaaggtaaagaacattttcagaatgattatcaatgccatcattctgattcacacttcgcaattccccatgccagatagagcatctgttaccattataggtataagcagtgcaagcgcagtcatgaagacaagcttcttcgcaatcgctctgggtcgaagcatcttccatgctttgagggtacaagggcagtgtaacaggagctatggggtggaacatgtctgttgaacttgtgttgttttgtttaccagatgcacaatctaagggagtatctctgatgcaccctccaatcggatcaccggcatcccaatcctgcggtgacttgggagagaagctctccatacatccacagaatgggactgaattgccattgcagaccgtgaaaggtccacagacatcgtgcaggctgcatggatcagatggttctgcatatatggtttgccaagacattttgggttgtgaccaaacattcagcttaacctgaccagtgatgtctatggaaacgaatacagaagccgattcatcaagggaggtgtacgtgaagtactcctcctcattgttgtggacatatgcaggtttgagcaagcctttggtccgtggatccatgtctagcagctcattgagcaatggtacaagcgtatacgccaattgtccggatgaccaagaccaatacaccacgacgggaggtttgcgacgcctaaggcgcaacaccgtgtttgtgtccatctcaaggatgtaagagccgaggcccatatcaatgaggctcttcttggcaacgaaccgacggttcaaaccggtgatcttgttcctacctaacttagcacccggaagcccaacatctgcagggtagtcgaagctctgccacaacacaacattgctactagccatgaggagtaggtttccattgttcatgaggagagcactggtgtttgtgctggatgatcctgttgtcctattgacaatggtgtgagtgctggaccagattatggactctgaactggtgttgttgttgttcaagacgatggcaagattgccatctcttgagattttgagctgtgcttgcttcagctcagggccagtgatgggattctccctattagcaacccaagctgtagtaaaaacctggatcttgttgaaccatatgccaagataccagccaggcaatgtgttggtggtggtgttaatggacttactgatgcctgcagttggttgtggctggaagaagccgagcgcgaacttgccgttcctcgagacgagcttctcgccgacagaaagcgcttggcctaccatgagagtgtcgccatctgcaatggcggcggaacatggaggagtgtgcagggaggagaggagaagcccactgagtagtagcaagacatagagaggaggtggcatggctggagaagataggtgaataatggctgaattggagaagggaggagtatatgcttagtaacggtttagctatgtagtgctggtatatgcttttatgttttatttggacaagtaagaggaatgcatgaggaatgcatgtatatacagagaacacacgcgggggactgcatcagcctatccatctatcatggggaacacatgaggtttaatgtaattcttccatcctaaaatatatcagcctagtatagaataagatacattctaatactatgaatctggacaggggcctgtttaaattcgtattattagaatgcactccgttttgtattataagtcactttgaccttttttttctgatcaaactttatgaagttttactaagtttatagaaaaatagtaacattttaaacaccaaattagtttaattaaatctagcattgaatatatcttgataatatatttattttgtgttaaaaatgctactatatttttatatgaacttagtcaaacgtgaagaagtttgattaggaaaaaagtcaaaacaatttataatatgaaacataggacgtatctcatatgttgctatattttagaacgaatgtagcataatagatgctgcaggttggagtacatgcatgtttaatttaggcagctgacaggtagaacaggagctgcaaggaccttccttggtcatgtttgttcactctcatagattcagagtttcagacagcaacttggcctggtagaggtacaacggtactcgacacggcaacgtacgatgctgcgggtcatgttggttcacatgtctactaggtcctgcagatagaagagcagagcacattcaagtcggcatgatgattgtgaaaattaatttgttcaagaaactaatggttttatacgacttcgaatcaaaccatgacctctgtatttgtgtttccacataggacacatttgctgaattggctttatgtgtttagctcacatcaaaattggaagtttggttgaaattggaacgatgtgacgaaaatgttgaaagtttgtgtgtgtaggaaaattttgatgtgatagaaaagttgaaagtttgaagaaaaactttagaaataaacacggcatgaaggagagattctttgaaatcggaaagatgaaattagcagttcttgaaaagaagaatggatgagctctgaactctctgttcgtcacaactatgttttatgccgaccaacatcatcttgaaggcttttgcagctgcctgtctttgccttgctgatggcatccacaatgtggatgacaagtggatagtaagaccccttactacttactttaccattgtgaaggactggaggtgggtagtctaccctataattcaccaactcactcttacacctacattactcattcatcaaatctaacggacagtattcctcagtgcccgatctaacgatcatcgcgtccacctcagtagtgtactgccgaggctgctgtaatcgcgtgatttatttcccatcaacgcgcgcgcctcactcccgaaatacctgccaccatctcaatctgtcgatccccttcctcgaatttcggaatcctgaagcgcgagcagtcggcttccgcacctggtgccaacggcctcgtcgatcacctgatctcttcactcgtgcgcggtcgacgttctcgcacgcctgcgaggtcttctactggtgaggaagcgtccgtagaccgctcgctaccgagaggatccggctgctctgtcgccgagcatgcgtccccgggtccctctgccgccagagccagggccacatcccgttctagcggttggcgatccttgcctctttgccatggcatgagagagctctgcagcgatggccacggcatgagaggggccctaccgtttagctgctgccctcttcgctgggccgtccacagcttctcttcgcccattaattgtgacgctgcgcctgtttatctcctccctcttgatcactcacggtcgagaattaaggctgtggcgaagtgggcggtggataaccttggaaggctagcgaccggataatcctgatacattatgcatgtccttcccaaaggagctctgctgccaagcaccataatctctacaagagcacaggctcatatatgcagggaaatatcctttttttcagttacttcagaaaggttaacaggtttgtagcggatctatcgttgctttctgacttactgtttctctgaacactgaaactttggttcctctgctggatttcatgtagatgaacgtgcaggcaaggtattggatcaaccccaataagatggtactggagatcctgcatgctgaatccaggtccaagcaggaaatggctctgctgctttgccaaaacttcatcactatttaagctctccactctagatgttcagggttctgcagatatctaggctggaaagggaagaatatacgaagtagtacaatcctaacatgctacattgtgttaaaaacaaaaactacatctgtagaattgaattgtatagcagaatttacataaattatcatcttagttcaaactaaatattaatacgaagggatattgtccaaactgataaaatgttcattatagtaacgcctgattttcagtacgacttgcctgaacctcacactaactgatcaaaatgtgcattcatgactaaacaaagaagaggctgctctctgtttctcagtcattcaacaaagaggtcggctgatcaagagttgtcttattgcaaccagccaatcttatagatattctcttatcgttttatgcatatgtatggcacaaagttatttagtgaggtgaagtctgatcctaaaaattggggaagatagtttttagatgagttgatgtcactatatcatataatttgaaaccataattgaatgtaatattttaatctgtaattgtccctgtatgctctttttgtttgataatttgagaagtcagattccttgggtgtgcgcaaacgcgcctcataatctaatgttgagcagtattcatgttaatcaatatatagtaggctgcttgggctcatatgttcacacttttggctagcagctacaaggttgcttctatcactttgtccgctgtggataatatcacgagtaaagcagcaccatcaatgcccagtacaagcctacaaggtaattttatcgtcaatacaagtgtcagaaaccatataatgctcaccaatttgtggtttatccttttagacaaactgacgttttggtttcttaccgcataaatggagcagaccaatgtcctctgcaaattttattcataatctgcctattctatataattctatatccactgttcattcattcttcttactgcacaataatcattttgtacaaataaatatgtagtagctttttgatgttcctgcaatatttgaatagatgagtgtaaaggaatatgtttattctttgcagcaggcagctaaccactgttacatcttgattagtaaaaaaatattgctttatttgcatttcgcattttttgaaaccctaggagccatttattaggtttttgggcagcacatgcttttcatgttagatttcagagcaaaatagatggaatgctacaggttggaaaataaatatcaatgccctcagctaaggccaccaatgttggcatcaattgaagctgcctaacaaataagaaaaactttgtagtgcaaaccctatatataatataaacctgaaaactactgtagaattaaaaattgaatctttggttcacgtcatcttgagtaaacttttgctcccagttttaaccatgagcaaaggttttattaggattaaaagttttactcaggatgaactggatgcatctcagatgttcatttttggatcctacaatagtttcccgctttgcactacatataaggtttgtaatacatatttttgcaacaaataatgtgttgtatttcacaacagttatgtattggtctattgtgacatagttctagcaactttaatgatttcttctgctgcggtgtaacctgtaaatatttttcttcttctcagccaaatgttattccattagaggatttaatttgtttattcaaatatcttaaatacaattttttttcatcattactctgatacaaatgacgattattgatgaagcaatagaaaaacattaagtgatgtttgtttatgcctaaagaaattgctcccacttgattgagaattgaactacacaactaaaagctgcccaagtttgtgatagttataataataattaaattagcatggatgttgacatatataaattttttatgcatgcttactaaatatcgccgtagcgttagcacgggcctgctactagtagaggaggtaataactataccgggtaatagcactgctacctggtaataggcataaaaaatattaaactctctcctctctcactccctctcttttttctacccaatcattactttacacgtgggttatatcttactatccacacattatagatggccaaaaggcccgaggcccgatggcccggcccacggcacgacattttggcccggccgccgggctttgcctgggcccctccaccggcatgttgggccggtcggccaggcccgacaaaaaaataatagggagcaaaaatagacatattatatgtcacagttcaaagaatagggacgaaaaatagacttatattagctatatatatgtcagcccaatgaggagggaggaaaaatagacttattttagctatatactagaaaatgagcgtgccagttggcacgctagctaagttagttaatagcatgtgtgtatttcccttcagaaatcatacatttgaaaaggattgttgaaagtccattcccttttatttttatgtttgtgaacaaactaagatagaatagtaaaaccatctagattagtggtattatcatgctgaacagactatataacatcgagaaatgactaaagatgatgtacattaataaaatacatgttttactaatatccaacacaattctcatatagatgtaagtcattgagttcgtattagtaggaaatacatatccgaaataaatgtgtcttcgattactattttttatactaatttcatttagaaataaaggacgatgacatggtaaagacacttattttgatttcatatatccagatatactactatgtagagctcagctggtcaggttctctacctatacgagttaagttctaaacttagcatagacgcttgtatttacggctatttgttttttcaatggtaggaaacccaccattcttcatcactcctaagatatgcctgatggcccagtcttcgaaggtgcttgtagtgattgggtttgtatgtgtgcgtttacaggtgtgtatacacacgtgtatatgaacatctatatctactgtgtttcgcgataaaaaaaatagcagtatgattgttgttacttaccaatgttccaaaataaatgaattcctagcataaaaaagtataatgtgaggagaaaaaaacaaaaatactctgaattaataggaaagtagttataaacttctcggttcacatggaaatttcacttctattccttccgttctataaaaattcaggtattttcctcgtttcaagtaaaccttatctgaagatttttaattttcctaacgcaatccttgctgtcactatttgttttcatttgatttaactatttatttattttattctcttgaaacacatgatattaacatgaagtgacttttcctcattccgagtaatctgtagtaaattgcatttgttaaaagattattatgcaaaggctaaaaatcctattatttttttctccttttctttttattcatattattttattctaaactggcttagtaatatgtacctgtatgtgctagcttcacgctgcatgaggaccatgcgcagcagcgcaggtacattgtggagaaaggccgtgcggcgccaggcccaagctcgcatggccttgcgagatgcctggcccacgttgcaagcgtatatacgcgaacgttttcccgatctctcgcgaagtgaataccgtcactttgactcgtggcaaatttttggagggggtgtaaccaaatttttagggagccacgtggcccaataaaaagccagatcccctgatttcggtattaaagatatgccacagcctaaagaggagggaggaaaaatagacttatttttcaaaaggcacgatggaccacccgtgccttcgggccggcccggcacggcccgactgctggtgggccgtgcctgggccggtggtgcagcccatgggccagcacggcacggcccggtgtgttggtcgggctatgccggcccgacagattttggcccgagcacggccgtgtctgggccgtgccgggccgggccgcccgaatggccaactataccacacattggccgtgtttagttcccctccaccaacttcaaactttcaacttttcatcacatcaaaaactttcctacacacataaacttccaactttcttcaaacttcctaatttttccaccaactaaacacagccattgtgagaggtagaaacaactaaaacctaattatgtggatcccatcttactacccacttgataaaagaatcaatttacagtggtctcgaattccggtgaactaatctaacttaatttgaaatgcttaaaaacgacatctgaaaagtcagtatcaacgaatctgtatcgacgactgcggtgcaggggagccaggaggcagtgactactcgactgatggctgccgaaagtctttagtaatttttgccaactaaacaaggcattaactgaggccgagtttagttacaaactttttcttcaaactttcaatttttctatcacattaaaactttcctatacacaaacttttaacttttccgtcacatcatttcgggcttgtttggtttaataccctaccaatatattggtagtgccaaactctaggcaagctttggcactaccaatattttggtagggtagaattgtaaatgagtgtctttggattgatgccaattgagagccaaatttcaaattatggtgaagaacattctagaattgtgccaaattgagtataggcatttccaaatatttggctttaaaccaaatcatcacatttactatttaaactaccaaaacattggtatggcaacattttggtatcaaaccaaaacggcccttcaatttcaatcaaacttttaagtttgacatgaactaaacacagcctgacttggatctgaacttgacaaattttgtaccaatccgatgtagcagaccatggatgtagttcttttgtcttagcgtctgtccacctccaagcatttgcttcaatgcttagaaaattatgacagctcacctctatccttgattgcaaaatgtgctgcccttatgtagattgaaaaatttgaaactattccaaataacatccaaagtagtactagtaaagtagtaagagaaggtatttcatcgaactttcccaattcgcttcctccccatccaaagtagtagtgaagtagtaagatatgtataggagttttgccctctgatggcctctgcatgttactaatgaccaagtgtatggatagctgagatcattagttattattagttattgattggttgaattgaacgtgcttaggttgcactaactgtaatctttttacttatggcaataaaatgtttacctgattcatttacttgcgccgtgtttagttccaaaataattcttcaaactttcaacttttccatcacatcaaaactttcctacacacataaacttctaacttttctgtcacatcgttccaatttcaaccaaacttccaattttggcgtgaactaaacacacccataaacttccaacttttttcttcaaacttccgattttagttcacgccaaaattggaagttaagttgaaattagaacgatgtgacggaaaagttggaagtttgtgtgtgtagaaaagttttgatgtgatggaaaagttgaaagtttatagaaaaagtttggaactaaacttggcttacgtgtgtataaaagttttgatgtgatgaaaaagttgaaagtttaaagaaaaattgggaactaaacgtgggcttactgtgacacacttcttgctgaatgtcaggtgtatgttaaacatgtgttttagttgagattactattgattggttgaattgcgtgtagtctgaactaatggcaataaattagttacttgcttcatttgtttgtgccaaacgtgtactctgcatgagttggtttgagttcagactcttaagtctgaatttcagacaagttcagaattgagctggttgaatttcagagagtttagaattgagttggttgaatttcaaagaagttcaataaattagttacttgatatatttgtttatgccaaagtaataacaccagtagagttgattcggacaatgagggttttaatggtgtcaacagctggaattaccgaggaaggctctgtcgctgaaactgacgccggcgttttttttaaaaaaatattttgatgggtgatgccggtgattttggaacaacagcaactaatgtttctgttttatagagaatacacatgtgcatgcaccgtattgtttaacagctaggagcaatcttaaccggcattatatcaacaaggtttaggacgtgtttggtttaaaaccaatttttgctctaccaaatcttggtagtgccaaaatattggtaagttttgacactaccaaattgggttgtactgaatttgaactactgtgagtaaaatttggtagcaaaccatatatgcactttttattattgaagttaccaaaattttggtagtataataagttggtatcaaaccaaactagcccttaaactgcgtccaagcttttcaaacagctgtccttccattagctttgttaaaagttctgaaaaaactggtccaaggaagagatgaaggatctgaacttcagacttgataatttcatagcacctatccaagagaaattttaccgttcttgaggtaccacaacttcaatcccactgttaattccacaggggtgagatctgtatggggaaatttattgacacaaccaagtcctaatgactatagttggccaaatgggccgcccggcacggcacggcccaggtccggctgtgcttgggccgaggtgttgcacacacgtgctgcacacacggcctaggcacggcccaatacgactcgggccatgctggactggcccgaaggcatgatagcccatcgtgcttctccacagaataagtctatttttcatccctcaactatgtgggctatgttcatatggctagaaataaatctattttgtatttctctcctttttgggtgttgccttatatggttatttaagtctatttttcatccctgtactatttttcttcgatcgtgccatgccgggccaacccaccgtgccgagggtgcagcccaagcatggctcggctgtgaccgggccaaaatgacgtgccttgggcgggccgtgggcctcgggccatatggccatctatactaataatgacttaaccgtaacctgatctttatcctcatctttctctccagggttatcttcctttcacaacaacacggacacgcggtgatggaactccttgtgcgtggctcgctttaggctgtgttcggaactcaagttcccaacccctctcactcgtttttcgctcgcacgcttttcaaactgctaaacgatacgttttttataaaaagtttctatacaaaagttgcttagaaaattcaaattaatccatttttttaagaaatagctaatacttaattaatcacgtgctaatggaccgtttggtttttcgtgcatgggagatgggttcccaaccccctccaacgaacacagccttactcattccagcggcatggaaaaagaaggcaaagaagaagatggttctaacgtgtgggtcttgcttgtcattgagggaatagtgaggctatgagcttgagattggtccttctggaccagccttgctgtagcagaaaaagaagagaaatgagaaacaacagaatttacatatatattacgtactttttttattatattagtataatcacataaataaaaaatattcttaattgccaaaaaggtacaaaaattttcagaactcagaaaaacgcagccaaacctcacgaccaaatgtaatcttacatgaatacaaaggatggacatagctatcattatctgctctctacctcactttccgtgaggcaaatacgcatctaatggcatttaattcagctaagcatcatgcttacattaataaatgatgacactaaattccccttggactcccactctttggatgaactagtaaaagctaccaccggtgtcaggtgacaccgacgactttcggcaaaagttatgcttaaaatgcttattcatatattataacattatattctaaatataattagcatactataatatcgatagacgataccaaagatgattcgccaatgtatctagtacaacatatcttgagtatttttttataaaaaaataatgttacggcaccagtgcaccactgataaatctgtttgattattgaagaggttaattaaactaatatttaagtgatcatcatatgaatatccggataaaagaaagtgaaaatgaaatgaggtaattttttaatagaaaatggcagtactccgtccgtaaaaaaaaaatcaacgtaatattagatgagatattttctaatacaacaaataacacatcaaatctattacttaggttgattttttttttatggagtacagcctatctggagtagcaggctgaacggcatcgtaattgaaagcctcgtcagagcaggctggtcctcgaacccttccgaaccatccagaagaggagcctcccgacggctaggatgcatccacatccactcatcaacggctaagacgcgccctcctctctccgaatttttaccaacttttactgctcgcatcaaatggagcgcgggcgaggcgggtaaaaaaggaagcgaagaaatccgtggtatttatattttcgagacccaaaaagaaaaccacgaattcccaataaagaaataggcaaaattccccatctcctcgtctcctcccaactccaaaccctagctcccaccccctctcgccgtcgccgtcgcgtcccatggcgaagtcgcggccgcccaagcggatcctcgagtcctacaccatcaagggctccgacaaagtcatcaagcgtgaggctccccctcccacctccccaaccgctgctcccttcgatccggaatttctgggggtttttttgggggggattttttttgtgggggcgtgggtttcggtgggtcgcggtttgttgaggtctggaattctggggttttagctccggttagattgaatgtcgcggaaatgtttgctctgtttcgggggagcattttaatttccctgatgtttccgtgcgaaatgaaatggtgtttaggtctctggtttactgttgatgtaagctcgattcataatcagaaaaggaaaccatggtagggatatgtgagcatgttaacttaatctgttggagcgttaactctttgtggttttgattgttcatgggtttatctctcttttgcatgggttttaggacggttaatacagaaaaaaatatatgtgctattgagttatgttatgagtttaaactcatcttgattttctgttttagattatgtccagtggagcccctacatggttttgtctgggttgtgagctacagttttagcaccatgagctatgtcattttgctgatatagcgtttttaattgcaatttacgatcgccaatagtttggattcatatgttgctaatcccagttagcattatgatcattgtggtgcttatagtcgtgctgtaattcttgtagcttaacccctcgaaaaaaaaaatttcttgtagcttacgttgtgtttcagttctggttagtattagacatttgcatgaagaacaataacttctactcaatgtgtcttacctttgactttttatttaagaaaatctttatctcatggcttagaccttgtgttaagctaactaattgattctatccagttaggcatcttaagttttttttttgatagatagcgtgctttagccttaaatgaaaaacgattattttgcctagtttttctagtcttaactcttttttgtgctatttattcaaagttgatgcatgcgttctactaatcttagcttatgcaaaggtcagagatgccagattctgagatttctgacattgttctattggcacattgggattctttgggatggaaacctgcctagataaaccttaattaccggtatattacttgcaccaatctatgcaaacttaaatgcttcttctagcttgagcctccttttctatatttatggttaatatccagacgtgtgatagcaccgatgaaccttgatgcttcgattaccttgtgtgtgtgtgtgtgttttgagaacagattaccttgtgtttggtgaacttttgattaccttgatgaacagacgaatatttttcatggtttctaggagggtaatacatatatgtgctgttgagctatgttatgatcttaaatgcactttgatttcctgaattcctgttttagattatgggagttcagtctgtaagtagttttgtatctgtttgtgagctacaatttagcactactggcagaacccttctgctagatataatctagaatctgccttctgatcgtcattttgctaattagagatttttttaccatcttaatggctgtgttcatgtgttgcaaataccagctgtagttacaattgtttatggtgcttatagtcttgaccttctagcctatgttgcatctaagttctggttggttttgacatttgcatgaagactaatctctttctacacaatgtagctactgttggactttttactgaagaaaatgtttgcttaactgcttaaagttatgtaatcaatactatccagttaggcaccctaaagttttgttttggctagatagtgttctctagccttaaatgcaaaatcaatatgttgcatagtctttctagtctgaactccttttgtgctgtttgttcaaggttgattcatgccttctgctaatctaacttatattcaagttagaggtgtcagattctgaagttttgatatctgttaaattctttggtatggaaacctgcccagataaacatagttactacttacaccgatatctgtagacttaattggttcctttagtgtcagccctttgtttaattttataattcatatctagatgttgacagcatccatgaaccttgatgctttgattaccttgtgtttagtacactttgttttactgtaagcagattgcatttcctttgctctgagattatcactgtgatgccagtactatccaataccagctttacatcttgatgatgacccatgtcactattttttataagcataaaattatctcgatacctgtctgattctcttatatgtttcttgcagctggggactgtgtgctaatgagggcatctgatacatcaaagccaccctatgtggcaagagttgaggctattgaggctgcagggtcacgaggcacaaatgtgagagtacgggtgcggtggtactatcggccagaggagtccatgggtggaaggcgtccatttcatggtgccaaagaggtgttcctctcggatcactatgacgtacagagtgctgacaccatagagggaaagtgcaacgttcacagcttccgtagctacacaaagcttgattctgtcaatgctgaggacttcttctgtcgctttgagtacaaatcagccacaggaagcttcgtgcccgaccgcattgctgtgtaagaatttaatgcaacctccgctatgtgatagccctgaaaagaacttgtttcgtatttgcagttaattccgttgacatctgcacaatattgatctgttatgtcgatgacattttccatatttaaatatcatgttatctgttgattatgttttccagtcttctttagggatttcacacatgccttttatatttgatgtgaaatcccaaggtcaacaagttcgtaattctgatgagttgatatgtgatatatgtatccttatgacctgtctagattctataggcttcagtgcatcaccagttttatctttccaaagagtcacaataactatttccctgtgttgaagtggaatatgaagggatgcataaggttttgtgcctattttcagcttgccacatttgctgttattacttgcttttggagaaaatagaggcacagtaaaatgctcttacaaacttgagatgttcttttaccgaagagccactgcatgccatgatatattatgtggtatgtctatggtaggctcgtgtagtggtgtagcccatattgcacataagtaccaagacagctagaacccattgcttactacaccgccccaatttagtgcattctgcaccttgccccatttaaaactattcttttcgagtcacatgcatgatgcatcacggctggtagaaggcttatgaggggtcagcgtgccaggctcatggaagcagctcatgccgtaccttccatctagctgttggtgtttgagatgaggctataggttgtgctggccatagtactagattagtccggatcatgtagtgttagcgaggttagagataagattggttatgatttattacttctgcctgttagggctgtctccaatcgtatttgttagagacacgatctggacaacctggtgctctcatgtggtagggtgccagtgctgcagcctttttgtccatgaggggccctccttggactgcagccatagccgccacctagaagcttgaggatgagctgctcgaaaggaggggtgcaatgtcataatgtgagaggttatagaatgttctgaaggcagcagcagtagtgaatgtgcatggttctgtcggaagccgctgactggctaacgcatcaagagattaggagctggtgtgcacagtgcacgtgaatgtccaatgacatgttcaactcagataggtatcgaccaagtattggtcgattatacataaaaaaataattagttttcttctcaaatatgtggtcaacttttctctgatcgtatgcgacacggcccagcccacatagccaggatactcaaccctaatcccatccctgtgtgccctcaccaggctaatggaattttggaacatatgggcatgcattgagtattgactgaattctaggagctatggactgtctttgagataagttttccttttttacagcttgccatacattatttcagtgtcaaacaattgaaaataatgtatacataatatttttatttaaatatgtagtgtgtcaccatattgtcgtttccttttggtgggtgggtgggcgtctgtgttgtctgtgggtgttggggggggggggatggcgaattccctgtatcagtaccatgccatgtttacggtctgtatccatgcatcataggctgaagcaacagattgctgtcgtactgtcattaagattgttagctaacttttggataggcatatctcttatccttcctataagtttgacaaggatgtttggcgcatagctagcttatataaggacacgtgactgtgtcattagtattaagcaagaaataacaaaatggttccttaccttcgttcttcttatctccctgcccttgcgatgctgctgccaaccatcagcatggtcgtacctgttcggtagagcctgtggtgttgccaaatcctaagcatatatgacactttgtaatgctgtatgccactctgggtgtttccttatcatgttagttggtttcaattatttctttatttgaccatgattcctcattttacaaaatggatgtcttgtttattatggtagttctatccgaataacatgaataaagatttttggctgtagtggatgaactgcgaccatttttatttactgttgctacattctcaaccaaatatcacttatattgctatgctttgctggcctatgctatctattaaattgatttatgtattgcattaatatcatcattttatttgattttctcatccctttactaacaatatgacaggttctgcaagtgtgagatgccatacaatcctgatgaccttatgatccaatgtgaggaatgctctgattggtgagtaatgaaataattcatttaaattcatctttttcctgaactgcgctggtgtacattttatggttttatccctcttgccactgggtgaataggacaaccaattttttttacctattaatggatttgggtgtcttgcccttatcttattcttgcctattgggatgggcggcaactagttagccgtcagagaaataaatgcttttccattttttttacaccagaacaaatcactcattggctctatttattcacaatccccaaagagatttgtgcagatataaaggcataaccattgcataatgtctatactctaaattcctgagagcaaggctacaaagtgggcctctcaatatgcatggcatgtctttgttgttacatcgccatattaatttgttgaaacatgtgttttgggctgatgttttggccaataatgtaggtcgtgcttatatattgttaatgggaataagcactattacaattgccacactagactctcttaactctttccttgctgtggcaatgcagagacgaaggaaaaaatttccttgttcgcttgtcctaattctaatttaaaataaggaaacaattaatgcgctggtaaaaactatagagagatatatatcctagcaaacataaggaaacaagctaaaccccatatggcctactgagttattgttttttgctagctgtagaaccttggcggttatagtactctacacaccccaacccccacacgctctgaaagaaattcatgacctcaagctacatgtccatggaatccaccatcaaaagttaatagaattgcttttgagtaggcttcacatttcatatacacttttcagtacaatatatatatgaacaccaaaagatgaggaagggtttagcaagtgaagaaagaaatccactctactctaaactatttctctggagctcttaaccccctaatatatatatccagctccacctttcctagacctggagcccaacgaaacagtttcagctccacctaaaaggggagtggaatgggctggattgattccaaaaaatgaactagatgggtgaagcggggcttgggccgctccaccgctccactccagattccactaggagttggagccttgtcaaacaggcccatattcttttgttcattgcacatggcaaactattaaaactaggccacactactactcaacatcatttgtctattttgtttttcttgtacaagtagtaactttgaggtatgacagattacttcgtactattgtgttctataatattttaagatttttcctgactatttcacttggttggaaacacctaataccggtttaaggactgagatatgaacttctatgcaaatgattattacaactttgaaaatatttcttagcatagaatatgatagtatcaaccatcgtggtttgaacttaaaagtactagcaaaaagaagttgggaagaggatggttcactggagtaaaatggaccttttcctgagataataaaacatttaatttgttttgtcttctgcttttacttttgcatgaactttcttatcatttttttgtcacaacaaatatctgctgcttttgctttccaggtttcacccttcttgcattggaatgactattaaagatgcaaaaaaactagagcattttttctgccagagctgtactgcggaaaatggaaagatggctgagaattctcatgaagctacagcgcaatccgaagaaaaggtaaaatatgatatgttgggattactgaattatcattaatgatttgtttagctatcagtagtgcgatggtaatacatcaaggccagggtctcccgggttcaccatgtcgtcttaataacataggctacacataattttcaatgatattgaggcatgctgcttaataatattattataatatatgagatgtctgtcctgttgtatcgctactgtagttgacaaatttccaatacttaatgacacaaagcaccagttgggaaacagtaccaatttattcatatggcagtanaaagtctggtgtgattttacaactataaaggattggggaacttttgcatgttgattactgtggcaattgctgtaacctttnttttggatactgcacaatttgccctactttagcttgtacagtttcactcttatattatgcataatctaatcatacagtaaataaaacccatccaaggtacatgcactatttagttcttttttaatttggtaatcaccattctgcgattctgaaagacaaacatttcatttggactaatctcttcagcaggtggagtcaaaaagacggagaaggtgactgccccccagattcattgacgagatacacctggatgtacaaagccttctcaagttggtgtaatgctatttatttgtcatggcaagtgtgtgtgacccacgaccacgagagtcccttcctgtaatgtcagtcgcatggtgtacataaacttttcaacctgagactgttgtattaggagacgacacgacctgttgttgttgcatgatgtttttagcagcgtcagaattagcatggtagagtcgggtgatgaagcccctcgcgggcattaggactcccgtatggatgttatcactgatcatacattgatactacattggatgcagttgagtctgtcatctgcgtttgtctttggagaattcttgtaccatcaatccatcatgtgaactttgattcttttcgagacgcttcgtaattaatgcaggcatttctgtgtgggtagtcagctaacgggggcgagaaatggcttaagaagtatggttgaaattggaacgatgtgacggaaaagttaaaagtttgtgtgtgtaggtaagttttgatgtgatggaaaagttgaaagtttaaagaaaaagtttggaaataaactcagcccaaatgaaaatttgacatcaccagccaaattttgggtaaggtagtactaatgtacaatcctactaaattttgttagttttgaaattttccactcacaaaagtctactaaaatttgtgaggtattaaaccaaacatcacctaaccttacttttatcttattaaggggctatttacttcatttctgaccttatcagttttgtgttaccaaattttattaaggtaacaaaataaacatgttctcatctctaccttactaaaatttactgtaagttttcgaagtttcctctcacaaaaacactaccaaactttaaaaagattacaaattaaacatatccaatgctatcaaaatttggtagcatcaaaatataccaaatttttatagtgctaaataggggtggaaacgagccaagccgagccaagccgtgaaagcttggtcaagaacaggcttggcttggctcggcttgataaatgaaacgagcaaaaagtgcagctcggcttggctcatttaaaagctcgagccggctcgagccagcttgtgagggagcgctgagcggcactgaggagggaagcccgaggcagcgcagggagggaagcatcaccgcggtggctcggggagcgtctagccatcgaccatcgaccatcgagcgcc

SEQ ID NO: 7467 - DNA, 3086 bp, Oryza sativa
tcaaaggttgctaatttactatattttgggacggaagaagtaactatcagtactagttaaatattttggaataaaagccgtactcccttcatgccaaaatataagtacgtttggactctgatatggtctccaagatgctatttttggctaacaatatatataaaagtaagatgttttaaataaaaagatttgcatattatgatagattgtttaaaaataaatctagtaacatcaattttacatgattactcttttatttttgttgcaattaatagttacagttaaaaatttgatttatcaccatacttaaaaatgactatatttttaattttggagccgcgagatacagtatgacctgacctctgatgagagtggttgaggagggtgatgtcaaagcgggcgtcggtctgcgtggttgcgatttttctctcacctcacgttgtggaaaaggatggggatgggactatgggagaggttgggcggcggtcggcggagggtcctcgcgtgtgagtgccttcttcaccgaatgcttcgcattcgcatgcaccttttgtttcttcaacgttcaatggaggaggaaagcgtccccgctggcttttaattatttttctgcctgcgaagctgaccgttggtacatggtagtaatagtagcctccgtcccctactataagctattttaacataatattttacttatattgtttaactactcgtcttatttaaaaatattatgtaaatgtaaaaaacaaaaagttatgcttaaagtattttagataataaagtaattaaaaaaataatagttccattttttttaataaaacgaatggcaaacagtgcaagcaaaatgtcaaaatcccttatattagggatggagggagtagcgtttttacccgaccgggaaaagcctatccctttagttttcaattcttatttaggtcaatttttttaagtatagtacagtggacatacacaccactatacacaacatcacactctcacatattcacgaaaacgccctcaagcacatgtctaatgaaatggaaaccaactacgcatgtctgatctcattaaaatttcattaaatacctacttatgtgtgggtaaaaatggtggatttgaaccctcgcatacccacgactctattgttacaccatcagatatcggtgatgaataagtagataatttgtggtaattacttgaaattacaaacaactaaagcacagaaagttttgcctaaagaatattacgacgtttagaagttcaggaagagagcctgttaatctattcatcgtgaacaaagtcaacatcaagttgcttggtttccgtagtaaaatagcacatccgtagcgctactagtggtagcttactacgtttgggttacgtacgtggttatcacgttaagtttttattatctttcaatccaccgtgttcatgttttctatgtagtggttaatttgggatgactaacgaaaggcctcaagccattagccagcaggtaaacgtttgtactccatgtgaccatgtagtttatttaaccatataatacccctagttgtaactcgaaatatatccaaacgacatgttctgctttttacagtttcattgttttgcttatacatatgcttatctgtattgcttatcaataacttttaaaataatttataaggtattaacataaataaatttgcatactaaataaatattgtattgctctctccatcccaatttaatcattagaatactaatatgcattactcattatgtaaatgattagataccatactacgatgtcatttatttttacacaaataaatgagtatataccggttaaatgatgataaatttaaaaagatcacaaaaatcttttcaaattgggataaagaagaaaataaattcattgcatttgttcccgtcagctactagcgagacttcccggcacataaaacgaagcagcgttttagtacgtgattaattaagttttagctatttgttttaaaaattgattaatatgattctttttaagcaactttcgtatataaattttttttttataaaaaacacaccgtttagcagcttaaaaaacgtgcgcgtgaaaaacagacagaggagttggtaacttgtactaccgaatagagacttggtcctggtcggtgctccacccaaagatacagagcacctacacacagtgacacacccaccacacagagagagagagagagagagagggggttgtggtccttgtggacttgtggcgatgggtggtgggggtgctgggggtagtggatgggccgcggagagtcgtcgcgtgcgctttccgttgttcatttttgggttttgcgcttgacatccggctccggcgttgctgcaagaaaaactgaccgttggatggatggatggccgtggtccactggtcctcgatactgttgcctgttggtacggcaccacaccactctgtttttattagaggtaagtttgatagtacagcccactaccagctctaaatcagtcaatgtagtagctaattcatataatagttgcttgctatactattaatatctggttccacctgtcatacacacattacgtcttggagcctgtgctgcaactggctatagatctgtagcccgctgctcttctctctcttcatttatctctttaaaatatatttatagctggcttatagcctgctattatacctactcttactgcaccaaacccacaaggtcactgtgcctttcgcttcggtagcagtcaggtaggcgcctaggtgcataggcctctctctctctctctctatctctctcggtggtgttctgttcatcacaattcacagctcatggcttggccagtttggcctcatcactgcactactcaacgtaaaacaaaatgaagtactgtagaaccaaggcacagaagccacggtagatgtcagaacgcagtattacttgtttcatcaatcacttttaataatttatattttttttcttttttacttccaatcatcctctcatatctaaccataaatcatttaataagagacattataatatttttttcctcgaacctaatcaatactgcaggcctgt

SEQ ID NO: 7468 - DNA, 2546 bp, Oryza sativa
tcagttaaccatccaaaactattcatactcaaactcccttaaactattaatccatcatttcgcctataactagttataagccataacatttactagcaaacaaaagtaatacatagataaaattagaggttgttcatattatagccaaaataaaccttacaattttggcaagttgataatattattaaaattttgataggatttcttatatatttaccaaagtttggtaattaaatgtagacactttttttttaacaatcttgtcaaaaagaagttatggttaaaaataacatcactctgaacaacccctagtatacatatgttgtgaactatgatgaaaacatcaaaatcaactttaaaattaagattaaattccaattgtgattgatgctgataaattgaagagcaattttaacttcagaaaatattttaaaaataatttaggtttttcacatattttcaaccacttaatttggttaaaatttggccactcaaatcggtttttactttttaaaagtataaagttttattccaaaagtactctcattgcttcggtttaccaccttttcaaccacaaaaggtaaacggtaagaaaacactacaagcttgtttggcacagctccagctttctttttctgagttagagtccaatcaaacagtttcggatccatctaaaatgggaatagagctagatgaaacattatcacaaaataaaagaggtggagttgagtttaaacggctacacaactccactccaaacctaactcctagagctaaaattaagtgtccctttgaatcacacgatttaaaaaacaaaggtatagggaaacataggattcagacaggaatgcaagtctaaaataaaggattgcaaaacataggaaaaacataagaatgatcgtttgattgttggatcacagtaaaaatacatgaattagataaagagagatagtcttaaaagaaattttctaaaaggttagagtttttgctaagttttctccaaaatctatatgcaatgagcaaatttcatatgatttaaaaagtttcaatcctttaaatcaaataaccacgtagaaaaaaagtcatatatgagtatgaaattacagcgtagaatcctttgcttggggccctaagagtgacactctaccaaacaagtcctacttctatgctaagcgaaacgatatatttacgaacacaaaatataatttgtgaataaaacttttatatacgtgtagcgatctaaataaacactgaaaatttaaatttcaataaaaaaccctaaaatcaactttaaatttaacactgaaaatttaaatttgggctaataaacatatgcaaaagttaaagccgtaaattgccatgtctgttcatcttgcttatcagaacggaataatctttacacgcgtggcatatagtatgttcttgcaaatttgaacactcgaggccgcgaaagttccagaagaaacgcgttccactgcaacacgcggacgagcgtgacgacgtcagcgtcctcggaacgcaagggcactccggtaatttctccaccccttctcttggcctataaattgccacctgcgccgcggcgaaagaacgcaatctcatcgcaagaaaagaaaaaaaatcctattcaaatcgaaacccctctctttgatctcgtcgccgaggaattaggaggagagagagcaatggccgccgaggagggagtcgtgatcgcctgccacaacaaggacgagttcgacgcccagatgaccaaggccaaggaggccggcaaagtggtacgtttcctggcgcagaattttggggattttttttttggggttttgttcaccagggggtcgcggttcgtcttagatcgataggattttgaagaaatttaggatttaatttcttgctgagatttgtggcatgtggtgaaatcgcgaggagatcgattgtttctattttggcgattggggcgtagggttgtcgcggatttggggattgccgattctggtgggggagattttagtagtagattttcatgaatatattttaggatgatataatgaacaattcttttaaaagaaatctgttgcagtaattacagggcactctgtatttgacatgattaatcgttgatgtttggattttaccatgagatggggcgatttgatgcttacatctgcaagcgaattttcatccgctatctgtatagtatttgactccataggcgaaattgttagtgtttaaatttaccgtaagatgggatggtgtgatgtgatgtttaggtttgctccagttgtttcatgctgatgattctctaatttgagtataagctttgtttaaatatatagatatattcttaaatagtactataatttgacatgattcgccagagttgaaggaaatctggttctaatctagttcaattgttgttatggacaatagattgccacttcacatgtcttggcattgttatgatgtgatgctttgtacagataagcgtccgccctgtagtattggatttggtttcttgctgcgcggcataaacgaggattttgaccaag

SEQ ID NO: 7469 - DNA, 10129 bp, Oryza sativa
aagggaaattgttcagggggtaccatttttcagtcaagatgatgccacatcacacccgtgtggcatgccacatcagtgccacgaaggatcctagaggagctgtgatgaattggaacctagatgacacactttgacaacttctgggacttagatatgcattttgagagtttagggatctaaatgacacacctctataagtttaaggaccgcctgtgcactttactcttttaaatatataagcacccataccagattttgctcttgttcagcaaattagtttgcctttaatcatgaaatgtccatcttgatttgttttggaaaaactgatggtcagaaatcagttagtgtaacttgacttgtggaggaaacaagtatcatatgtaggtatcatccctttacaagacaccgacagctgacagcccaagttttttctctctctctaatagacagccctaatgatatttcttaccatgatcagggtagccctacagagtatttgacattgattatggcctgttacctgttattagacaccacatgtataatttggattcactgaatggtttgtgctacgtcttgttactgatgactgttaatcattatgttgctttttctacactgttagaaattttatgacatggcagttagcgtagtagacaagttggatcaatttattaatttaactttgcattagcagggtcattttcccttttgctaattattgttgccataccttctcactgtccaagtatcaacttttataggaagagcaagaagaagctctgaaacaactaaggaagaatctggttattagagcaaaacccatgccaagcttctatcaagagggtcccccacctaaggttgaacttaagaaggtgatgcaccgatctcctgctatatgtgcttgagctaaaatgattatttctgtttttcgatgtgtgctcattattgttcatgttgttgaatgcaattttaattcaagtgataatatctcaacccattactgtttagatcttttccctttaattgaactgattgcgtatctgtaaaaacatactcgactacatgcttgttcctattgttatctacataggccctgttcaactgcacttgtttcaactgtagtgcagccaatccaaacagtactatgtgtctgtagctgctgcagcaagggctgcattgcagtgcagccgaacagagccataattaaattgggaataccctgaatgaacaataagagtacgagagatgtcccaggcttttacattacttaaaagtagttaatgttttttctcgaacacgcagggaaaaagaatagctaatgtaaatgcagtatttatgttttcctgtatgataataatagaagtgcacaatgttgcatgaagcattggtatgcaagctgctggttcaactggcgaccattaacttgccaacttttagtatgtgctaaacttgccagcttttagcatgtgcaatgttggtattcactttgtcttttatttataggtgcctccaactcgtgccaaatcaccaaaattgacacggagaaagagctgcagcgatacccctcatacaccagagggtaaaaatggaagtgcagcatgttgccggttacatcgtcacagtattgggaactccaaagaagttaacagcaggacccaatgttctccgaagagtgctccaaagactggagtagccgcaaaacccagagcgaccaagggcgtcatgaagaatgtgggaaagccaggtgctgcgaatgttgctgtacaaacctaactcatgatccattcccattcccgtgcaatttttcgatttaatttatacctcacatcgccgatgacggcatcatgtcccgacaacagtgtgtttgttgctggattattttttttgcattctccttgtaagaaccttggtacagagaccatgtggtattccgtgttgtaaatttgtcgaggttttgtaagggggtaaccgagtcagtgctgtaagaactaatctggcagccgataggctgttggtgtgacattgttgttgatgtatggcggcgttcgcagatcctatggtattgtatttaagcatcaacttgttattgttgatattgttgcaaaatctgcgaagaatgtctgcatatttgaattcgggatcgccaaaattctgggaaaaagtacagagaagtactgaaatggcaaatacctccctcatgcattggatgtctctctctacgttctgctgctgccatttggttcaaccccattatcacatggaagtacaaaactttgaggagaaaataacttcgaaatgttggatgcacacttttctttgcaccaaaaataagttgtcaaaagacttgaggtccacatttgtacgatttggttgataagatctgactttgagcaaaatcgactctctgcaaaatctttcttgcagtgagccagctgaggaagccatgcgaaaggcaagcaatgcatgcacgccaccgaccggctatatctctatatatcagcatgtgcatattggttagtgtcatgactcatgagcagttgtcaacatgtcaggcgcttctagtacagcgacctgacgaaacaaaaaaaagttggaaagcggcaaaaacacacttttgagtcatcaagaattgtctttaaagccatttaatttccaaggagacttttgagccatatcatttttttaaaaaagaaacacgttataaaaacaggtgctcatatacgtgtgtacatacggggtacggcatctacccaaaaaagaatactagatttaaaccactcatgacggaggaagtaactagttgcatagctcaacttcacacttttgagccattttctagaacaacttatttgaaatgaagtttccttttctcttgaaaacgtttgcaaaagcctagagcccaacaattaactgaactaaacatgcagctctcatagaacaaggggtggcgatcgagctcagggttcactatctgggattgccgaatcatttcaggacaccaaaaaatttaaatttcggatgttgaaaaaaaatctgaagtttaaaatggtttactaaatctaaagaatgattttttttccatggaaaaacgtcctacatgaacccatcggtacatccaaaattgggaaggactggggaggattatgtttgtatggaaaaacatcctaaacgaatccaccaataaacttgaaatttcaaaaaattaggtcagaaattgtgaatttttacgtgttacccctgtttcaaattataaggcctataattttttacacgatttttaataacatattttgattattaatttatttcgtattatatcatcaacaattataaaactagtatcacatgaaagtattttaaaatacgaatctaataacaataatataacatacataatacttggtgtagatatcattaatgtaattattaataaaaactatcgagtttgatttttttcttaaaaataagaacatcctataatttgagacagggagtactaatcatttttcttggtaaatgtgtcaaattaggcctctaaaatcacaacccttttaattgaattctatgctccgattactgacaactcggacaacatacagctgacctttgaaaaagggtatattgtgatcgagttaggcccgtgccatgatgggtggttatccaatcatccaggttttgattcaggtcgtggcctgcaggacaatactatagttaagagagaattaggccctggtttgacatttctgatagccggcacacattttcttccatcggtttttcttttgccacgcgtacgtgcatgctgccggttaaaggcccgtttgcttctaagtttagggttccttttatttaataattttggttttttaatatataacatcattaactttttaagatatgtctcatcattcttttttattttataacttaatttatctttaaaacttctttaaaatgtttgcataaaagaattatataagacgcatagtcaaatgtaaatctaaaaatcaacgatgtcatatattaaacaatgcattggctccatctttttcattaatcattttgcaattcaccgagcctgttcaataatatggattttacagtaatttcatagaaaatagtttaacctgtatatgattgtagcattctagaggaagtaaaataacttggtggcactatgaggatgtgctacttcaaaaatcctctttccaagtcctataataatcaatggattgacgggctgatagtggtagagctatgaattttgtaaagccatgacaaaccttataacccaaattaactaagactatatatgttacaaatctttagttaatttgggttaagactatatatgttacaaagtaaccttataacctcattattttgtgtttctagctgggatgtcgctcggcaatagccattgcatgttcttccacctgtgggccgggccagctgattccacaagtttttgcacatagttatggtatatatataccattgatacttgaatcaaaattcatgaaattttaaaggttattgaggaattgactcccttgcatagggcgtgaaacattggcaatcatccattcagcccaaaaggtggatcctcctagtagatgatagtcgattcgactagtgttatcctagagattctaggatcgggagttagaaacagagtacctattagtaatgagtatgtgcataactttctagtatgatttcacagttaaacgttaggtactataaatcattaatatttgaattaaaaatcatgaaattttaaaggttattagggagttgaccatcttgcagggcttcggttctaactctgtcattgtcgctcgaccttaatggtttgagggcataaactcctagccatccatcccgcctagaaggtggatccgcccttagatgatgaaagtcgaatctaatcagtgtttatactgctaaagattctaggatctggggttagaaatagagtacgtgtattaaggaatatccgcatgcacatagctaacttttctaatatcaagccacaatcgtgcaacatacatacatgcacctaaaagttgacaaaaactcctaaccatccactgttgctaaattagatcgtgcagacaacattctccttcttttgacacatgagcagggaaaaggtcaccctgcgcacccatgcatttccatgttgcttcccctggaaaaatgcatgcacgtacggcagtctgaaaatgacaccaccgatcactgatgagtcgcacaccgtggtcgctctgtgaattgatgatatatatccattgacaacctcgtcaactctgctcgacagcttatctagcaaaatttcaatttgaaagttatttttttactgatcgatctaggtatttttacatcatatatagtctatatattttctaactcttgcttataaaatattaagggcccctttgaatcgtaggattgaaaaatcataggaatatgaaaaacacaggaagtattatgataggaatacaagtataaaacagagaattgtaaaacataggaaaaataaaggaatgaacatttgattggaccgcaggaatcagatgagagagatagactcaagtgaagttttacaagaggttagagtggatgttaaatttcctacgtttttcctctagaatcgtaagaataggaaagtttcctacgtttttccttttctcatttctacgaatcaaaggcatggataacataggatttcaattcctttatttttccttcatttatcctcgaattcaaagaacgcctatgtttatattgtgtttcttaaaaaacagtggaagtgcaaaatattgttttaaattatttttggatgcttcgtttatcctttttatgatttaccagccgtggctcaaccaatcagtcacttcgtctcccctttgcgacaaattattaacgttgtttctaagtcaaattccaacgcaaaacgtctctctctccccatactccagtaactccactagtgatgacactgcacacaggcgatcgacaatatgtattcatgcatgcatatgcatccgtgtgactataaatatgtgcagagagtgcaaggacctactgcaagattgggcaccgatagaattaagcatttgatccccagtcaaaaaaaataaaaaataagcatttgatcgatcgatcgatcatgaggtttaccgcagtggtagcagctattgttgccgtcattcttctcgtcttcctggtctccggcggcatggcggcgcggccgatggtcaatatggagaagaccacggccgtgccggttgtgaggaaaagtggtgtggtggtagagtcgtggacgatggagagctcgtcgctgccgtccggctgcaccaacgggaatggcgccggtggctactgccgccctcctgctcctgccggtcactaattaattaggttgccgtcaaccatcataccatatggttctatataaggtttaccgatcacaaatttgatcatgcatatagttaagatttagcagatgaagcttgatcgtattcttatagcagtatataggatgaatgggaaataaaatgtatgaacatgattgtaaattcttggtacaccacgcctccagatatgtaaccccaattaaagattatatatttatatgatattgataatatttgttgttatctttatcctaaactagcatggtggcccgcgcagattgtgcggctagcatcattatattttctctcatataatagcatatatgttttctcattatattattcaaatatattaaaatgacaacataattttaaattttgcaataactttacaaaactactaatgtttaatattcatattatattttatatatgtgttagttattaattatttttaatattaaattttagttatttgtaaattatatatattcctatatggactccagactcgttttttaatatttctttttttttattccgaattttctgtaaattgtatttctatatagaccctatgctcttcttccaatattatttattttaatttctgaatttttattatttctaatggtatttctatgtggactctaaattcatctttcaatattctttaatttttaatttcgaatttcagttacttctaaattgtattcctatattgaccttaaactcttcttcccatgtttttcttaatttcgaatttcagttatttataaattgtatttttatacggactctaaactctacttttaattttattatatttattccaaattttagttagttttaaattcctatatggactctattctctacttctaatattccttaattttttaattccgaatttctattttttttcttaattgcatttctatatggactctatactctacttctaatattccttatttttaatttcaaatttctattatttcctaattgtatttctatatggactctatactctacttctaatattccttatttttaattccgaatttcagttatttcctaattgtatttctatattgactctatactctacttctaatattccttatttttaatttcgaatttcagttatttcataattgtatttctatattgactctatactccacttttaatattccttattttttaattccgaatttcaactatttctaaattatatttctatatggactctagtctcctcttctaatattccttattttttaattcgaatttcagctattttctaattgtatttctatatggactttgccttttctttttctccgattaatgtgagaatttctaaaccatgagagcgaacatggaggctaccttttctattcctttaataatataatagattatagtaatttttaactatatgtccgaacatactcttgttcagatagatacatagtcaaaaattgttatattctgatacacggacggagtatctggtaccatcatcggtaataagtattgggtgtttataagatttcaagtacaagattaatttgatcctaattttcattatatgatcgtcctggcggctgtacaagctgatcgagttctttgatctcaatggataatcaactaaccgtgcgtgtggtagttgcaattagttattggattctttgctatctgaactatgattaatgccgatgctgaaacagtagaaaaataataggaatgcatatataggccgcatataaccctcttaaaactttgatattttcctgacaaaattaaatgtttatatggtaaatagaggccgatacaggtttggtccaggcccaaaccagcccacggtatattgtgtgacatcccggcgcagggcttaatagaatactcatatcaacaagttaatctataaaagttgcgcacgaggcgggtagttacatattagatcaaggcatgcctctgcatggtgaaaataaatgcctctaaaggggtagcttaagacttggcgctgatgataattaattagatttattttttcacgaacgcgtaaaagattgctcgtaaatatatggtaagtagatttagatgtaactacaaggtgcctttgaaatttcaagggatttgacccatcaaaagccagataattataaatatttgatctgtagtcatcttagataaactaatctagttatgtgttggctaaaattgagacccccccctttttcacttaatttcggtcatttttatcctatttgattgcttcctctcctatatgtaaacatgcttatttctcctatctcttcttccaaatggataataaattatttttaatcctaattctcttatacatcgtgtattagaaaaatcacaatgaaaattacaatataattactctttaaatttgaaaaggcacaatataattataaatgcaagaatatatagtttatacaatataaaaaacaatttgattgttcttttgtgaaaatatgacgctataagtataactactctcccttttgagataacgtgactctacaacagacgagagaattattgccatctatatttggtgagtcccagccgtatctatagattcaatgaatatggccacatgcccacatatagctagcactaatatataccatatccagagacatttacagtatataccaggccccgggtcgcccgggccactaagatagactttatgctccttcggttaaaaaaattattttaacttttagacaagtttttatcatacttttagactttggccatcataataatttctcaaatgcttaatgtaaaaacaatgaagtgatatgcatagatatatcttgaaagatataatgatatcacagatttattagattttttactcttttttaaattattctaatagtattggtttcaaaagtcaagagaatattatcttataaatgtcaaatatttacaacatgaggaatagcattagttttcatcatggtagcaacaatgtgtcctaaagggactggcccaagccgtggcccattttggttttctcctgacccacaatgctaatcactctagaatgcagttattcactttttttcttaaggggctaataatactcatacttttccataattccattggtttgttttgtgctacaaattcaaaaagtaatagcacaaaacgccatgttagaactataactactactccatccgtttcatagtataaaacgctttgacttcttcactaatctaattttttaagtttaactaagaaaaacatagcaacaatttcaacaaacatactatagaagtattttcaatgtgggattcaataaaactaatttagtgctatagacgttgctaaatatttttataaattaatcaaacttaaagatgtttgcttgaaaaaatattttataatataaaacggagggagtacaaatctacgacgatgatcagaatatcagatcacactgtgcagtgtggccaaaatgtccatgggagaaaaaccagccactcctgggccgatagcccggcccatatctggtcaagcccaccaccagggcccacgggcccatcgtccctcctactcctccttcccctcgcgaaaaatatattttccttttccaccattcccaccgccgcttcgttcgccggcgatcgatgagcgcggcggagctgtgc

SEQ ID NO: 7470 - DNA, 29897 bp, Oryza sativa
atatatctcatataatctccggcaatatcgttatctaacctccaatcggctaacatctgttactagaaggcagccgattaggttaagtagtgacgttgacatagattatataggatatccaccactctatgaaacatccacgggcttgattgtctagatattgtctttcttttcatacttatagttgtatcagttaagtttgaccttataagtcgtgattaggatctcaatctctagcctgcttttggttgccgattagggtagcatcggggtttcagccaatcttacctaatttaactatatttatctcatatgcttgattgacatgttaaatctgccctttatgttaagatcttgctgcatttaagtatattaggcttttgtttggtatattttacttgctttgatatcttaatatagagtggtatcggagtattacccaagacacgctagatctatctgatcggctatgctatgaacatatatagtcttattgttaatatatatttcgatctaagtgatttatactgtctcggcatggcgaccgatctatcccaatcacttgatttaagtatatatcgacataaaggctacatattgttaatatctacagccgatcgagtagatttagttctttcttacttatttatgattgccgatcgatctatatgtgacatcggcttaaaaataaatgatatgtcatcggccactagccgatcggctatcgtttatagatttaaccgcggtttctttgtctttatttcatgttgattgcatgatcaaatcaactggcatgctcacgaacctaaaggccagcttttggacctgcactagagttaagcagatttctcaggccttgtgtttttacatcaacaatagtctaggaaaggtctgcacgtcgacagtgcaagaagcgatccagggtggcaagcgacgtgtgcggcgatgaagagcgtgtacaaggtgaagaatagccacgcacgggggccggggcgtggagatggcagatcgacttggtagggaggtgtagcaggacctcgagctacatgtctggaagcaagatgcagtccactgcggcggaggatgacgtcattgaggatgaggagttgagactagcggtgaaaacagatgtgtactttggccagcccgcccgactgactatacataattcaacaattacagcttgcacctatttattccattctaaaactataaaatttgcttaaaacaaattttttaccatgtagaccacaaaagcatttataaactattatattgaagccacatcagagtgttctattatagctgcaagtagtcttggcatcgggggcatatcaagctcatgtagaccctcaatggcccggaccacttcacccattgtcggccgatcagactcaatttcttggatgcaccaacatgcaactttgcaaactctttcagcctcttccaaactgaagtcgtcatgtaatcgtggatccatcaaactatgcacatctcccacatgaagcttgttaattgctcgcacaggaaaataagcaccatgatagctgttgctagcagatactttaggtgaatttctccttcctgatatgatttccaatagtaccatgccaaagctgtaaacatcaacttttggtgtaatagcaactccgctaagccactctggggcaagataccctacagtacctctgaatgtagttagaactcggctaaaatcccttcctacaatcgctgccatcccaaaatctgcaatcttaggaacaaatgattcattcagaagtatgttttctggtttaatatcacagtgtatgatgcattcgcgacaactctggtgcaggtagcacaatcctctagcaactcctatagctatttgatacctggtgctccaatttagaacggtagcattgctctgaaatagatgggcgtcaagagacccatttaacatgcgttcatacacaagtagcctcttatcaccttcgcagcagaaaccaatcagtttgattaggttgatatgttgggtcattccaattgagctcacttctgccctgaattgcttctctccctgacgagcaccatcaagccttttcactgctatagcagtctggtctcccaacattcccttgaatacagaaccaaaaccacctcctcctagcttctctgagaaacatttagtagcacgaactaaaccggtgtatctaaaggctataattccaccatcattaccttgactgccatataatggcacaccacaccacttggatttgttaatccaaatcgttaacaaaagcatgagcattagtaatccaaaactaacgacaatgcttacaatggcaacaactcttggtctccgtttgttgttcttccttaaactttgtgaatctctggcggcgaggcgaaggtaaagaacattttcagaatgattatcaatgccatcattctgattcacacttcgcaattccccatgccagatagagcatctgttaccattataggtataagcagtgcaagcgcagtcatgaagacaagcttcttcgcaatcgctctgggtcgaagcatcttccatgctttgagggtacaagggcagtgtaacaggagctatggggtggaacatgtctgttgaacttgtgttgttttgtttaccagatgcacaatctaagggagtatctctgatgcaccctccaatcggatcaccggcatcccaatcctgcggtgacttgggagagaagctctccatacatccacagaatgggactgaattgccattgcagaccgtgaaaggtccacagacatcgtgcaggctgcatggatcagatggttctgcatatatggtttgccaagacattttgggttgtgaccaaacattcagcttaacctgaccagtgatgtctatggaaacgaatacagaagccgattcatcaagggaggtgtacgtgaagtactcctcctcattgttgtggacatatgcaggtttgagcaagcctttggtccgtggatccatgtctagcagctcattgagcaatggtacaagcgtatacgccaattgtccggatgaccaagaccaatacaccacgacgggaggtttgcgacgcctaaggcgcaacaccgtgtttgtgtccatctcaaggatgtaagagccgaggcccatatcaatgaggctcttcttggcaacgaaccgacggttcaaaccggtgatcttgttcctacctaacttagcacccggaagcccaacatctgcagggtagtcgaagctctgccacaacacaacattgctactagccatgaggagtaggtttccattgttcatgaggagagcactggtgtttgtgctggatgatcctgttgtcctattgacaatggtgtgagtgctggaccagattatggactctgaactggtgttgttgttgttcaagacgatggcaagattgccatctcttgagattttgagctgtgcttgcttcagctcagggccagtgatgggattctccctattagcaacccaagctgtagtaaaaacctggatcttgttgaaccatatgccaagataccagccaggcaatgtgttggtggtggtgttaatggacttactgatgcctgcagttggttgtggctggaagaagccgagcgcgaacttgccgttcctcgagacgagcttctcgccgacagaaagcgcttggcctaccatgagagtgtcgccatctgcaatggcggcggaacatggaggagtgtgcagggaggagaggagaagcccactgagtagtagcaagacatagagaggaggtggcatggctggagaagataggtgaataatggctgaattggagaagggaggagtatatgcttagtaacggtttagctatgtagtgctggtatatgcttttatgttttatttggacaagtaagaggaatgcatgaggaatgcatgtatatacagagaacacacgcgggggactgcatcagcctatccatctatcatggggaacacatgaggtttaatgtaattcttccatcctaaaatatatcagcctagtatagaataagatacattctaatactatgaatctggacaggggcctgtttaaattcgtattattagaatgcactccgttttgtattataagtcactttgaccttttttttctgatcaaactttatgaagttttactaagtttatagaaaaatagtaacattttaaacaccaaattagtttaattaaatctagcattgaatatatcttgataatatatttattttgtgttaaaaatgctactatatttttatatgaacttagtcaaacgtgaagaagtttgattaggaaaaaagtcaaaacaatttataatatgaaacataggacgtatctcatatgttgctatattttagaacgaatgtagcataatagatgctgcaggttggagtacatgcatgtttaatttaggcagctgacaggtagaacaggagctgcaaggaccttccttggtcatgtttgttcactctcatagattcagagtttcagacagcaacttggcctggtagaggtacaacggtactcgacacggcaacgtacgatgctgcgggtcatgttggttcacatgtctactaggtcctgcagatagaagagcagagcacattcaagtcggcatgatgattgtgaaaattaatttgttcaagaaactaatggttttatacgacttcgaatcaaaccatgacctctgtatttgtgtttccacataggacacatttgctgaattggctttatgtgtttagctcacatcaaaattggaagtttggttgaaattggaacgatgtgacgaaaatgttgaaagtttgtgtgtgtaggaaaattttgatgtgatagaaaagttgaaagtttgaagaaaaactttagaaataaacacggcatgaaggagagattctttgaaatcggaaagatgaaattagcagttcttgaaaagaagaatggatgagctctgaactctctgttcgtcacaactatgttttatgccgaccaacatcatcttgaaggcttttgcagctgcctgtctttgccttgctgatggcatccacaatgtggatgacaagtggatagtaagaccccttactacttactttaccattgtgaaggactggaggtgggtagtctaccctataattcaccaactcactcttacacctacattactcattcatcaaatctaacggacagtattcctcagtgcccgatctaacgatcatcgcgtccacctcagtagtgtactgccgaggctgctgtaatcgcgtgatttatttcccatcaacgcgcgcgcctcactcccgaaatacctgccaccatctcaatctgtcgatccccttcctcgaatttcggaatcctgaagcgcgagcagtcggcttccgcacctggtgccaacggcctcgtcgatcacctgatctcttcactcgtgcgcggtcgacgttctcgcacgcctgcgaggtcttctactggtgaggaagcgtccgtagaccgctcgctaccgagaggatccggctgctctgtcgccgagcatgcgtccccgggtccctctgccgccagagccagggccacatcccgttctagcggttggcgatccttgcctctttgccatggcatgagagagctctgcagcgatggccacggcatgagaggggccctaccgtttagctgctgccctcttcgctgggccgtccacagcttctcttcgcccattaattgtgacgctgcgcctgtttatctcctccctcttgatcactcacggtcgagaattaaggctgtggcgaagtgggcggtggataaccttggaaggctagcgaccggataatcctgatacattatgcatgtccttcccaaaggagctctgctgccaagcaccataatctctacaagagcacaggctcatatatgcagggaaatatcctttttttcagttacttcagaaaggttaacaggtttgtagcggatctatcgttgctttctgacttactgtttctctgaacactgaaactttggttcctctgctggatttcatgtagatgaacgtgcaggcaaggtattggatcaaccccaataagatggtactggagatcctgcatgctgaatccaggtccaagcaggaaatggctctgctgctttgccaaaacttcatcactatttaagctctccactctagatgttcagggttctgcagatatctaggctggaaagggaagaatatacgaagtagtacaatcctaacatgctacattgtgttaaaaacaaaaactacatctgtagaattgaattgtatagcagaatttacataaattatcatcttagttcaaactaaatattaatacgaagggatattgtccaaactgataaaatgttcattatagtaacgcctgattttcagtacgacttgcctgaacctcacactaactgatcaaaatgtgcattcatgactaaacaaagaagaggctgctctctgtttctcagtcattcaacaaagaggtcggctgatcaagagttgtcttattgcaaccagccaatcttatagatattctcttatcgttttatgcatatgtatggcacaaagttatttagtgaggtgaagtctgatcctaaaaattggggaagatagtttttagatgagttgatgtcactatatcatataatttgaaaccataattgaatgtaatattttaatctgtaattgtccctgtatgctctttttgtttgataatttgagaagtcagattccttgggtgtgcgcaaacgcgcctcataatctaatgttgagcagtattcatgttaatcaatatatagtaggctgcttgggctcatatgttcacacttttggctagcagctacaaggttgcttctatcactttgtccgctgtggataatatcacgagtaaagcagcaccatcaatgcccagtacaagcctacaaggtaattttatcgtcaatacaagtgtcagaaaccatataatgctcaccaatttgtggtttatccttttagacaaactgacgttttggtttcttaccgcataaatggagcagaccaatgtcctctgcaaattttattcataatctgcctattctatataattctatatccactgttcattcattcttcttactgcacaataatcattttgtacaaataaatatgtagtagctttttgatgttcctgcaatatttgaatagatgagtgtaaaggaatatgtttattctttgcagcaggcagctaaccactgttacatcttgattagtaaaaaaatattgctttatttgcatttcgcattttttgaaaccctaggagccatttattaggtttttgggcagcacatgcttttcatgttagatttcagagcaaaatagatggaatgctacaggttggaaaataaatatcaatgccctcagctaaggccaccaatgttggcatcaattgaagctgcctaacaaataagaaaaactttgtagtgcaaaccctatatataatataaacctgaaaactactgtagaattaaaaattgaatctttggttcacgtcatcttgagtaaacttttgctcccagttttaaccatgagcaaaggttttattaggattaaaagttttactcaggatgaactggatgcatctcagatgttcatttttggatcctacaatagtttcccgctttgcactacatataaggtttgtaatacatatttttgcaacaaataatgtgttgtatttcacaacagttatgtattggtctattgtgacatagttctagcaactttaatgatttcttctgctgcggtgtaacctgtaaatatttttcttcttctcagccaaatgttattccattagaggatttaatttgtttattcaaatatcttaaatacaattttttttcatcattactctgatacaaatgacgattattgatgaagcaatagaaaaacattaagtgatgtttgtttatgcctaaagaaattgctcccacttgattgagaattgaactacacaactaaaagctgcccaagtttgtgatagttataataataattaaattagcatggatgttgacatatataaattttttatgcatgcttactaaatatcgccgtagcgttagcacgggcctgctactagtagaggaggtaataactataccgggtaatagcactgctacctggtaataggcataaaaaatattaaactctctcctctctcactccctctcttttttctacccaatcattactttacacgtgggttatatcttactatccacacattatagatggccaaaaggcccgaggcccgatggcccggcccacggcacgacattttggcccggccgccgggctttgcctgggcccctccaccggcatgttgggccggtcggccaggcccgacaaaaaaataatagggagcaaaaatagacatattatatgtcacagttcaaagaatagggacgaaaaatagacttatattagctatatatatgtcagcccaatgaggagggaggaaaaatagacttattttagctatatactagaaaatgagcgtgccagttggcacgctagctaagttagttaatagcatgtgtgtatttcccttcagaaatcatacatttgaaaaggattgttgaaagtccattcccttttatttttatgtttgtgaacaaactaagatagaatagtaaaaccatctagattagtggtattatcatgctgaacagactatataacatcgagaaatgactaaagatgatgtacattaataaaatacatgttttactaatatccaacacaattctcatatagatgtaagtcattgagttcgtattagtaggaaatacatatccgaaataaatgtgtcttcgattactattttttatactaatttcatttagaaataaaggacgatgacatggtaaagacacttattttgatttcatatatccagatatactactatgtagagctcagctggtcaggttctctacctatacgagttaagttctaaacttagcatagacgcttgtatttacggctatttgttttttcaatggtaggaaacccaccattcttcatcactcctaagatatgcctgatggcccagtcttcgaaggtgcttgtagtgattgggtttgtatgtgtgcgtttacaggtgtgtatacacacgtgtatatgaacatctatatctactgtgtttcgcgataaaaaaaatagcagtatgattgttgttacttaccaatgttccaaaataaatgaattcctagcataaaaaagtataatgtgaggagaaaaaaacaaaaatactctgaattaataggaaagtagttataaacttctcggttcacatggaaatttcacttctattccttccgttctataaaaattcaggtattttcctcgtttcaagtaaaccttatctgaagatttttaattttcctaacgcaatccttgctgtcactatttgttttcatttgatttaactatttatttattttattctcttgaaacacatgatattaacatgaagtgacttttcctcattccgagtaatctgtagtaaattgcatttgttaaaagattattatgcaaaggctaaaaatcctattatttttttctccttttctttttattcatattattttattctaaactggcttagtaatatgtacctgtatgtgctagcttcacgctgcatgaggaccatgcgcagcagcgcaggtacattgtggagaaaggccgtgcggcgccaggcccaagctcgcatggccttgcgagatgcctggcccacgttgcaagcgtatatacgcgaacgttttcccgatctctcgcgaagtgaataccgtcactttgactcgtggcaaatttttggagggggtgtaaccaaatttttagggagccacgtggcccaataaaaagccagatcccctgatttcggtattaaagatatgccacagcctaaagaggagggaggaaaaatagacttatttttcaaaaggcacgatggaccacccgtgccttcgggccggcccggcacggcccgactgctggtgggccgtgcctgggccggtggtgcagcccatgggccagcacggcacggcccggtgtgttggtcgggctatgccggcccgacagattttggcccgagcacggccgtgtctgggccgtgccgggccgggccgcccgaatggccaactataccacacattggccgtgtttagttcccctccaccaacttcaaactttcaacttttcatcacatcaaaaactttcctacacacataaacttccaactttcttcaaacttcctaatttttccaccaactaaacacagccattgtgagaggtagaaacaactaaaacctaattatgtggatcccatcttactacccacttgataaaagaatcaatttacagtggtctcgaattccggtgaactaatctaacttaatttgaaatgcttaaaaacgacatctgaaaagtcagtatcaacgaatctgtatcgacgactgcggtgcaggggagccaggaggcagtgactactcgactgatggctgccgaaagtctttagtaatttttgccaactaaacaaggcattaactgaggccgagtttagttacaaactttttcttcaaactttcaatttttctatcacattaaaactttcctatacacaaacttttaacttttccgtcacatcatttcgggcttgtttggtttaataccctaccaatatattggtagtgccaaactctaggcaagctttggcactaccaatattttggtagggtagaattgtaaatgagtgtctttggattgatgccaattgagagccaaatttcaaattatggtgaagaacattctagaattgtgccaaattgagtataggcatttccaaatatttggctttaaaccaaatcatcacatttactatttaaactaccaaaacattggtatggcaacattttggtatcaaaccaaaacggcccttcaatttcaatcaaacttttaagtttgacatgaactaaacacagcctgacttggatctgaacttgacaaattttgtaccaatccgatgtagcagaccatggatgtagttcttttgtcttagcgtctgtccacctccaagcatttgcttcaatgcttagaaaattatgacagctcacctctatccttgattgcaaaatgtgctgcccttatgtagattgaaaaatttgaaactattccaaataacatccaaagtagtactagtaaagtagtaagagaaggtatttcatcgaactttcccaattcgcttcctccccatccaaagtagtagtgaagtagtaagatatgtataggagttttgccctctgatggcctctgcatgttactaatgaccaagtgtatggatagctgagatcattagttattattagttattgattggttgaattgaacgtgcttaggttgcactaactgtaatctttttacttatggcaataaaatgtttacctgattcatttacttgcgccgtgtttagttccaaaataattcttcaaactttcaacttttccatcacatcaaaactttcctacacacataaacttctaacttttctgtcacatcgttccaatttcaaccaaacttccaattttggcgtgaactaaacacacccataaacttccaacttttttcttcaaacttccgattttagttcacgccaaaattggaagttaagttgaaattagaacgatgtgacggaaaagttggaagtttgtgtgtgtagaaaagttttgatgtgatggaaaagttgaaagtttatagaaaaagtttggaactaaacttggcttacgtgtgtataaaagttttgatgtgatgaaaaagttgaaagtttaaagaaaaattgggaactaaacgtgggcttactgtgacacacttcttgctgaatgtcaggtgtatgttaaacatgtgttttagttgagattactattgattggttgaattgcgtgtagtctgaactaatggcaataaattagttacttgcttcatttgtttgtgccaaacgtgtactctgcatgagttggtttgagttcagactcttaagtctgaatttcagacaagttcagaattgagctggttgaatttcagagagtttagaattgagttggttgaatttcaaagaagttcaataaattagttacttgatatatttgtttatgccaaagtaataacaccagtagagttgattcggacaatgagggttttaatggtgtcaacagctggaattaccgaggaaggctctgtcgctgaaactgacgccggcgttttttttaaaaaaatattttgatgggtgatgccggtgattttggaacaacagcaactaatgtttctgttttatagagaatacacatgtgcatgcaccgtattgtttaacagctaggagcaatcttaaccggcattatatcaacaaggtttaggacgtgtttggtttaaaaccaatttttgctctaccaaatcttggtagtgccaaaatattggtaagttttgacactaccaaattgggttgtactgaatttgaactactgtgagtaaaatttggtagcaaaccatatatgcactttttattattgaagttaccaaaattttggtagtataataagttggtatcaaaccaaactagcccttaaactgcgtccaagcttttcaaacagctgtccttccattagctttgttaaaagttctgaaaaaactggtccaaggaagagatgaaggatctgaacttcagacttgataatttcatagcacctatccaagagaaattttaccgttcttgaggtaccacaacttcaatcccactgttaattccacaggggtgagatctgtatggggaaatttattgacacaaccaagtcctaatgactatagttggccaaatgggccgcccggcacggcacggcccaggtccggctgtgcttgggccgaggtgttgcacacacgtgctgcacacacggcctaggcacggcccaatacgactcgggccatgctggactggcccgaaggcatgatagcccatcgtgcttctccacagaataagtctatttttcatccctcaactatgtgggctatgttcatatggctagaaataaatctattttgtatttctctcctttttgggtgttgccttatatggttatttaagtctatttttcatccctgtactatttttcttcgatcgtgccatgccgggccaacccaccgtgccgagggtgcagcccaagcatggctcggctgtgaccgggccaaaatgacgtgccttgggcgggccgtgggcctcgggccatatggccatctatactaataatgacttaaccgtaacctgatctttatcctcatctttctctccagggttatcttcctttcacaacaacacggacacgcggtgatggaactccttgtgcgtggctcgctttaggctgtgttcggaactcaagttcccaacccctctcactcgtttttcgctcgcacgcttttcaaactgctaaacgatacgttttttataaaaagtttctatacaaaagttgcttagaaaattcaaattaatccatttttttaagaaatagctaatacttaattaatcacgtgctaatggaccgtttggtttttcgtgcatgggagatgggttcccaaccccctccaacgaacacagccttactcattccagcggcatggaaaaagaaggcaaagaagaagatggttctaacgtgtgggtcttgcttgtcattgagggaatagtgaggctatgagcttgagattggtccttctggaccagccttgctgtagcagaaaaagaagagaaatgagaaacaacagaatttacatatatattacgtactttttttattatattagtataatcacataaataaaaaatattcttaattgccaaaaaggtacaaaaattttcagaactcagaaaaacgcagccaaacctcacgaccaaatgtaatcttacatgaatacaaaggatggacatagctatcattatctgctctctacctcactttccgtgaggcaaatacgcatctaatggcatttaattcagctaagcatcatgcttacattaataaatgatgacactaaattccccttggactcccactctttggatgaactagtaaaagctaccaccggtgtcaggtgacaccgacgactttcggcaaaagttatgcttaaaatgcttattcatatattataacattatattctaaatataattagcatactataatatcgatagacgataccaaagatgattcgccaatgtatctagtacaacatatcttgagtatttttttataaaaaaataatgttacggcaccagtgcaccactgataaatctgtttgattattgaagaggttaattaaactaatatttaagtgatcatcatatgaatatccggataaaagaaagtgaaaatgaaatgaggtaattttttaatagaaaatggcagtactccgtccgtaaaaaaaaaatcaacgtaatattagatgagatattttctaatacaacaaataacacatcaaatctattacttaggttgattttttttttatggagtacagcctatctggagtagcaggctgaacggcatcgtaattgaaagcctcgtcagagcaggctggtcctcgaacccttccgaaccatccagaagaggagcctcccgacggctaggatgcatccacatccactcatcaacggctaagacgcgccctcctctctccgaatttttaccaacttttactgctcgcatcaaatggagcgcgggcgaggcgggtaaaaaaggaagcgaagaaatccgtggtatttatattttcgagacccaaaaagaaaaccacgaattcccaataaagaaataggcaaaattccccatctcctcgtctcctcccaactccaaaccctagctcccaccccctctcgccgtcgccgtcgcgtcccatggcgaagtcgcggccgcccaagcggatcctcgagtcctacaccatcaagggctccgacaaagtcatcaagcgtgaggctccccctcccacctccccaaccggtgctcccttcgatccggaatttctgggggtttttttgggggggattttttttgtgggggcgtgggtttcggtgggtcgcggtttgttgaggtctggaattctggggttttagctccggttagattgaatgtcgcggaaatgtttgctctgtttcgggggagcattttaatttccctgatgtttccgtgcgaaatgaaatggtgtttaggtctctggtttactgttgatgtaagctcgattcataatcagaaaaggaaaccatggtagggatatgtgagcatgttaacttaatctgttggagcgttaactctttgtggttttgattgttcatgggtttatctctcttttgcatgggttttaggacggttaatacagaaaaaaatatatgtgctattgagttatgttatgagtttaaactcatcttgattttctgttttagattatgtccagtggagcccctacatggttttgtctgggttgtgagctacagttttagcaccatgagctatgtcattttgctgatatagcgtttttaattgcaatttacgatcgccaatagtttggattcatatgttgctaatcccagttagcattatgatcattgtggtgcttatagtcgtgctgtaattcttgtagcttaacccctcgaaaaaaaaaatttcttgtagcttacgttgtgtttcagttctggttagtattagacatttgcatgaagaacaataacttctactcaatgtgtcttacctttgactttttatttaagaaaatctttatctcatggcttagaccttgtgttaagctaactaattgattctatccagttaggcatcttaagttttttttttgatagatagcgtgctttagccttaaatgaaaaacgattattttgcctagtttttctagtcttaactcttttttgtgctatttattcaaagttgatgcatgcgttctactaatcttagcttatgcaaaggtcagagatgccagattctgagatttctgacattgttctattggcacattgggattctttgggatggaaacctgcctagataaaccttaattaccggtatattacttgcaccaatctatgcaaacttaaatgcttcttctagcttgagcctccttttctatatttatggttaatatccagacgtgtgatagcaccgatgaaccttgatgcttcgattaccttgtgtgtgtgtgtgtgttttgagaacagattaccttgtgtttggtgaacttttgattaccttgatgaacagacgaatatttttcatggtttctaggagggtaatacatatatgtgctgttgagctatgttatgatcttaaatgcactttgatttcctgaattcctgttttagattatgggagttcagtctgtaagtagttttgtatctgtttgtgagctacaatttagcactactggcagaacccttctgctagatataatctagaatctgccttctgatcgtcattttgctaattagagatttttttaccatcttaatggctgtgttcatgtgttgcaaataccagctgtagttacaattgtttatggtgcttatagtcttgaccttctagcctatgttgcatctaagttctggttggttttgacatttgcatgaagactaatctctttctacacaatgtagctactgttggactttttactgaagaaaatgtttgcttaactgcttaaagttatgtaatcaatactatccagttaggcaccctaaagttttgttttggctagatagtgttctctagccttaaatgcaaaatcaatatgttgcatagtctttctagtctgaactccttttgtgctgtttgttcaaggttgattcatgccttctgctaatctaacttatattcaagttagaggtgtcagattctgaagttttgatatctgttaaattctttggtatggaaacctgcccagataaacatagttactacttacaccgatatctgtagacttaattggttcctttagtgtcagccctttgtttaattttataattcatatctagatgttgacagcatccatgaaccttgatgctttgattaccttgtgtttagtacactttgttttactgtaagcagattgcatttcctttgctctgagattatcactgtgatgccagtactatccaataccagctttacatcttgatgatgacccatgtcactattttttataagcataaaattatctcgatacctgtctgattctcttatatgtttcttgcagctggggactgtgtgctaatgagggcatctgatacatcaaagccaccctatgtggcaagagttgaggctattgaggctgcagggtcacgaggcacaaatgtgagagtacgggtgcggtggtactatcggccagaggagtccatgggtggaaggcgtccatttcatggtgccaaagaggtgttcctctcggatcactatgacgtacagagtgctgacaccatagagggaaagtgcaacgttcacagcttccgtagctacacaaagcttgattctgtcaatgctgaggacttcttctgtcgctttgagtacaaatcagccacaggaagcttcgtgcccgaccgcattgctgtgtaagaatttaatgcaacctccgctatgtgatagccctgaaaagaacttgtttcgtatttgcagttaattccgttgacatctgcacaatattgatctgttatgtcgatgacattttccatatttaaatatcatgttatctgttgattatgttttccagtcttctttagggatttcacacatgccttttatatttgatgtgaaatcccaaggtcaacaagttcgtaattctgatgagttgatatgtgatatatgtatccttatgacctgtctagattctataggcttcagtgcatcaccagttttatctttccaaagagtcacaataactatttccctgtgttgaagtggaatatgaagggatgcataaggttttgtgcctattttcagcttgccacatttgctgttattacttgcttttggagaaaatagaggcacagtaaaatgctcttacaaacttgagatgttcttttaccgaagagccactgcatgccatgatatattatgtggtatgtctatggtaggctcgtgtagtggtgtagcccatattgcacataagtaccaagacagctagaacccattgcttactacaccgccccaatttagtgcattctgcaccttgccccatttaaaactattcttttcgagtcacatgcatgatgcatcacggctggtagaaggcttatgaggggtcagcgtgccaggctcatggaagcagctcatgccgtaccttccatctagctgttggtgtttgagatgaggctataggttgtgctggccatagtactagattagtccggatcatgtagtgttagcgaggttagagataagattggttatgatttattacttctgcctgttagggctgtctccaatcgtatttgttagagacacgatctggacaacctggtgctctcatgtggtagggtgccagtgctgcagcctttttgtccatgaggggccctccttggactgcagccatagccgccacctagaagcttgaggatgagctgctcgaaaggaggggtgcaatgtcataatgtgagaggttatagaatgttctgaaggcagcagcagtagtgaatgtgcatggttctgtcggaagccgctgactggctaacgcatcaagagattaggagctggtgtgcacagtgcacgtgaatgtccaatgacatgttcaactcagataggtatcgaccaagtattggtcgattatacataaaaaaataattagttttcttctcaaatatgtggtcaacttttctctgactcgtatgcgacacggcccagcccacatagccaggatactcaaccctaatcccatccctgtgtgccctcaccaggctaatggaattttggaacatatgggcatgcattgagtattgactgaattctaggagctatggactgtctttgagataagttttccttttttacagcttgccatacattatttcagtgtcaaacaattgaaaataatgtatacataatatttttatttaaatatgtagtgtgtcaccatattgtcgtttccttttggtgggtgggtgggcgttttgtgttgtctgtgggtgttggggggggggggatggcgaattccctgtatcagtaccatgccatgtttacggtctgtatccatgcatcataggctgaagcaacagattgctgtcgtactgtcattaagattgttagctaacttttggataggcatatctcttatccttcctataagtttgacaaggatgtttggcgcatagctagcttatataaggacacgtgactgtgtcattagtattaagcaagaaataacaaaatggttccttaccttcgttcttcttatctccctgcccttgcgatgctgctgccaaccatcagcatggtcgtacctgttcggtagagcctgtggtgttgccaaatcctaagcatatatgacactttgtaatgctgtatgccactctgggtgtttccttatcatgttagttggtttcaaatatttctttatttgaccatgaatcctcattttacaaaatggatgtcttgtttattatggtagttctatccgaataacatgaataaagatttttgcctgtagtggatgaactgcgaccatttttatttactgttgctacattctcaaccaaatatcacttatattgctatgctttgctggcctatgctatctattaaattgatttatgtattgcattaatatcatcattttatttgattttctcatccctttactaacaatatgacaggttctgcaagtgtgagatgccatacaatcctgatgaccttatgatccaatgtgaggaatgctctgattggtgagtaatgaaataattcatttaaattcatctttttcctgaactgcgctggtgtacattttatggttttatccctcttgccactgggtgaataggacaaccaattttttttacctattaatggatttgggtgtcttgcccttatcttattcttgcctattgggatgggcggcaactagttagccgtcagagaaataaatgcttttccattttttttacaccagaacaaatcactcattggctctatttattcacaatccccaaagagatttgtgcagatataaaggcataaccattgcataatgtctatactctaaattcctgagagcaaggctacaaagtgggcctctcaatatgcatggcatgtctttgttgttacatcgccatattaatttgttgaaacatgtgttttgggctgatgttttggccaataatgtaggtcgtgcttatatattgttaatgggaataagcactattacaattgccacactagactctcttaactctttccttgctgtggcaatgcagagacgaaggaaaaaatttccttgttcgcttgtcctaattctaatttaaaataaggaaacaattaatgcgctggtaaaaactatagagagatatatatcctagcaaacataaggaaacaagctaaaccccatatggcctactgagttattgttttttgctagctgtagaaccttggcggttatagtactctacacaccccaacccccacacgctctgaaagaaattcatgacctcaagctacatgtccatggaatccaccatcaaaagttaatagaattgcttttgagtaggcttcacatttcatatacacttttcagtacaatatatatatgaacaccaaaagatgaggaagggtttagcaagtgaagaaagaaatccactctactctaaactatttctctggagctcttaaccccctaatatatatatccagctccacctttcctagacctggagcccaacgaaacagtttcagctccacctaaaaggggagtggaatgggctggattgattccaaaaaatgaactagatgggtgaagcggggcttgggccgctccaccgctccactccagattccactaggagttggagccttgtcaaacaggcccatattcttttgttcattgcacatggcaaactattaaaactaggccacactactactcaacatcatttgtctattttgtttttcttgtacaagtagtaactttgaggtatgacagattacttcgtactattgtgttctataatattttaagatttttcctgactatttcacttggttggaaacacctaataccggtttaaggactgagatatgaacttctatgcaaatgattattacaactttgaaaatatttcttagcatagaatatgatagtatcaaccatcgtggtttgaacttaaaagtactagcaaaaagaagttgggaagaggatggttcactggagtaaaatggaccttttcctgagataataaaacatttaatttgttttgtcttctgcttttacttttgcatgaactttcttatcatttttttgtcacaacaaatatctgctgcttttgctttccaggtttcacccttcttgcattggaatgactattaaagatgcaaaaaaactagagcattttttctgccagagctgtactgcggaaaatggaaagatggctgagaattctcatgaagctacagcgcaatccgaagaaaaggtaaaatatgatatgttgggattactgaattatcattaatgatttgtttagctatcagtagtgcgatggtaatacatcaaggccagggtctcccgggttcaccatgtcgtcttaataacataggctacacataattttcaatgatattgaggcatgctgcttaataatattattataatatatgagatgtctgtcctgttgtatcgctactgtagttgaacaaatttccaatacttaatgacacaaagcaccagttgggaaacagtaccaatttattcatatggcagtaaaaagtctggtgtgattttacaactataaaggattggggaacttttgcatgttgattactgtggcaattgctgtaaccttttttttggatactgcacaatttgccctactttagcttgtacagtttcactcttatattatgcataatctaatcatacagtaaataaaacccatccaaggtacatgcactatttagttcttttttaatttggtaatcaccattctgcgattctgaaagacaaacatttcatttggactaatctcttcagcaggtggagtcaaaaagacggagaaggtgactgccccccagattcattgacgagatacacctggatgtacaaagccttctcaagttggtgtaatgctatttatttgtcatggcaagtgtgtgtgacccacgaccacgagagtcccttcctgtaatgtcagtcgcatggtgtacataaacttttcaacctgagactgttgtattaggagacgacacgacctgttgttgttgcatgatgtttttagcagcgtcagaattagcatggtagagtcgggtgatgaagcccctcgcgggcattaggactcccgtatggatgttatcactgatcatacattgatactacattggatgcagttgagtctgtcatctgcgtttgtctttggagaattcttgtaccatcaatccatcatgtgaactttgattcttttcgagacgcttcgtaattaatgcaggcatttctgtgtgggtagtcagctaacgggggcgagaaatggcttaagaagtatggttgaaattggaacgatgtgacggaaaagttaaaagtttgtgtgtgtaggtaagttttgatgtgatggaaaagttgaaagtttaaagaaaaagtttggaaataaactcagcccaaatgaaaatttgacatcaccagccaaattttgggtaaggtagtactaatgtacaatcctactaaattttgttagttttgaaattttccactcacaaaagtctactaaaatttgtgaggtattaaaccaaacatcacctaaccttacttttatcttattaaggggctatttacttcatttctgaccttatcagttttgtgttaccaaattttattaaggtaacaaaataaacatgttctcatctctaccttactaaaatttactgtaagttttcgaagtttcctctcacaaaaacactaccaaactttaaaaagattacaaattaaacatatccaatgctatcaaaatttggtagcatcaaaatataccaaatttttatagtgctaaataggggtggaaacgagccaagccgagccaagccgtgaaagcttggtcaagaacaggcttggcttggctcggcttgataaatgaaacgagcaaaaagtgcagctcggcttggctcatttaaaagctcgagccggctcgagccagcttgtgagggaggctgagcggcactgaggagggaggccggaggcagcgcaggggagggaggcagcgccgcggtggcacggggagcgtcgagccatcgaccatcgaccatcgagcgccgctggggagggaggctagagccagcgcagctgcacaggggagggagggatgcagcgggccggtggcgtaggggagggaggcggcgagccggtggcacagaggggcgactggggacgggggagggaggcggcgccacggcggcacggggagcgtcgagccgtcgaccgtcgagcgccgctggggaggaaggccgaagctgtgcagccacacaggggagggaggcggcgagccggtggcacagaggggcgactggggacgggggagggaggcggcgccacggcggcacggggagcgtcgagccgtcgaccgtcgagcgccgctggggaggaaggccgaagctgtgcagccacacaggggagggaggcggcgcaggggagggaggcggcgagccggcggcacagacgggcgactggggataaaggagagaggcggcgggccggcgggcggcggcgcaggggatggagccggagacggcggccggcaactcctctcgctagtcgccgccagacgccaatcgtgcgcgcgtgcggcggcgtgcctgcgcctgcgtgggatgggaaatggggagggtcggacggagcagttaaggtagggttctctgttttttatgggccagacggagacaatttgttaatgggccaggtcaggtcatgtttttcataggctcgacgagcctaccgagcggcttgcgagctagctcgggctcggctcgatttgcaaacgagctgtggagggaggtcgggctcggctcgtttagtcctcgagccgagccgagcttcacgagctcgagccaaagcccgagccgagctcacgagtccaagctttttgtccacccctagtgctaaatgttgataaggttgattttggtaataaatttgatatgttttttttccccaagaaggggaacacaccataagaacaagttcctgatgagcaacggctttcttacctgaaagttgagtgggctgattttacctcctaatgggcctaaagtgcagcggtcagcccggtccttaatcgggccgagagcaccatggccgcaataattccatgctggatctgtgttgaatttttttagtttttagattttttttaatatttacagaaataatctatcggccaaaaaaattacaaaaatagaccctgctgcccacctctagggcggcaagctgacgtgacaaacgggggaggaacgggcggtgacggagggagggttttttgcaggaaaacccttgccgccctgggcccgaatgcaaaaaagccagtcggggccgggcattttgcaggcggccccttgccgccctctggccgggcgggaagtttttttttctataaaaggcctgccgcccagcccccagccctcattcctcccccctcaaatccagtgaaaataaaagaagagaggggaggagaagagaagaaggggcgaagccctgccggattcagacgccaatttcaggtaatattcatagatcctatatgtgactattgagttaaatagtgtgtattttttaaaaatttgtttgaataaatgcattatatttttagggttttagttgtactaatctagaagtgcgtattgtagatatcggtaactacgtacatctgctagtttggaatcaatacattaccgttgcattggcttacacaagaagatattacgttgtagatgtttattgcatgaaagagtaatatgatctagttaattcgttgacagatatgtcgaacaaacaaatattccaagtttaccatggaccaggaaacgtccgttacgggccaactggggtagatctgtcagattttattgtatcagaaaggggaattgatagaccggctgagaggagtgtaccttctataaaaggatggttaatgaggggcttgagagttgatccacagacaagtgacataacaatcaatgttatagtctacggcttgcgcatacatcgagtgggtcgatacagaaaatcccgttctcgacctaaccacttgtttacaaggtcgctggtatttcgcatccgaaagtactgagcaatacttacagagaaaagcggcttatgaacgacaatgtcgtgaacaacagagcgactggcgggtgctaactacggcactccctccatgggaagcccgtccaagatgcaggtgtagtgatcgttgtcaggttcttcgttccataaatcctacaacattggatcgaaggttctttgtttgtccaaatattcttgacgacgatttcatggtaagaatattttgattacatgaatccttattttctcacaacatttactaactttactcgctttacatctattctttcctcccaggaaccaccaaggagatgtcaatacagagaatggatagacaccagaagggttctaactccacctagccgtgttgtgcagtttgaactaccagaacaatacagggttactaaagcgcggtttgagagaggagagggatcctcacgtaggggttagctattatcggacaacttggcatattgaaatttctactgtcatgcttccttgtcccattactacatcgtcgttgtgttcaactattgcactacctccctcctagttcaaatctaatatcatctatgtaaccgtaatgaaaatagttgtatcatgttcaaattgtactactatttcttcatgttacataattctccttgtttaagtccatataatgtttctacgaccgagattgcgataggcctatattaattatccgagtactaatacgtcgaatgaggtacaaaataatacctcacttaacatatgaaattgcgcaacaaccaacttcaatacatttttataacaatattaacaagttttaccaataaatacttctttatttattattaacataacatagaaaaatcttttggccgtactttttactggggcggcaagggacccagatgcaaaaagtacggccgcaagctctttatgggcggccaaaattgtaattagccccttgccggcctctgtatgggcggcaagggcctaatcgcaattttggccgatggcggcagacggcgcggtcgacccaccgtctgccacgtcagcttgccgcccaccattggggcagcacggtctatttttgcgattttttttggccgatagattatttatgtaaatattaaaaaaaaatctaaaaacgaaaaaaattcgatctgtgttaactgttaggttgacccaaattatgtccggaaattcaattaagccgacatttcgcgattacttttctgcaagtcagagatgacagctgcagtgcagccacactgctgtagtgtcgtctactcaatcccccgcccttcgcgtggatggctccggcgaggtccgccgtcgccgccgccgccgccggtagcacgtacaggcaacggaagctgcagcgtcaggtatagagattttgttggttggttccccacctctccttggttgcatctgttgaacggttgtcaaattttgtggccgtacttgtcctcgagatgatctcaagaaccagatcagatcttgcggattgcctgttattagtgggataattggtagtgagtggctggtagagaaaagattgtttgggttttaatttcttggcttccacttggtggatcctagtgagtgaagggtttgattcagggatctcactggagatcctcctgttgcagggagagttgtatcggcttggcgatgttgattcttgtttctatgcaatttatggcatgctggggcttaaagaatcacctgtagatgagtaatttttattcctgtggagttgttattgatgctgaaacacaaattggaagagtccttttttttttttagagaagagtattttttacccggcctctatatccaaccggatatatgcagccttttttctaataggaacttagcctatcgaacaaggaactagccctcaaataacccaatctgaaattcactcctatagagatttgaactcaggaccttgaggtgctattcaggtcactgcaaccactaggctacatgaagagtcctttgttggtgcttcacatgcatttcagtggagatcggagtattgcggtgatgatcagtgttgtggatgatacacctgctgagactatctcgttcggtgtcgatgtcagttgtgtttatgtgatgagttaatggcagtgtttcactatctaggttatgtcaatctaatattagtcttaagaaaaaaaagccaacctagtattagttgtgttttctcagggtccaatcttaggtaaggaatacttgttcaagcaagcataagtccataagggtgctggcttttccataatccacaatgtccagctatggaatgcctcctattctcaacatttactcatgtaaattggttttctctggttgcaggattaaacccgcaaaaggatagccaaggttccagacttccagttataggtttaaagctaaaatttgaacatggtagaagctttggtcatagcagttgttcaaaagatttcatcggcacttgcagaagaaggatcgaagatacttgcttctaagttgaagaagcaagcacctgaccttcttgaagtaaccaataaaatgagactacttcaaagcgacttctcaatgttgcaagcattcatagctcaagtggctgtggacaggtccaatgatatggtacttgaggcctggatggaacaggtaaggctagcagcgcatgaagctgaggacattgtcgatgaatacacttatcttgttggccaaacggaagggactggcagtttcctaaagaaagcattcaaccaagcaatcgaagttaagaaatggcgcaagctttcagctcaggcaaaactagtagaggatcgtctacaaaagatttctgaagcgaaaaatagatttgatatctcatttgcaagcagtggaagagagaatacagcgagttatccaagtaggcaccatcatttatctgaatattcatacttgaatgatgatgatgatttagttggtaatgcagaagagatgaagcgattaatagaatggttatgtgatgcaaaaaaagatcgcagtgtaatctccatatgtggaatgggagggttgggcaagacaactcttgctagtagcatttacaagaaggaagaaattaaaagaacatttatttgccgtgcatggatcactgtctcacaaaatcacggtgttaaaaatctcctgaaaaagatcttagtccaactcatgagcaaaactgaaaatattatggatggggctgataccatggattgtgtgagtcttgtggaacaacttcaaagatatctaaaagggaggagatacttaattgttctggatgatgtatggagtagggaggcctggcctttactagataatgcatttgttaagaacaacaatggcagccgagtagttatcacaactcgaatcgaaacggtagcatctctagcagatgcaaactatgaactgaagcttacacttctaccaaagcaggaagcctggactcttttctgtcaaaaggctttctcaagattagatgacagaagttgcccccataatctgaagaccgtcgctgaaagaatcgtggagaaatgccaaggtttgccactggctcttgtagctatagggagccttttatcgtacaaagaaatggatgagcatgagtgggagttgttctataatcaacttaggtggcagctcagtaacaatccagagctgagctgggtcgctagtgttctgaatctcagttacaatgatctccctagttatctaaagaattgctttctttactgcggcctgttccctgaagattatcgaattgagagaaaacggttaatcagattgtggatagccgaaggatttgttcaggatagaggacctgagacaacattgacagatgtagctgcatgttacctgaaggaacttgctagtcgatcattgcttcaggttgtgaataggaatgaatatggaaggccaaagagattccagatgcatgatcttgttagggaaatatccctaaccatatctaagaaggaaaaatttgctactacatgggactgtcctaactcagatggagttaccgatggatcacggcgtgtttctttacaaaaggatggcaatttagtccaagcagcaaaatgttcatctcagcttcggtccatgctcatgtttacagaggaaatatcgttgtcttggttcacagattgctaccaaagctttagattgctaagggtcttgtgcctgagaaattgcaatgttcacaaggtaccagattctgtttctcagctgtttaacttgcactacctagacttgggatacacaaaactgaaagagataccgagttcgataggg

SEQ ID NO: 7471 - DNA, 5375 bp, Oryza sativa
gtggcatgcgaggttgggatgaagcattcctcttcttccgaccaggttgacagtcaccaaggattagtatagctacaaagagtcattgttagcctggtgtgatatggaggttaatttattggtaggattttgttgtgctaaaactttgaatagagatgtgttaatgcggaccaaaaaaacatgtaagagagcttcacactcaatatataatcttgttttgatcttaatttcttttggagtaaattgcatcgccgatacacgaatttgttaaatgggtgcaatcttgtacacgaacttgtaaaatactcgttttggtgcatgaacttgtctaatgcgtgcagaggaaggcaaaaaggaaacaacatggctaatcttattgatttaggggctcatcaggataactatgtaaacatatatctgagaaggttgctattagataaacacctcttcaataaaaatagaatgggatatagtgatggtagaaaatgataaaaaaaaaccgagcaatgatataagagttagaaatatatgaaattcatcacttccatgatgatggataaagtacatatcaaatttataaatattacatgtcttatacatagtcatatgcacgtcacatcctaatcaacatcagctttataaaattaacattgctttctaaaaaaaattatcaacgttgctttgtaaatttatcaacatcaatgataatataacatgtgacatttttgaaaaaaaaaattgggaactaaacaaaaggatgcatggaggattaaattaacatcccaaaaacgtcacatcgaatttttgggcacatgcatagagcattaaatatatataaaataaaaaactaattgcatagtttatatgaaattcgcgagacgaatcttttgagtctaattagtccatgattagccataagtgctacagtaacccacatgtgcttatgaaggattaattaggcttaataaattcgtcttgtggtttctaggcgagttatgaaactagttttttcattcgtgtctgaaaagctcttccaacatccagtcaaacgttcaatgtgacacctaattttttttttcgtgaactaaaccaggccggagtatgtatggaagacatcggaagcagtgctgtttttagtgttgagattatagacatataatgatttaatctattccataaataaatcatgacattacagatgaaaactagcatgaacgcatcattagatctacacatgtaaactacacagtataacatgaacagatcaaatatgcgcaacatattgaacacgtaccgaggtgacgaaaagaccggctgcttggtcgaaacttttcgcaggtgtctacgaaggcacgaaacacgcgagcgaagaggaaggcgagccgtcgcgcgaagcgcttcccaaaaaccttattgccgccttctcccggtgcaggatgtcaaaggcagaggttccggagacctgctctcccgatcgctggtgcacgccggcgagcgggatggagtagtctacgagcgacggcgcagtacagagtaggaggcaaaccctagattgattttgcgtatatactgcgtgaagacggcgggtcggtttatatagagaagggtcgcttgatcagggcgcccgcacgatctctattgcgcgtaaccgaaccggataagtcgcgcgtaacttatccggactccacgccatttgcacgcaccggatttttcggaacgtttccaaaacaaaaacgaatccgaatttgcagcaaaacaaaactgcaaaaagaggctgcatctgcgcaagggtgaggagccaatttttcggaccattcgacgcgtacgtcgtgcacgcgcgccgcctgccaggcgaggcgagcgagcgcgcgcgtgtttcccctcttctctccaccacacatgcttcaagtggctaggaggacatcctcccttttaaggaggtccccctctcctagaataagcaaggtggtactaaactccacatgcatgccatcccatgaggtgggcttttgtgattttccaaagaattaatcttcgagtgggctaaggcccattcattaattccaacatttagcccatgaacttttgcatattacttctgttttcaaatattcacatgcatatttcaaaatcattatacattgatgttatttgtttacttatcgtgcttaattatgtgtgcgtgatgtgaatagtgcttggtaatgtaaaattgaagcatgtcagtcacaactcacaagaaaagaagcacgaagcgtaagtaaaatttgtgcatgggcatctacattgaaatccaactgcacactttggctggacctttcagcacctacaagaggaggacctagtaaaggttgtgtatttaaaatgtgacatttttttatagccaaataggtttttgacaagtgtaatattatatagtattgatggtacaatacatgacatatgtattatgtgttgaataagacctctttttcagttttgtactccctccttccctaaatgtttgacaccgttgacttttttaaacatgtttgaccatttgttttattcaaaaacttttgtgatatgtgtaaaactatatgtatacataaaagtatatttaacaataaatcaaatgatagaaaagaattaacaattacttaatttttttgaataagacaaacggtcaaacatttttaaaaaaatcaacggcgtcaaacattttgggatggaggtagtatatgcgtacgcatcatatactatttcgatctacctattctttttataaaaaaaatgttagatattcatcggaataattgtgctaagcacttgccagcttattccctgctcgcacattcggccgaaatgtttcaacagcagccatgctaaatttctgattaaccgcttccatactctgataaaaatggtaaacccgttaattgcaacactaggctatgcctgtacgacgtcaaaccggcaccaaaatcgtcactcagatgaactaagcgctgagattcagctacatggatacgtgaactagcaagaacagagcaaactacatctgagctgtacaaatcaatgccctgaaataagcaggtggcaatatatacagatcaaccataatatgcgactaggtaagcaatagtaataagaaatgattttataatttatttaattagtcagctcctagatcagcttgctagcacacaacttagtcaatgcctagctagcattggctcttttcagcaggtaagagaatttagtgcttcatcaatctcaaaatataactataatatagtactatgttaaaaattaagtattgggatgaaagaaccaaagtacacctcattaatccatggtgaggtgatggcgatcaaagatagtatgtgggaggtgtggattttgagggctaataggggtgatagggctcatggtggcatgagaggagtaatgtggtaaaagtcaccttatatgtacctatattcaagataaactttgaatttcaaggtagttatattttgggatggatggtttaagagactgagtattctttcctactaagaataatgtagatgtttcaacagctttgtctaggcttttcatctttggaccccccatattttggcttatctatggcacctcaattatagatttccatagtttgtcgtggatgagcaaagcttaggagatgattcttcatttaactaggtaagaccccgcgcgttgctgcgggagtttagtataataataataagtaaaaataatatgtaagatagctagacaacataagattatataagttaacgtggtttatgatatttaaatttacaaaatatatacaatgatgattcaaacgtaaaagtaaggtgatatgactttatgaaagaagaaagtattgagatggtttggaccgtagattaatcatcttaaggctaaaaataattgagatggtatggattaataagagaagaaaataagagagataatttagaccatagattaattgtttgagcactaaaaacaattgatgtgatatggcttaatgagagaagataaaaataatattaactaagtgaggacgaactatataggtacatagcatattataaaaaataataaagatatatattgaaatattatgtgaattaggtgggatgatgatttaacatgcttgcatttttaaagctctaaaatttaataaattataaaattatagataatatagcatgtttgtattatgtttaaatttaatgattgttagtgaaagatgatgtagtatctttcaatgttaagctttaggagttaatgagttataactttatagtaagataggatttgatggtaagatcgatacggggaaccttaccaactttgcctacctcctgtttatactacgcggtcacatcacatgtggtaacatgtggtaatggtatctgcacaaatcttaccaagtgaaaagacaatctgatcatgaaagctggaagagccacagcatgtggtacataatgggcatctgattgaaaagcaaacaaaattaatgaaatggatcacaaccgcacgatcaaggatatgtggaaggaaccagaagctgatcaatgaaaatgtttgcataaaacccatatattctcacatatctacaataaacaactttcatagtttgatttctcagtacatttcattattgtctcccccatcatcatttgtgattgaaccatgtaattatgcaattaagaagaaaactcgcacaagtctattttcaagacaaaattctacgctatatcttaaaacaagtttaaatttaatttatagctttatttatcccattaagttttagcatacataactattatatatatgacacgttataacgtttcacgtaaagagctaggtaatagtcacaattatttttgtaacttattccgaaatgtatgtaagacaaatatgtttcttaaaacatataacttattttcaaacttattatcagtagcacactttaggatggttaaagtcgcgtgaatgtgcaacttcataagctagtagtgttggatttaatatgtaagtagagggggccttggccccctcaaaatttacatctcacgtataccagaattcacttgactttataatttaatatatacgagttataaatttatcctgtaagttagtataaatataatatatatgcatgccaccggtaaaaatttattgtgctttcacccctatgcacacatccaaccaagcatcatgatgaatgtggtcaatgcattcttgatttcttgtctagggatggaactgctcttcttgtagttgaccagaattgttagtgctttctaggtggatttttgccgccgacaacaactcgtagaagttggggaccccctccaataagagaacat

SEQ ID NO: 7472 - DNA, 9430 bp, Oryza sativa
tttttcagttttgtttatataagggcagggctctgcctgccaatctatcaaggaagaggagggaaaggagtcatagcatgttgagttgttgttgggctaaatggttcggcccgtctctgagtgggccttatcgtcgtcttcggggttagcccaaaatttaggggtactacatactgagggaaagagaaggcgaccggggctctgctttcctctatccttcggttttttagtggttttaacgaccggaattgtaattttctcacttgatttgaagatgtggcttgcaagttggaacaattaaacactagatccactgatccacatgcataataagatgaaaaagaaaagaaaaataggccttggatttgcccaaagatttccaagtcggcaatttctccaatccacgctcgcgagcactcgggctagccagaactggtgggtgacaaattgtgggagtctgggagagattgggccagctatggactaaagaaactcaattcgactatagaagtaattgaagcaaggaataagtatattttttgtcgttcatcttatgtactcttgcttaaattgtctccctcaaccataaaatcagatataacacattccttctctttgaaaaccggtgcaaatcgactcattcaatagtacgggaaacggttactacaggtgaggtccatatgtgacatatgatatgtcattgagatatgacaaaaatatgtggtaagccccacgtgcaccggaaaatctttcgggcctgtattttacaccagttttggatcaattatgggccttccaagcaggccctaagtttaatattttgaacccagcgagcaggttagggcttatttagttggcaaaaaaaaatgttgccgcttcatatcacatcagatatacgaacatacatttgaagtattaaacgtaatctaataataaaacaaattacagattccgtcaggaaattgcgagacaaatttattaagccttattaatccgtcattagcaaatattttactgtaacaacacattgtcaaatcatggcgcaattcaggggcgtagccagctaggtggcaccgtggtccatggaccacctaagaatttgaaattatagtatatgtgctagttaatataataaaaattgtatagtggaccacccttttaattggcatattacatatagatggaccacctttactttaaatcctagctacgccactggcgcaattaggcttaaaagattcgtcttgcaatttcctgacgaactatgtaattgttttttttttctgcatctaatactgtccaaacattcgatgtgacaacgtgaaaaattttgtttggaaactaaattggaggaaaaacataggaattttggatgattccaattctataggaaaatttcctatgaagccctttgaaacaaaggattgaattctatccaatcctttgaaattcttatggaatggacaatcctatagagattttggaggaaatttagcaagagcttcaacctcttggtaacttttctttgagtctatctctctcatccaattcctgcgtttttcctgcggttcaatcaaacggttattcctgtgttttgcaatgctctgttttccacttacattcatatcaaaattctacgttttttctattcctacgtttttttcaatcatgcgattcaaaggggccctaagcaggctcctattccacgaacatacatacacagtccaactaaactgtactcttatatatacaccattgatttctctaaatggaaaaacacaacgcagagctttcatataggttgtgtttagttcagcgtaaagtttaaattttggttgaaattggagatgatgtgactgaaaagttgtgtgtgtatgacaggttgatgtgatggaaaaggactgaagtttggatccaaactttagatctaaacacagccatagtaaggtacaacagattgcagtcctacttttatttcaagagcaggtagaagctgatgacaggttgatgtgatggaaaaggactgaagtttggatccaaactttagatctaaacacagccatagtaaggtacaacagattgcagtcctacttttatttcaagagcaggtagaagctgatgagagaacaaaatgctaacaacaaccctatgtttaggaggaaattagtaccagctggctgtacaaaaatcactactggagtagtaccgtgcatgattagcaccagttcagctcgagacaaatcaatcaccagcagctgtctgttgggttgtgttcacatcattgctacttccaaacctatcaaagtttaatagtaagatttagttccaaacctattaaattttaatagtaaaatcgagtagtttcagaaactctctcataaaaacattaataaaatacgataagggctctaaattaaaatagattcaagtataagcacataaattggaactatccttccattgtcgcaaatattaacaatgttctacttatgtatatgcatatgcccctatccagatacatagctagaaattatcatatttaggatccgatggaggtatgaaaattagtactacatccgatggagggatggagtggatgagatggcttcccagtttggacggcccagatgagagcacaactgccaaccgcaccaaccaccaccccagtagtccagtacaccgaaccctgagcacgcgccacgtaggacgcccgcgtgtgaacggaaccccacgagccggatatttcgtggaccaaacgcgcatatgcgccacgaaaaaaaagtccatattgccaaataaaattccattttcaaaaatcgcctaaaaaacaagctaggtttcatctgggcgaggccgtagctgacaaaaaacgaatgaaaattaaaaaggctatgtgctacacgacacgagaaatttaaacatggaaatttatcgcaactggagcaagttggaatcttcccagcaaacacgtaccagccgcatacctacctacgaatacgttttttttaaaagaaaactgagtaatatttactttttttttgtaatgtactgggagttagatgctgctgtgacgatgagtaagcacagcgtgtgttttatagggatgtgaatgtgcaaaggggctagaagacttgtattttattgatgaaggaatggttcgtaggaattgttgggaattttattttgttacagttgagtcgttttcaacgaaaacttaatttgagaaaagaaactggtagaatgcattatatcagttttttttttaccctctatgtatggtgagcttcattggtggcgaggagagctgacatgagacgacaattcaacataaatcaagtctcataatctatttcatggtattttggttcgtcatgtttacatatcggcctctagccttgctgctttgctagcttgatccactagtgatctttgttttttctttccttattggtagcaaccttgtgtttcaaccaaaatatatatatttcttttgttgttgaaaagtgcaaattaagaaacaggaaaaaaaaacaaaatactattacacactattgaaaacacatgtaaaattcaatcacatgtacatgtgtacagtgaggtggtttgtttagaaaaacaacatttgtttttttttaaaaaaaataacaccggaagctttgatggaaaagaaatattagagatgcaagtgaggcgggtttgtaggctttgaggcccactaagccgtaattgtcattatcttttttatctgtttatatactagtgggtgaaaaataaactgatgtgtatgtcttacgcatgatagcatgctgcccgcttgcattcctagaaaatacttcctccgtttctccgtttcttaatgtaagtcattctagcattttcatattcatattgatgttaatgaatctagacatatatatttatttagattcattaacattaatatgaatgtggaaaattgtagaatgacttatattgtgaaacggatgaagtacttttgaagagataatatatattagtgggacaatcgactttggaaaagaaaaattcaccaagtaagagctctagtttattctctatgcaattagaaacacacgaaagtagtccagattcagaacaaaccatatgtgctaggcgacatcattcattcttagttaagctctatagaaccatatgcattgaacattcctatacgcttaaatataaaacttgtatttgaaaaagtccacagtgaaagctcctaatctttctttttttaaaaaaatatcttaatataatatttctccattgttcctatatttctaggttcccgcatggcccatatgtgtaaagaaaaagaaacctcacgtcagtgttgtggtaaatatgtgatgtcgtcttttaaaaaaagatatgaggtgtgttttttttttcaaaatgtactccctccgtttccggttataagacgttaaactattttaaatttgactaattctacagaagaaagtattaatatttacaacaccaacattgtttcattaaatctataatttaatatattttctgtaaaattagtcaaatttacagtagtttaactttaaacaaagtcaaaacgtcttataacctgaaacggagggagtatattctagagttaatgaaaaatcatgctctcttattggatttttgaaataaaaacatgggaatcgcatgcctctccagtccctagttggcgaaaagaaacgaaaataaaaaaacaaaaacgttttctttctgaaaggcaggcgaagaaacgcatctgtcacgcagcacttccacgcgttgctattcacacaaaagagagagagagagagaaaccaaacgaaacgaacgccaacccaagccaacccagcccaagcgagaggaagaagtaaacacggcaaataatcaacaccgcattaaaaatcttccatccaagtcaagcctcaagcgactcctcccccctataaaagccccctctcctctcctccaactctctcctccccaaagaaatcgcttcttcttccgcctccgcctcccatggcagctcccagctcgtgggacacctccttccacgaagcaaccacagcaaggcaatagcgccacccaccgctcgcatccacagctgctgattcgtaggaggagcaggccagggagggattcgttgattttatttggcagggaaggagatccgagaggaagaaggggaatatagatcgatggggaagtacgtggagctgctcgacatgggggtgcgcatcgccgcgcggttccactcccactgcccgcagacggcgaggatgtactaccacccgccgccgtcctcctcctcttcgccgtcttcctccgccgccgccggttcggccgacggcggcggcggcggctgcgcgggcttcgccgcgaagaggatgccccgggccgccgccgacaccgcggagatcatcctctacgccgtcgtctagagttagcctctagactctcgatccagacgcttcacgaggaaatggaggaatgtatttttcttttgtttttctttaaagaggaaaaaaaacaaagtggacttggagattggttggtttattgatggagtgaaatgaaatgaatggaatgatttgatatttacgtgattttctttttgttttcatttaagttcgtactactactatctttttttaatgcggacaaatattttcaaaatacaacaaaaaagaaaaggtatggacggctgaggatggacgcgtcacaagctaagcaatcaaaatctcaaccaaaccgaatcctaggaaagctccaccaagaaataaaaacaagaaaaaaaaaacgagaggcgcgcaggacaccaccagaggcgcagatctttacctttttcccccgatttcttggtgcttgtgcctaaattcacgccgaattcgtgtgtgcgtggggggcacgcgtttgggtgggcagagcagagcccaagcatcgcggagggctgagttgctggtctgtagagcatgtttggtatagctctaagactcctaaattttgagtctgaagtagtttatcttgtgagagagctctatccagctccactctcagttttagtggagagagcttcacccaacttgttttgatggaccttaaaactgtttgactgagctctagcttcacacacgagcgttttggtgcgcacggcgcgggggggttagctgtagctgtgtggtcgcggtgatgaaatgaatttgccaaccgatctgccgatacgatacgggtggtatctggggaaggaaagatttttggaattttcgtgatctcacgtcgcacatatgttgtgcgtctaggggtaggccggcggggcggcgattctgcggtgccacaccaatttacttcatcatacagagtacttacttgctactccatccatctcaaaataaaccgtaattaaatttatttattttaagataaaaaattatttgtttacttaaaattatttattttaagatgaaaaattatttgtttattttttttaacaaaaggagtacgggtaaattgatagtatatcgtatcctctctagcaaacgattgggttaaagtgaaactgctaccaacgtcttttttttcttcacttgatattttggacatatggacggtttacaccacatctccgcatggtaggatttagtatcaagtttacagctcgagcgttcaccacccaaaatccagtaaattttcttcggaacttttgtggagtacaaccaggcatatgccaccgaacacaaggctgtgtgttctaaagaaaaaaaaaacacaaggctgtgctccatagttttcttgatcgaaaacggtgacggaaattcataactgacggagcatggtttccgtaaaacttgtattgtttttgcctctagccatatataagatcttttttcttctatattttaccaatgccgtattgcaatcatcactaatcactaaataattaacgggaaggctaaatggctgtatgatagatggaatttcctaaccaacacagaacctttattcccttacaaacaatatggttttcgactgttctcatcccttcccgctttgattcactacaaataaaaaactctgttactccaagcaagacctatgtattgttgttagagggatgtttagatcgagggacgtaaagttttgacatgtcacatcgactattatatagggtgtcgcatagtgtcggtgatatgggccggggtatcaggaccagagggaggaggttgcccccgatacccacgtggcactcctccgagggggttaggcccgaggtagggaggcggccgcccctccatgcctgggggtcgagcactcgggctgccccgaccccctccgcatgacaccgcgtgtgcggggttaagtgggcgcccccaacacccacctaaccgcatttaaggcaacatgagtaggcgcgccacatcgcattaaatgcggtgcgttgtgcgcccgaccggtttgtgaccggtcgaatgattgatgagaccggagtagtgcgcctgcgtgctgctcacttgtcaggcggcgtgccgcctaacatgccccctcacgtcatgatgatgagaggttatttagcctttcatcccagccggagtcggttcatccgacctagtcaaaagtagggtttccatttctcggtgtaagtgaggactcagaagtcttcactcatttaatggtgaatggcatgggtgtcccccgtgtcagctggttggatatgacggccccatgccgcggcgtctgtgtgtggcttccaagtcaagcaacaagacatgcaatgtcctccttcacccttaggtagacttctacgcccatgtggcaacccattgggatataaaaaggaggtccaagcttggtgagggagagagatcggttcttggctaactcacgcttgaatttcagagattgaagtgcgtgtattccatactcgatcaaccaagcacaggagtagggtattacatgtataaaccccttttgtctcatcatttctggggccccgaccccgtctacatcacatcttccaccgagtcctcgattttcacccgctgcccccgaccgaactaacaaagggggcctcactgtcccccgcttgaggagttcacccttcgatacatagggtgttcgggtactaataaaagaactaattacaatatccgttaacaaaccgcaagaagattttattaaggctaattaatccgtcattagcatatggttactgtagcaccacattgtcaaattatggagcaattaagcttaaagattcgtctcgcaaagtaatcacaatctgtacaattagttattttttagcctatattaatactttatgcaggtgttcaaacgtttgataagatatggtgtaaaattttagagtgggatctagatatgcccttatcttctggatgaacacaacagagaacagatcagtggaacagatcagcatgtttggaccatgataacgttattaccagctgcatatttgtatgctgcgtttgctcgcccgtgaacctgacttgccgagcacaagaggaagggaggaggaatatgcttttgtttttgctctaccttttttctcccatccgtcacagctgctgctgctacggttgcttggccggtagtagctgtaggtgaggcaaaaaaagacagagcacctagacagaaacacacatgcaagatgactgtgtgtgagacattggagtatggccgcattcagcaagcaaggcatagacggcacatgacgtgataccctcacgcagcagctagtggcatacgtaatccatttgcattcttgcttgcagctgggtgctaactcctgttaatttgtttattacaactagtagtacctttgagggctggattagtttttttttcttaaaatacgatacaaacgcaagcgtccacaatacatgtacaacctccctctaagagttatcacgaagcgtcttgctgtcgatgggtaagtcgcttaccattgaaagaaaaattactcgtaaatacaagcactcatgttaaatctagggggtttttatattgtggccaaaataaatcttattttggcaagttggccactaaatgtaggtattttttatagccttaaaaaatagtatggttaaaaatggtataaatatgaacaacctctaggatttgaacccgagaggattggttccaccacaagaaacctaaccagtaatttggcaagcttagagtactccctccatttcaagaaaaacataattccgatgttgatttaacataatttaggataattaatatggatatgaggttgtccagattcgttattctatttggtgttaaatcctcgcttaggttattttttttatgaagggagtagtaaagaatcaatatttttttcttctaaaatatgaagtactcccttcgtcccaaaatatagcaatcttcgagcggatgg

SEQ ID NO: 7473 - DNA, 1605 bp, Oryza sativa
tagaacttacattatgaatacactaaaattacatatgtaatttagatacttacaatgtaaatacatattgatttttttttaaaaaatatggcaccataaatatagctactcccatgagttttcttcccaaaattcaaaactatgaacacatttagtatttagagtatattttactgtgtcacctttttattatcaatgtttcgctttggatcacactttaaccattgttttcacttcaggtaatcttacctttgtttcattttggatcacctcgatactcttctaatgcatataaacgatttcgagtatgccagcttttattcgtcaatgaacttacgtagctatatttacactattgtttgatatacgataggttgatgtagatagttaaaggtagttaaagtgccacaaaaggtagatttacaatgtttaaagtgaaaaaaaaattgtgaaaaggtggtacaaaacgaaacaacagtaataaaagtaaattttactgtagtatttattaaaaattagatcaaaatataaacactcgtagagtactactcaaataattcgaagtacttcgtattagtagcagatcatttaattttcttttcatattagctccaactaccttctcacccaccatacctcatttaacctcattcttttgctaaaatttctaaaggagatttatagatgatgtacatagatacatctatattgaattattgagacgaaaggagtatattggaatggatgtagttatgtatgtattcatctttgttgcgaatataaaccacttgtatgatttttctttttttttttggaaatgacacatttggcagagatagccatgcttgataacaagtttgttgaggtgttaatgctagtgacatcgtagtatcataagtagagtgagtaatgaattacacctatcatatcatatcatgcatgacgtgtcaactgtctagagataacaatttatagcacataagttgatgtacgctttgtttagtttccacataaaaaatttacaccctatcacatcgaacgtttgaacacatgcaagaagtactaaatatatgctaaaaataactaattgcacaaattgcgactaatttgcgagacgaatcttttaagcctaattgctccatgatttgataatgcggtgctacagtaaacatttgctaataacggattaattaggcttaataaattcgtctgactgaataactgaataatttaaggtacaaacaaattaattaactattatagaattgaaaataaatttaaaacaatgttttaagaaatttatatatataaggtttcttttaaagtgaaccatttagaagtctaggaagcttgtatattattattctatttatttttcccatagttgcttattggtttgctatcacaaactctgcttaagtgcttagtatttgctctccctcccggtttctcacttaatcacaaatcaaatgacatcgagtttcgttttgctttatactctttctttttactataacactaatatgtcaataatatacataaattagtggttgaaggattcttaattgtagaattatctttttattagggaaggttagtttcaaa

SEQ ID NO: 7474 - DNA, 1129 bp, Oryza sativa
tgttacccatgaattcagaaccccagagtccgcacatcctcaaatacaaagcacttccctagttagatgtaggttagacttcccgttcgagaaactctaccttctacctgccctcaatttatgcacgattaatgaatgccacctgggtggaagcgagaggtggaaatggaaggtcttagttcggaggtgggatctctacctgatagttgcattgccattcatgatgatcccctggcattcgtccattcagccattcaccattcacccattcaactggaattttggttgaatgccggaattgtgtccacaaattgtggatggatagttggttggctggctggatggctggctggatggctggctggatggatggtgaatggctggcggcggttcggttgctttgaagcatttgttgctatctaaattccatttaaggtcgtaccttatcgcccagcatcatcttattctctatttgtattccctccatctttcagatacggatgtagccttggatgtgcccgtgcccaatgaagaggaagagcgcaacatgaaacgtaagtacaaaagtaccggacacccacccagatcccaatagaatccgccaaatcctgcgggaaattgtaatcccattcaccagcttctacatttaattaacaagagaactattgtatttatctaacacctggattatctccacctttcatttgatccctatttatagattacgttgcgttgctaacgggccgcacctcctatttcctcaagggtgaggaaatgaagtccatgtacaccacctacaatccgcagaatgtggtggccaccgcccgtttcttgttccacaagaagaatctatactactccttctacacctcatcgcgaatcggtcgtccgcgtgccattcaattcgttgatgatgcgggtgtaatcctggaggagcatcaactggagaccaccttggcgggcactctcagtgtctatcagaatgccacgggcaagatctgcggtgtctggcgacgagttccacgtgattacaagcgcatcctgcgcgacgatcgtctccatgttgtcctcctctggggcaacaaacagcaggccgagttggctctggccggaaaggtggccaaatacg

SEQ ID NO: 7475 - DNA, 3795 bp, Oryza sativa
ggggggggttgcagaggctaggcacgacggcggcgacggcggaggataacggaggggaagggggaggggacgccggggcggcggcgaggcggcggtgggatctgcccgagaaggcggccgacagcacgtaatgacgatggctttgatctagttttggcctttgattttttatttttttggggggcgaggttttcggggggctaatggtgtgttggtgtgtggtttcctggggttgtcggtggatctgagtggctccgtggtcgattccggtggagttctaggggaaattttctcgagtttttggtgggatttttttttttggattggtgggggggggggggggggtgactagggtttcgcatgcggggagtggaggcgttggcttttgaatggttcggaatggtttgcttagctcaatgtctgtgttccattgttattgccgcaaaatggtcactgttctaatcgcattcccggttgcgtcaatggcattgagggcgggttgatagttccgctgctgcaaggagttgagggcgcgttcgtgcggatctttaaataattcgagcgaattgggctctggcttgccatttcatcagttggtttttgcgaaaggatatcaaattggcatatgctgtagtcgcgctggatttttttttctttgaatgcttctgctggacgtggcgttgaacttgtcgagggggaattatattctcgcgtgacgtgttgcaaagcatttttaaaagtgttgccatttctaagctatttgtttggataaatttgtgattttgtcttagtggccaaggtgttaggactgcgccacttcaattttatattgcaagggatgttgtgggcttaatgattcaaacttaactaattcttttggctagtggtatttataatcagaaactatttctcaggattgtggaatcgattttgattcttcaaaatatagttttgcaaatttttacatgaatttaagtagaatttatgtgagtaatttggagttctggctatgatggcacttgcttaaattactacaagtatttacttgttgatataacgtgaacaaaaaataagtatggtgcactgattattctagaacaatgtagtacaattggagtttgaaatgattaagagacatcaccaaatgtactgataataccttcaagttgacactacagctcttggttaaaacttacaaataaatgcatatcattgcgatatttgttgttttagaaagcttcgacagccccccctcctttttttttgtgatggctctacatgcacacacctgtttcgttaacattttagcatatgtggaattcttctgcttgtctttagtcatagttgcttgcatgtcattgataattcatatgattgggtagttatcctttttttattttaagatagtgcaatataaaatactacattagctcactgtttgtctctttaataagtaataactctgttgtttttgctgatctattgtgaggggcttcaaggctccagctatgcagtcatgcatgtatttataccttttatttatttttgcagtccaagcggcaaaggggttgtagaaatgtccacggatgatgaatcagattgtgtggttatatgtcccccaaatgggaaagctggtcatacagaagttatgagtggcaggcatgatgaagattcttcaagagggcaagaaaccccttctactatagactcacatatgaatgggaatgtccaggatggagtgcctgcagatcaagatgtgctgaagctggttgatcagcagaagtcttctcttcccagttcaccaataaaccatggtatagctgaacaggaagagtcaaaccacactgttcctcagccatttgctcctgcaactgaaagggaggattctggagaaggagattgtactccagtgcctcatcccaccagcaacggtgaaaaactctctgataaaagtagcacctcgctggcaagtatggcgaagaaggtctgacatactctatttcacattgtatcatatatgttttatctgctttgttgttgcacaatcgcctgaatactatttaattttggaataaatgtcatgatgcatcattttgttggtattatctcagtaaatttctgtattcttttagctttaaccttcaggtatgggtcatctatcacttgaaatggtgcaacatatgctttgatttggcaattgggatgatatttggaagatcctacacagttatctaaataagccacaatttgttgcatcaacctgaaccccctatgtacacaagaaaatttttattagtttcttttctgtttacttgagtatgcctgtgactgcagttctgtttggctggcataaactgtagtaagctctcttgagatgaaataagccagttctattgacaatattttccatggttatggattgcagagtccatcagtgacacccaggaagcctctgcaagctgacagtacttcccatagtcacgaagatgattcatattcggttacttcgtatcctttcagatattgacttgatttctcatgtgtgccttattcttcgcagccacacctacactattcataatagctacaattgggatatagctacatgctttgaacattttgttccttgaattactaaaacacagaaaatttgtctaactttttctttaatgtcttcaactcttcataactggtggaaaactagaaatatatcatgttctctttatttctattgggctttcctgagcttcattcatccagaactgtaacttcagcaaggactggaaaaattaagaagacaacagttcctgtcgcacctacttttatatgtggtaatcgtcttgagaagaggggagaggtacgtatttaatttcatcatactgtagagaaatggctttgtaagttaaaggggacagcattgtaataattattctagtaccgttcagttttacacaaaattggaagaaaaacgcaaggccttggaagaggagaaactagaagctgaggcaagaaaaaaggtaggttttgtttcttttgtcatttgattcttttagagccattgtgatagtggcatacagagcaacacaattattcatgctcggtttttcctatataatgtaaatctgtaaagtagcctttctgatgtcatgtctgaattgtgttttgcttcagacattttttacctcctcatgaatcatgtcttatcttttgaaattttgttatttgaaattcaaaaatctacagttcaaatgtttaattcacaccattctatctagtttcacttttatgtaaatggaatctcaaagcgtttttcggactttgcaaaaaagatgaaataactggaattgctttcagtagaccatcccaatttggtagtctagtaaatgatccccaagaccccaactatcatggctttcaatcaccgttaacgttgaacttgagaaccctgccagatgacacaacaaaacatgctgaaaattctagtctcccattgtgatatggagctgtttagtagttcaattgtttctgcttttttaaatagaataaagtacatgggcggtccttaaacttgtatgggtgtgtcatctaggtccctaaagtctcaaaatgcagatccaggtcctagaacttattaaagtgtcaaataggtcccaaatcaccacagcccctctaggatcgtacgtaccgctgatgtggcatgccacacggatatgacatggcataatcttaactgagaaatgggactcacttaaaaaattttctttttttcttcttttcttttctttttctttttct

SEQ ID NO: 7476 - DNA, 5889 bp, Oryza sativa
aaaataactatattgcacaaattgcgactaatttgcgagacgaatcttttaagcctaattgctccatgatttgataatgcggtgctacagtaaacatttgctaataacggattaattaggcttaataaattcgtctgactgaataactgaataatttaaggtacaaacaaattaattaactattatagaattgaaaataaatttaaaacaatgttttaagaaatttatatatataaggtttcttttaaagtgaaccatttagaagtctaggaagcttgtatattattattctatttatttttcccatagttgcttattggtttgctatcacaaactctgcttaagtgcttagtatttgctctccctcccggtttctcacttaatcacaaatcaaatgacatcgagtttcgttttgctttatactctttctttttactataacactaatatgtcaataatatacataaattagtggttgaaggattcttaattgtagaattatctttttattagggaaggttagtttcaaaactgcaattatgtagaaacttcaggtggtgaaaatgatatggtgtcctatttggtgatggatggatgagttagccaagtcctcatgtatatacgttaatatttttgtcctctttggtataactctggatccaatattctttggagctaggtatttttagctctacaaatccatagatctagattaatgattacagtggtactattttgataaattattttgttcccagtttatatgaattttaaaattttagatcacaattttacatataaactacaaatctatggtggatctgagatctgtagttatgccaaagaatacctcatattgctgatcctttctcgtatgctttctaatggagctagtatctgcagctgtattatcagaaatacatttaaatgagatatgttttgtatgacccagttgacggcctcacaaaccctaaacaggagggaaccaagcctgagctctaggcttggctcctaaatcccattcaaatattcttaaaaaaatcacatatttcttttttttaaaaaaaatagtaggatgattaggccgaatatgtcagttgagccttaggcgtggagaattttaatttggctctgtcaccaccatcaggaattgaagcagggaaatgagagctataaccgttgaataacctctcaaaaaatccctgaattttagctgcatgagcagcttaaatgtgggatcaatattcattaagctcaagttactaacttgaaaaatatacagcatgtgtgtgttgttttgaactctaaaaatacctagacggagttatgcattattgaaaacataacatatgaatgcaaacttatactagaaaaacccatgaattctaaccttagtggtttttcaccaatatttctaataaggggtcaacctttggaagatgagaactctaccatttgaacacatgaatagtgaaaaatcaaactattaaagcttgacgggctagggccataactgagcattgccacgtcagattattgtacaattatactactctagcagtacatacactcttggctgtgtactgttgtacgaaacggagagtccaaagtagtagactgtccatatagttcagtttgatggatttcacccggagatacaccgtacgatttaattgtaataatacatagaaccatttgttttttttttgaactgaagaaccatttgtttttcatttacttttactttaaaacatggacaatgaatttgtttttgaacagggcttgaaactcttaactccgagcaaatgaaaattcaaacagcagtggattcaatattcaactcgaaacccctcctttttttcaactaaaaagtccgcaaaacttcccaataattaaaccgtgaaatttcagcgagacctgtatttaaaaatatgggccaaattcaaaatccaaagcaataaacaactgggctacacacaacatgcgacggcccatctcatcaagcaacaaggcccagcccactcgacacccaccgaatccacgccgctcaatcgaaaccgacggtccagatctcgccgcgccaaccccatcacacaaaccctagcaaccccccacctatataacctctctccctcacgccccgcctccattcgcacgcccgcgccaccacaaaaccctagccgccgccgccgccgccgccgccgccgccatggccacccaaacccgccccctcgtctccgtcaaggccctggagggcgacatggccaccgacaacagcagcagcctcgccctcgccgaggtgttccgcgcgccgctccgccccgacgtggtccgcttcgtccacaggctgctctcctgcaacaagcgccagccctacgccgtgtcccgccgcgccggccaccagacctcggcggagtcgtggggcacggggcgcgccgtgtcgcgtatcccccgcgtccccggcggcgggacgcaccgcgccgggcagggagccttcggcaacatgtgccgcggcgggcgcatgttcgcgccgaccaagacatggcgcaagtggcaccgccgcgtcaacgtccacctccgccgcgtcgccgtcgcctccgccctcgccgccacctccgtcccgtccctcgtcctcgcccgcggccaccgcatcgagaccgtccccgagctccccctcgtcatttccgactccgccgagtccatcgagaagacctcccaggccatcaagatcctgaagcaggtcggcgcctacgccgacgccgagaaggccaaggactccgtcggcatccgccccggcaagggtaagatgcgcaaccgccgctacatcaaccgcaagggccccctcatcgtctacggcaccgagggatccaagatcgtcaaggccttccgcaacctccccggcgtggatgtcgccaacgtcgagcgcctcaacctgctcgacctcgcacccggtggtcacctcgggcgcttcgtgatctggaccgagagcgccttcaagaagcttgaggaggtgtatggcaccttcgaggcgccgtcgctgaagaagaaggggttcatcctgccgaggcccaagatggccaatgctgatcttggcaggatcatcaactctgatgaggtgcagtctgtggtgaagccgctcaacaaggaggtcaagcgcagggagaagaggaagaacccgctcaagaatgtcgccgctgtgctcaagctcaacccctacttcggcactgcacgcaagatggccacccttgctgaggctgcccgcatcaaggccaggaaggagaagcttgactccaagaggaccaagcttagcccggtataacttactctcctctcaattttgttgattcagttattataaaatgatgactaggttgtagaataatccgattagctatgtagatctatagttgactctcatggtaacaagaacaaccatttggatgcttgtctaatgtgttagctggtactgctttggatgatctatttgtttagatgacattctagtttacttagttagcctgcacttgctgtttgtgctgctatgttgcttcatgggctgttaatttgttagtattgctcggaattgatactacctggtgttaattcttgctgttattaggtacattcgtttctatattcatgcttctaatgtgccattttctccatgtttagttgagtagtattttgttctatgatctctctggtaagccaaggttgtattacttgttataagttattgacctcattgttgtagctcagtgtctgtcttatttctacattgtgttcctagaagcctttgaatgtgttaattgattcatgataacatacagttgtgcaaggtcatttagttatttttcttaaattatgtctctatgcattcaagtttaggtttcatgtaatgttaatattctagattggctccttgtccttggtgaaatggtggctgagttcttggcattagaaggtcatttatttggctgtgttttatatttatcatagcatgtgtggtttgttgttgacttgtcgtagctgtttatttacactgatcttaggttctactatcattttttgtctggtttattctgccattgatatttcatttgctgtattgcccttagtgtttttagtgggatacttgtttagtcctcaaccatttggagacttcaatctcttggtgccttttgttctaactgaaaattcctgttgattcattgtaggaggaggctgctaaggttaaggctgcaggaaaggcatggtacaagaccatgatctcagacagtgactatgctgagttcgacaacttctcgaagtggctcggagtgacgcagtgagcgttgtcttgttttaagttttgagtagcagcgttaccggatcttatctcaaggatttatcaatctgtttttacctgaacatctccataagaagttatctgtgggattttgagactagtttctctgttttgttaatgtgctgtcgtgagaacatagagtatgtggtttggaccagctatctaaattatgtatgcacttccatgttctctgtgatgtcctgtattttgatgctgtgatcttgtatcgctgtatcatattgttctagggctcatggcttactcggtcaccatggcgctgattccattcacagtgttcagcctacttaaacatatttgcaattttggttagatgagtttgttgtgaaatctggtcagtgggcatgcctagcaagcctaaatcaagttgagcgagcctcaatcttatcttgcttttggtgaggaaaatgttgtctgttttgtggttgtgttagttgaggaaaatatggtcgtgccattgctttaatcctggaatcactgtgatgactgactgaaacgagtttgctagttaaccaaactctgttaccgtcaatgattgaggaagaagtcttggctcgtgctgttgcagaaattgcacgggattgaatcagtggcaacttgagttctggatgaattttcttccaaacaaaacctcgacagttcgactgtgctggcaaccactgttccttggtttgcattctgttttgcgggaccgcttagcgttacgacaaatttagggcctgttcactttgatgacattttcaaccttaccaaattttggtaaagttgccaaaaaagtggctacatttagtttgctaccaaattttggtaactaatgaaatcttgccaaaattttggcatagttgtcaaaatttcagcaataccaaaatttagtaaggattttttttaagtatcaaagtgaacatgcccttagcaaaacactgaaactttgtccgaaatttgatccaaaacgaacggtttgaggaagcttcggacggaattcgaactaacgccgtgtttagttccaaataattcttcaaactttcaacttttccatcacatgaaaactttcctacacacataaacttccaacttttcatcacatcgttctaattttaaccaaacttctaattttagtgtgaactaaacacaactaagactgtttagttcaacgcaaagtttagattttggttgaaattagagatgatgtgattaaaaagttgtgtgtgtatgacaggttgatgtgatgaaaaaggactgaagtttggatccaaaccttgcatctaaacagtaaacacagcccaaattcgtaaaccgtcgggttcattcacttcaccccgcgtcaaacacgcaacggaccggagcgcgccgcgaagccagctcactcggtcagtcgcgcacgtggccccactccaccggccacgtcaccctccacgtcatcaaaagcattctctccctcctactctcccctcgtctactactacttcacctcgcaatctccgcccaaatccaacgcctcgtctgaacacaaaaccccgtaaaaa

SEQ ID NO: 7477 - DNA, 16482 bp, Oryza sativa
tccctctcgacgccggtggctcgctcgcagtcgcagctcaccagccgccgcccaggtcgccgccgcgccgccgctcgctcgtagctccgcacgtgcgtcgctgcgccaccggccggccaccgtcgttgcggtgggggagagggagggaggcggagagacaggaagcggcggcggcggcggcggcggcgatgaggatcgaggaggtgcagtcgacgacgaagaagcagaggatcgcgacgcacacccacataaagggcctcggcctcgacgtgcgtccccgcgcttctcctgctcctccgctctctcccccaccttgctgctgctgctgctgctgctgcagtggggaaaggtttttctcctagggttttagagaaaattttctcatggcttggcttggtttggtggtctcgagcaggcgaatggggcggcgatagggttggcggcggggttcgtggggcagggggcggcgagggaggctgccgggctggtggtcgacatgattcgccagaagaagatggccgggcgcgcgctgcttctcgccggcccgcccgccaccggcaagacggctctcgctctcggcatctcccaggagctcggtagtaaggttggttggtgcctccactccctcattctcctctcgaacaccctttgagcactgctctagatgatttgtacactctgctgtaaataaatttggaggttagattttaggcttcataatgaacaagccatgttattagcaacatatgctcaccgtaagcttgtacaaagtgttttgccttttggggatttttgctcttccgctcgtcaagaggtcgatgcgatggccctcagcgtggtgaaatggtggccgcacaaggttgtgaataccttggttttaagcctcatttcaacaacatattatacatgtgtgtgttcaagcctcacttctacatagaggggttatgtttcctgcctttcataccatagacttagtttaagaggtcttacttctatttcatagttctctttactgaagattgaatggagttaaagcatgtggccaataaaaactgatgaatcgtgtttaagtgcaataagggcaccgtggacaattgttcataataagccatttctttgtaagtttgaatcctttttgttcattagctagtgtaaacaagtaattctacatttataagggctcatctagctccagaaaggcattcatattgagcttctggtatttgagaacctatgccttattattttttagttcaactgttgggaggatggttggattaaatttcagattcacctaactaaattgctattctaaagaaatggtcgacttagcatgtttttttctatgtttttggctttcaacatttcttttaggcttggattctgttgcttgctggttcaatatatttgtttcccttccttgaaaataattctgctaatggtggatcactggaatttgatgtcaatttattagatacctgtacatttttttactttatacctcacaatctatatgagaaattctttgtgttaactataagatttttcgttcaatgtcttacatctgcttcatttttggtaaaacttccaatgtttcattcatgttgatggagaatatcttatgtgttatcttattattttactatacaggtccctttctgtcctatggtaggatcagaagtgtattcctcagaggtcaagaaaactgaggtgctaatggagaatttccgtagagctataggtttgcgtataaaagaaaataaagaggtctacgaaggagaggtaagcacaccatatatgctaatttttaagtttgcactaagatattgttcttgaatttgtgcattatttcattttctcttgatattagcacatttataactgatatgatattctcactgtctgtttctaaaataatatatatttgtgcttcattgccttttaggttactgaactttccccagaagaggctgagagtacaacaggtggatatggaaaaagcattagccatgtaatcataggtctgaagactgtaaaagggactaagcaactgaagctagatcctacaatttatgatgctttaataaaggaaaaggtatcctgctcctcgccctcctatcttgtgctggatattttagaatacactaagtgcattttttgaaattttagtaatagttggatgattgttcatttcttattcagaagaatgtcttgttgtgaatatttaatctataaagtaaactttggagaatgttaattgtaaaaaaaaaattgcatgattggaaattcataacttgtcatcgtgaagctgattagatgccttgatactgagattcacttctgttacttccattttttgcactagttgtttcattacatcagtgatacatgggatgcaggtgtcagtgggtgatgttatatacattgaagctaatagtggtgcggtcaaaagagttggtagatgtgatgcttttgctacagaatacgatcttgaagctgaggagtatgttccaatccccaaaggggaggtccataagaagaaggaaatagtgcaggtaatttggtgaattttagcctaaaagatttttgcacaggcaagtcttttttgcattgtactatctatgaatttatgttggtgataattaaagaaatgaatggatcgtgttttacaaatttgaagtatagtgtcaaatattcatgccttgaagattgaaagtagagctgtcagctatgggacattttgttaccatcacaccttgtctgaatagatatggattaccagattagaaccaactctttcaggcctgtaggtgatattgaactaaccgccctaccaaagccaaaaggattggtcttaatcccttttctatccacatttgtaaatacacctcccttgataaatggtttatacagttcacaaatcaaacactactaaataataaattcatgaccatcagtctacattattataacccttggagttcattatgtttgattaattaggtcccactggaagatttgtcctttttatcttctattttatccctcaactgttatattcctgtctaccggcataaaaaaatgggttcccttatacagcattagtgtgttatatacaggctctctgtttatgattctcaagttatatggatgttagttaaagagctgaaacttcagttatcaattttgtacaggatgttacgcttcatgaccttgatgctgcaaatgctcaaccacaaggaggccaagatattttgtcccttatgggacagatgatgaagccacggaaaactgaaatcactgagaagctacgacaagaaatcaataaggtattcaaatttcccatgtagcagcactgctgcttttaaaagtggaccacatttaataaacatgtcaggattggcatatgatctttaacatctatactgtatgttgctaggtggttaacagatatattgatgaaggaattgctgagcttgtacctggtgttctgttcattgacgaggtatcttattatttcatccttacgaattatgattggaaattttctcagtggctcattttggagtcagaaggtataaatacaaatgagggtgtgtttgtctgttgtcaaacatacagtgggttgtccttgtggggcagtgccatactgccatgctatttctctactatatggtataaatcttgatgtggtttgatttagttacttgtgaggaactttaatcgcaggtccacatgttagacattgaatgcttctcttatcttaatcgtgctttggagagcccattatcaccaattgtgatacttgctacgaacagaggaatatgtaacgtaaggtaaacagtttgatttaccagtcgaagcactctgcgctacattataataccagactaatcatgtgtttgtcagtttgtttattaccatatgctccttaaagtttacaaagtcttgttatgcttgtgtccagaggaactgatatgacaagtccacatggtataccagttgatcttctagacagattggtgattattcgaacagaaacatatggtcccactgagatgatccaggtttgattttggatcttatatcacttaggctttcctgtttagaaatgtgtttgatctttgctcattgtcctctacagatacttgctattagagcgcaggtggaagagattgacattgatgaagaaagtctcgcatttttaggagagattggacaacagacatctttgaggtacgattcttggttgttacaccgacaggtttgagaaagagagttaagatggaaattatgcagtagggagttatgttaagtggactgatcttatttcccactttcggtgttctataagcattttaaattttgtagttttagttttataaccaccaagctcatcttactgaggcagctagcgaagatgaacgattgtaacacatgttgaatctcatgtaggcatgctattcagttgctatcacccgccagtgtagttgcaaaggctaatgggagagagaagatcagcaaggtatgtgttgaaattccagcaggatattgtaacgtcctcttgttgtcttttttgccgtatgggctatggctggctgctacattcacttgttagcctgatattgttcttgcaagttttatgtatgctgaacccatgaccttgtttttaatcaggccgatcttgaggaagtcagtgctctgtatttggacgctaaatcatcggctcgtctccttcaggagcagcaaggaagatacattacttaaatttctcttgcagtatgacgataaactcgagaatttgtccctattcatgctgtacacaggtgcgaagactctttcaggagcacacttgattgatttttgcagaaatgtagaaactgaacaatgtacccctgcactgtaggcagcctctagagaatagcagcattttcgaagtattgcttgttcaaactactgtttgctgagtagatctcctatggaattatcgtgtttcttaattgtccatgctaaccagtagtttgatactgttttatctaatgagcattttcatgtcggttcttgatcattcagttcatatagagggaaatgctctcaaacttgaattgtgaggagacgctgcatatttatcaaatatcaatacccagaatagcgtcatgccctctggtactacctatcttgatcacggctagctacacagtggtttcacttattcatgacattttctaagtaatatgattatgtagcatcagagttgtatcacaagatttataatagagtggagtctactaatgttttgtatttaagccaataatggtcgttgtttctaaacagaaataacgatcgaaattcaaattattgttttgtgcaaattattggtcgtggtggtaatacgattttaccgagctatcgttgatagaacaaatgaacaatcaactatcgtacgtggtgtccagcgacgtggagtgaggctgggtcagtcacgccgcatcgggctattttattttttttgccagttcttgtacttcatagactagtcatttcgattggaatgactatgaagttgggggcaaatctacctaaaagtttgcttaagatttgacacaactattcttttttaaaaaaaaattgttcaaactgaccatataaacgtacacactataattaacatctatcactaaatacaagtatatgtgctaagtttagaacttaaactaaattagagtggatagatttaaaaaaaaagaacatagcccattgagctacgctcgcttcgcgacacaaccaaaattatgacgtgctttaaaccaaaatgagtttgaagatctcatttctatccatcatctttaaagaaacaaaattatgacaagcttcaaaccaaaactgcccatagagcctagcttgggtgattggggtcattgctcattggatactcaacgtggacatcgaggccaccgtgaagaggtcaggcagccccccggcgtggctagttagcagcctccatctccatggccaacaaagtggcagcattttcagcatgcaagaacgacaattcgagatgagacgggaaaacagcaatgttagtgaccgtttggcgttttgttccatcatttttttctttagctgccctgttcgtttcttctagaagcataggataaaattttagatactcgtggcacgtttttcaaactactaaacggtgtatttcgtctgaaaactttctatataaaagtttctctgaaatatcagattattccatttttcaagtttataataattaaaactcaattaatcacacgttattaccacctcattttacgtgaaacatttaatatttatctttatattcatcttcaggagattcaaataccagccgtgcatgctactaacttgattatgataacctaagctactagggtgtaaaactggggtctctttataacgatggaatgttatatatgagatcttttactgtttttcaatttaagtgtctaaaactcttgtaaaagtttttttgttgctcctttcacccaaaagtcttaaagcttatttattttctgaaaagaaaatgagatatgcatatttgtagtctccatatgcatataagatttgaatgaagtgctaaattagcatcttaacactggttgcatgaatgcatattttttttctttgttatatatagaatgagttaattttttatttggtcttggtgaaacaagaaatatgctataaacttttggttggagggagtataaacaagtcatcttatttatacttctataaagttacaacccactaactgtaaagcttaacatacaaccatgctatatcatcacccactagcaataattatatattcaacctcgtgaaaacatgcaacatcatttataatctatttaattctacaaatcaacatgcaaacatatccaataatcacacatcacatcattttcacaatatttttacaaatctatctaccattttataatatttaacataaacttatcaatatgttacacattaaagtgtgggtttcatttgtctgtttcatgataaatactgataagccctgatatttcatttgttttctttttgcccctagcttgattgtaacgaaaaaatatatattaaaaattacttagtaattcccacagcaaagcgtggggaatcaccttgtatataattagactaattaatcacagggctttgctgcattacacatagttatatatatacaaccagccggatatatatatatatatatatatatatatatatatatatatatatatatatatatatatatatatatatatatatatgttacacattaaagtgtgggtttcatttgtctgtttcatgataaatattgataagccctgatatttcatttgttttctttttgcccctagcttgattgtaacgaaaaaatatatattaaaaattacttagtaattcccacagcaaagcgtggggaatcaccttgtatataattagactaattaatcgcagggctttgctgctttacacatagtgtaaaccaaccggatatatatatgcagcctttttaaatcaggaacttagcctattaagcaggaaacttagccttcaaataacccaatctataacccaatctgaaattcgctcctatggagctttgaactcaggatcttatggtgctactcaggtcactgcaaccactagactatatgccctttcatgagcgtaacatcttataactgactaactacagtctaccttctttatttccattttttcatgaaacttatagcgtttagataaaaattaatttcttggagccatagaaggtttgaatttttttttaaagaaaaaggtccatggaagtattgtgctctagaagaaaacgaaggcaaagatgcaagcctaagtagtgtcatttgaaatttgtttatcttagctgttagtttgcagaaaaaaaatttgaaaatatactgttcatcgttttctttttcaaaaatataccggatggcgaatcatttgcacaaatataccatcggtattgcaggatggaagagcgataccgaggttcgcaacgggaaagtgcgatagcgccacgatatcgctctatcaatcagcgagggtgcatttgagttggcggtatcgtgtgtgggaaaagcgagatcgttgcggtatcgctctttcgtagagcgagagcgccacgtggaaaaactgacccgttctggcgatttgggagggtagtatggcgggtgggcccaacggtctcatagtttcgcagcgcgagaccgagagagttttgggatccacgttgtcgcattaccgggacacagagggaggtgggtgggcctgcggtatcacacgcgtagagcgcgataccgtatcagtgttgcactcccgatgcgcgagaccgaggagcacggagattggagagtgggcccgcggtatcgcacactcaaagtgcgaaaacatcgttggtatcactctttcaaagcacgttaccggctttagttgtgggtcttgcgaattttttttgttggtgctaaggatggctacggtatcgctatttggaagtgcgagaccgacgccaccaacacctccactcatgctcttatatctcgaggacaacaccggcctcacctgaaccatgcaatcacacctttttttttgagtaacatgaccactctttccctctactatttccatctctttctttttgcacagggtgaaatacctctgtgcactcttttatcattttcgttagtgccgtcatttcatgtcggccaccattactcagctcgtaataaccactctcttcatacaaatccaatgttgccgttttataaaaggaaaggagaggagatggtcctcactaacaatactgagtagtagagaaagagaaagaacggagtgcattgaggaggagaggaagccgcataagagaggaggcagtggagagaagaaaataattgcacgtaagcagtcagacgcgccgaaagtgtcctcgtctctttctaaatatgcatattttctctgaacaacccattaataattgagatggtgcgcacttctctctctctatatatatatatccactagagttcaaatcatagtgtccatagatatggttaccactgcatgtggttccccctatgtgatatggatctgtgctgaacatccaaatttctcaccaatttttgtaagagttctaaaattttaatcccttctcaaattccaaggtagtacaccaagcactataagcttgctacttgctacaatgtatacacacacaaacacaaccctagctagctacccagtatatacatactgtacttgtacacagcttaattaatttaattgaattgattaattagacgttgacgaagggcgagccggtgaggaactcggtgaaggcgagggcgacgaggccgagcatggcgaagcggccgttccagagctcggcgtcggcgctcatcacgccgccgctcctcgcctccgcgctctcgccgcggagcagcggcaccagcgacgccgcggagagcacggtggcggtggcggcgaaccacgcgagcccgtccccgctgccggcctgctccaggagcccgccgccccgcgacgcctccacggcgagcgccgacacgaaccccaccatcgccagccgcccgttgatccgctccggcgccggcccgctgaacgccagcacgtcccacagccccgtgctcgccgccggcttcgccctgggcgccgccgccgcggggctcggagtcggtgacgacgacgtagccgtctcctccttcgtcggctccacctccggctgcagatcgaacgacgacgtcgccccaagttagcacgcgaagcaaatcaccagagaacacgcacagtgaaaccaatcaagaacgctcagctcacctcggcctgggccctgacgacgagcgcaacacgccggcgaggcgggaagcgtaccgcggcgcgccatggcgcgccaccagcggcggctgcgacggcggcgaaggagctgctcagcgccatggtagcggccgccattgctaacaactcaaactgtcaaacaccgctagtgaggacaagcaaagaactcaggcgagcaaagctagaatgctagatcactctttctgctgctgatgatgatgcgggtgacgagacgagtataaataggcgggggatcatcgaggaggacggcgaggtggggagtggcggcggcggcggccacgtcggcgggggagggggaggcggcgacgtggagggcgagggggtcagaggttgcgcgtggctgtcgacgtggacgtccagggcaccgtgcgtcgtcggggtggggttcccgccaaaaaagggctcaggaagaatccagatggcgtgcgccagtagtcgcgggaatcagtatttttttttctgatttgctaaccgcctgtcgatagaaattgtatcctcaaatcttgcagattttggacaaccagatgagctttgagattcgtgctccaggtcttctccaactccggcgaccttctcttcttctccggcactagtgacaccctacgggttagggtcccggagtggggtgggggtgggagggggagggaaggggaggagttcgccggcttagagggatggccaggggaggcggtagcctggcggtgggtggcgggtcgggcgggcggcgaggcgtcggagccacggggagaggaagccacagaagataggaggcagtggataaaagaaataaattacacgtaagttgattagtaaaaatttgtagggtgaaggatttagaaaatattagttcatgtggtttatattagtgatagtaaatatttgttattaattatgtcggagaaaattagaggtatatattagtttttacattatatttttatacgtcgcatgcaaaaatagtaacataggaagttaataaatataaaatatttataatgtagtatattattattaagtaggataatggtaatggaggtagtttgtgtgctatgacttagagtcgatttaggtttaaaaaatagatagacataattaatttatatggtaaaaaatttaattaatgttataattaatttgtagtgattttaagttgcaatttattagttgttcatgcgatgttttatttttatatagatggccaatattatatctaacaaatgaaaaaaaaggctgaaataatggtagttttatttgtagtacacatacataagatttcatatagtaacggtgaaatatggtgtggttaaacatatgcttaccaacatatgtagttacgaacatatgtagttacgaaggaacaagcatgaatggagtgtactgaggaggaggacagagactagcaagagtggaggctacagaagagaggaggcagtggagagaagaaaacaattgcatgtaagcagtcagaactgtcgaaagtgtacttatctctttctaattatgcatattttctctgtacaaacctattaataattgagacgatgtacacttctttttatatatccaccggagtttaaattatagtgtccataaatatggttgtggttccctctatgtgatatggatctgcgtcgaacatccaaatttctcaagaatttttgcaagagttccaaattttgaatcccttctcaaattccaaggtagtacaccaagcactatcaagcttgctacttgctacagtgtatacacacacacaacccggcctagctagctacccagtacatacgcaagtacatgaatgtattgtacgtacacgtgtacagtgcagcttaattaatttaatttaatttaattgattaattagacgttgacgagcggcgagccggtgaggaactcggtgaaggcgagcgcgacgaggccgagcatggcgaagcggccgttccagagctcagcgtcggcgctcatcacgccgccgctcctcgcctccgcgctctcgccgcggagcagcggcaccagcgacgccgcggagagcacggcggcggtggcggcgaaccacgcgagcccgcccccgctgccggcctgctccaggagcccgccgccgcgcgacgcctccacggcgagcgccgacacgaaccccaccatcgccagccgcccgttgatccgctccggcgccggcccgctgaacgccagcacgtcccacagccccgtgctcgccgccggcttcgccctgggcgccgccgccgcggggctcggagtcggagtcggtgacgacgacgtcgccgcctcctccttcgtcggctccacctccggctgcagatcgccccaagttagcacacgaagcaaatcaccagaacacacacagtgaaaccaatcaagaacgctcagctcacctcggcctgggccctgacgacgagcgcggcagcacgacggcgaggcgggaagccaaccgcggcgcggccggcggcgacgacaccacgccatggcgcgctaccagcggcggcggcggcgaaggaggagctcagcgccatggtagcaaccgccattgttgctaataataactcaaattacacagcagatgaacgcggagacgcgcgcgaaacgatcgatctggagaagcaaagaactcaggcgagctagctagatcactctttctgctgctgctgttgctgctgctgctgatgatgatggtgcgggtggcgagacgagtataataggcggggggatcatcgaggaggaggtcacgggggcgcgcggcgaggcggggagtggtggtggcggcggcagcggccacgtcggcggggggagtgggaggcggcgacgtggagggcgagggggtcagaggttgcgggtggcggtcgacgtggacgtccagggcaccgtgcatcgtcggggtgtggggtgggcttcccgccaaaaagggctgaggaagaatccagaaggcgcgcgccagtagtcgcgggaaagggtggcggtttgtgggcccacgtgtcagtgattggtgatatgtggttgtgaacttgtgatcaaatttgtgctgattgtaaaatttatatttctttcgtctcagaggataatgagacttctagggcttttttatggaggttaaggttctattaattggcacaactccaaatcccatatacatattacatttaaattttttatgttgaattatattgttataaaattttatatttcatctaaaataggaacaaaacaatccatttaaatgttatcaacaaattcgcatatccaaattcatggattttgtagctaggaatactcagctttacaaaatctagcatccggagtcgtggcaaacatggcctaggaagagatatataattgaactactgaagtttgtgattgtttgacatgagggagtagatgccaaagttattgtgtttgggaacaaatattgaactgttatattttggagcggaagcaatacaatttctttaaaaatatgaatattttatagtgacaattttgaactgttatggattcactttgaaatatgaatgtattggtatagtctttaagttcgaaatctctttttagtttgactaattgccgatcaaaatctgaaaagtttaaacctatttaaatcaaagttcagtaccatatatatgcacctcatggaaactatactctcttttctcatgcaattcaaagcacttctgcaatcagattaagatcagatgtcattacgagaagtacagattaatattagatatcattacaacattgcacacactaagcacgactacaaatacaggcagaccatctgacaacacggaacagaacatttgtggatcatcaacacctttactcattttacatgactggcaggctatatggcctaacaacgaacaaatcactacggtcagtaacacagggagggaggcatgccagtagcaagcagaaattcaactaaaattcagttaaattcacatggcgaaagctgacagcaatgtggtataatttgaatgaaattagctattccccagccgttgggccatttgagttgaggtaacccatcttctccgacaacacattcatgtcgtcctcgacgaccgggttgtcgttctcctcaccaacaagcccttcgttcagcagctcctcccagaaattgtcgttcaactccccctggggcccgatctgctgctgttcggaggcgccgacatcgaaatcctgtggctccaccagacctccagcatccatagctgagttttcaagatcggagggaatcccatcgatgaggaattccaccgactcctggggatcaaacaaggccggtgactcttgctctatgctactgctagtgccgacgtcgtcaacttcaggtccctgatctatgcgacgccttcttttctttgaaatggcatcttggagctcctttctcatctcattctgggacataagttgttttaagaactcaggatttttcatgacacgcgccaagaatgccatcatctgctgttgcctctgctcggttccttgcagcctatcctccatggctttcagatttgcctttgtattctgctgctcctgccttagcttcaccacctcagccatcaataattgcttgtctctcttcagccggtctatctcagcatcatatccaaagtggcccacctcaaggtatggcccaagggattgctggtttgaagcagtatgggaaggtggttttctacgcttgatgttcttgagaagatgtctctgtccccgcagaaaattctcatttgcaaattcccaccgatcaggatccacctttctgaaaccctgaaaacaaacaaacaattcttcagggaaatgttagttgcaagagacatcttagacaagtatgcaacaggatgctacttctttcttggtagggggagaattacacactaatacttctctctcacttttttttttttgcttttttgttaagatcacaagttgcagcagtaccaacaaagatgaagctacaagaagtatcttttgtgtacctttctggaatgcgtttcagttcaatttgcaaggtttcagtttgtgcagttttcagttctttctgcactaaattcatcaagtttctccttcaatcttcatcgatttcataagttggggcaaattacaaattcagtcatctgttgccccattccagagggcacaagttaactatcaactctagcataagaattgaggatatttattaaaaaacataaacatattgatcttatttacactatttaaaaatagcccaacgtgatgcttatatgaagttcaagtagttgacggtgacgcatagcataaaagatgttggtacacaaccgtaacatgcccaaaaaaaaggttcaaaggatggggacaccaggcacagcatgaaaatggatctccattactttgggaaatggagtccagatatgaagacctgaaatacagtactacagcacatgcaggtagggcaatgctgcatccatccaaacaaacatcgaatcatttcccctgagcgacttttgtttctgttaacagcctttttcttacaattatgacagtggcccaacaaaaatgagaaaagtccaaattttcagatctaggacaactgccattcaactatcatttgtccatacgttgcttgttattccacagaagtatgtcaaatctaggatttctttgtgcttttaaaaacaaaaactctaaatagatgtttatatgcgcttgtgtaagttagttcgcttctctgatgaaatatcatgagacatagtaagtgtttcccagagattaaatatccttatcaccaaaaaagatctgagatccctactattcaaccataacaactgaaaagaacccggcaaccttaaatgcctaactaatttcctctgttaaactttgaatgaccacaaatgacaattcaatttggatggttacaccaacttattactccacaacatatagtttatactgcaattgtgggggttgttccaacaaccaagaacaagaacaatttcagctacattcatcggcgctagcggcgaaacatcaagaactgaaccaggttgcaaacaagtgcattgcaggacaaaatatagagggagggggagggagctgtggctatgggcttacataggtgttgagctgcctgacgaagctggagaagttgttgtgcttgaagaacctggggagcaagacggtggcgaaggcgtggggatcccacaccacgaagctgttgctcgtcgcgctccacgacacggcggcgtcggtgccggcgtcgtccaccatgtcgtacgtcttggtcaggaacggcggcggcccggcgtcgtgcagcccctccatcggcctcggcgccacccccgccgccaccgccgccgccccatcctctcccgccaccacctccaaccctcctccgtcccgtggctctcctcctccttcaccgcattcagcattggatcatccatagctcagaaggcccaaaaccccggtacagtacactgaacctccttgtccggctccgacgccggcaatggcgacggcgaggcaccctggggctgcagg

SEQ ID NO: 7478 - DNA, 8215 bp, Oryza sativa
  unsure (1)..(8215): unsure at all n locations
caaaagtcaagtgaatgcaaccgcaagggtaaatggcattatactttctcatatggtagcgtcatgccaatcacaagcagcccgcttttggaatgcgttggcatctgatgaggttcagttcattcatctcattagatatgtgatcattcagccagatagagttagctcaaatattcttctgtatccagtacatgggcttacccttggctgcataacaccccccccccccccccccgccggccgtcctcctccccttctcgccgcccacccccgcgcgctcgctgcccgccggcgacgagtcgcggccgccatcgctcctttctcccttcctctcttcacattagagggtattttggtctcaaaactgctcaaagtggcaaagtatactaatgataacgtattgagtggcattttatcctttgcaatcttgtggagtggcatattatccgttttctcaatcaaacataccaaatgcccagccccggttttaggtgggcaatccttttttttatgaattgtttttcaatttaattttaggggctttcctagttgctttagggcctgtttgagggagcttctagctactgcagcttctcaaagaatcagaagctcccccaaacaatccagcttttgatccagattctgataagttgtagttgtagaatccagaaaatgaattagaagccataagctggaaaacccaatttttctagattctaagaagctggctatcaaccagctgcttctcagaatcttaagctccgcaagcaggccctaagggttttcctagttgctttttcacggctctccttttttcagtggttgctacttagacgttttaagtttgagtaaatttattgaaaaatttagcgatatctaaaacaccaaattaattttattaaatctaatattgaatatatttagataatatgttttggaaatactattatattttatataaattttgtcaaactataaaaaaaatcaaaacggcttataaaacggagggagtaagaagataactaaagcaaatatatgaatagacctattccaaaagaaaatcaagctacaaaattcatttgttttggactgtaatctaaaactagggccaacagggctctgaccattctaaaactaaggtatggcaaatttctgccataggcactcggttttttttcttttcaacttgtatcttcactaagaaatcaacagggatatttaagattatttttgcacatgtggacccaaaatatgtgtataataagctttcataaaagctcagcaattgccaatcaacttatgttcgtactaactttttttaaaaaaaactatcaagtaaaatttggcaaattcgattctaacagttttaaaagctattttcgcaacatgcgttccagccaacaagttaaacattcaaaatggagacaaacacaataccccatattccaaccatttttcgctatattaagggagaccaccatgtcccattgtccctcattttctcaatttgaaacaacaacagccgcagatgttcctcagcaagtccaaaatccatagaaactacagtttcagacaaaaacagcgacaacaactactactacaaaacagcatttgcaggttgcaaatttgcacctccaaatgctctcatcatgttgttaggatatgctcctactactgaagctccatgttgacaagctcatttgcatccatcagagacgatccccatgctgtatattcattcgaacttgcgccgccaccacaagctctattctgaagatgctgcaagctcgccatctgttgctgctgcagctgcactggatctgttgggtcaatcttctcgacagaatccacaatctggaacgctggagaaacctggtgcatgaagctgttaacaccggcattgttagcgttggagaagtagttcattgggttgttgttctggatcggcacagaagcatcagagttgacattgaggggagattgcatgtcaggaatggcctggtgaagttgtctagcccctgtaaccatcttcacactctcctctgccatcctcacctgcaatcatgtcaagatgttagctaacccacatcgcatggttcatgaattttcagttgtggtctagaagcatatggctataagatacgacaccgcagtagtgtagtgtagctcaggttctttgttaaaattgattgtgatccattgtgtgaattggttatcaccattcggcaagcgattatttacacctggtacgttgcaggaaaaagaaaagtagttacacccggttgtttcaagacaaaacaagtgagtctaattgttgcaggttataatagatggcaaacaacttaatccttcgaatggagcaagaggacaacatttgcaatatctcctgtaccaaattttaagaacaaatgctagaagttcgtttcattccaagaaaatttggtatatgtttgatatgtagaatattccggttttctacaccatgaaagatgcacaatactgaccagaatcaatgcacatggataattggatacctatttgaaagagaggttcagttcatacagaggactaaaaggcacttaaacagttgcatacctttgctcttagggcttcaatgtctgccattagtaccctattgtcaatagcagcagcactgtacttctgatttgcatcagcaagacgcctcaacagagaagagttttcaacccttaatagtgatacctgcaatgatttagcaacaattacacttgttacttacatattccaaaactttgttgtgcagtcaaatggaatagtgtaaaacacaaaacctgctcctccaggtcttttaggcgagctgcctttctgcttcttgagcgtctagctgactcccggttggattccttcctgaaattggacaagaacacaagctcaaatctcaaatatccggctgtatttattacacaaaaaaaggcgacatgaatgtctgactgctgcgaaaaaaaagaccacagtagataaactcaatttttcatatgtagaaaaagcaactagacacaacaggacatgatattcccagcatgttatgaaaagcaagaagcaaatgcctcctaaattgttctaatcatacacgttgcatttttccttttttgcatgaatagctgcttgcacggaaacaataattatccttaatgcaccagcttgtaacaagcattaccaaaattcagtcaggtatataaagcattgaaacacctagcaagcattagctcaagcatttctaagaaaaaagtgagaatgttgtatataatcaaatacatccagtacaaacatgaaacacctagaaagaaactaaggatccattatcttgataatctaaagcatattacttaaaagctatttctaagaaaaaaggaaatcaatagatgtaaaagtcccctaatttctaatgctaatgctcagtgtttactctttgtatgtgttgaattgaaaaataaaaatacacaagcaaaagaatacatattaccttttcttcactttatcttcttcatcaaggatcatatttcccattgcctctgcatctccttccatatcatcatcctctgatggtgatggctcccttgaggaaccactcgtagcttgcttggcatgagcatctgtattttgatttacatatgggcctgatcctccatttgggccaggacttaacttggtctgcactagtatcccgttacctgaatgtgtcgaaatagggggaaaatccaatcagatatatataatatgaaaactacattacgcaaaaattagatttgcttacaacattagagattactcataagtcataactcataggtactgagaagatttaactaagcacatatgcataatagaataccttcaatgcacttctgtgaactcaggatggaaccaactatactcagtgatgttttattgcctagaggactctcagaatgtattgcaccagaggcctgtggatggatggacatgccaaaaattgaagtcagaatgcaaagggacttaataactatcggagctaaacacacactctcatagttaattagttctaatggcattataatcttatatagggaaccgtttcacattgtaaactgaaatcaactagcaaaagctcagatcaacatgttctgtagtcatttgtaaactgaacccacataatgagttcaaagtatgatatccaattgcaaaaattatataccccacttagaaaactaacataaaaagaagatattttctccggtccaacaaaaagtacctcgaggtaccggtacctcacggtaccaaatcattttcgatcgttggatctaattaggcaggatgtgcattgttagatccaacgatcggaaacgatttggtaccatgaggtaccagtacctcgaggtactttttgttggagcggagcaaatctctaaaaagaaagctctgcttccccatctacaatcgactggtgagaatttctaggtccaaatttaccagattccaatataacagtttctttttttctactaaaataatttcatcttccaagggtatgtgacctaataattccttcaaacaacaataataagaaaagtaatgcaaatatggtaaaatacagaatttccaaaaaatattccatgaatcataccgcctaggaccacccaaaataagtgcaatgacctatgatctatacatcatttttgcaacatgtaaccaaattgttaactttgcactcaagcaatgcacggctccaagaagtcacataaagtctctacacctccatgcaatcctaatccatattactcctaaatctatacacggaaataatataaatattataccacaccccgacaatattaaagtttgtctcatcccactctgacaatattaaagtatggataagaaagcacacacgtgagtagtgcctgggcttacgatgcggatatcgacatcaacgcgtgctcttataaaattaatttatactccctccttataatataagagatttagagggatgtgacacatctagtactatgaatctggacagagagccggtccagattcatagtaacagctaggatatgtcacatctatgctaaattgcgaccatctagccacagtaatcacaggaaatgccctaaaaattgcacttaattacgccacagccatcccatcaccaccaccccaaatggtgaacccaccagtacaactgtacaagccatgaagcaagcaaagcaagcagcgatcgagatgagagagagtaccctccacatggcgacggtggcgaggtcctcgtccagcttccgcttcagcatcgcgttgtactccacggggtccatcgccgcgctcgccggcgccgccggaagcgcggccgcgggcatgggcatcacccccaccgcctcacgatcgccgtagcccctactccagcgcgccgccgcctccgccgccgccgccggcatcgggctagggtaaatcgccgcgccgtccgggctcgccgccggtgcagggacgccgtcgagctcctccagaaacctctcgaggttccaccccgacgggcaccgctccagcaacccgccgccgctcaccgcgccgacgtcatctactccggcggccgccgccggctgcaccggcggcggcggagcccacagcgggtcggggatctcgtcgacggcgaacacgtgctccattgcgctctcggacgagtttgaaatgaattcgcgaggggttttcgaaccgaaatcggggcgaaattgaaaacgctggaaaagtttgggagaaattcgatcaaatgctttggaatttggtttcgcgggaggaagcggagaggaggaggcttcggagagaaggaaatggtgggaaagctacggctacgcaacccatgggtttttttttcttctctttttttttcttttttttttcaattttgaactgagttgagagggtgctctcctctcctatttatataggtttgtcccctctttagaagcttcaagaaacgtaaaaagcaaaacaacccgcacgatcttgagtgataataccgatataaataatttggacgtgttaacagaggtttcaacggatataaagtgaaacccacacgatcaaagcgataacaacgatacggacgaatacgtttttattaggaaaaagggttaacagaaagcgtgcaagtaagctacgatggtatggtgttcctagcacaggtgtagcataattttgacaaggttctataaaggcatggatttatttgtttttatcttatcaaagtttttgagtgagggtgtagattacgcatccttaatttgacaatgataatataaggacaaatggctttctacagaaaaagaggaaaagtataacagaaagggtagcaaagacattcgtgaataagagtagtgatgctacttaagaaatgatccatctctatttactatgacaagtgtctatagtaatccaaactgattatatcaaactgacctaacaatgatatttcagtttgtaactttataccattgtcctaagaaacgtgccctacacttatggttatgctagcagcttattgacatgtatcatccatgttttctgctaactttttctccccctcctctttacttggttgctttcgagtttaatttcagaaatcacaagaatgcataggtataatgtggttgattccatgtgataatcaaaatggggacatgaaatttaaaagggggaataagatcagctgaaagtgcaatatgtgtcgcttaagcgcccattttgccacgtcaagtttttaagtttcttatgttctctagcatatttaatacatactacttagtcttttagatattattagtaacacaagcacatatgtattttatctttaaacgttaggaccatatatagaacatttagctccatgccatttccacattagccaattaaattttattcccgtactttatattttgttttagatattaattaatatttacaatgtataaaaagtaaagaaaattgttaaaatgtgtaccatgacaatacaatttttttgcactaaattctttaatatgtgtttattgtcatgtattattgtgtattccattcatcaacctcacatgcacatttgcagctttgaatctttctagtatatgaaaaagaatttggttatgcactacaagtatgtacactgactcactgaggcatgatgactacttgcaataatttcataagctttgcatgtactttaacgcatttcctatcaatgtagattaattcacccacaaccatacatcttaatttgtttcaaacttgaaaaattttagagaattgacaaaatttgtatcatagtgttgggttacatatccaggcaaagctaacaagtatttgtaaactgagagggtaaaatgtaaaaaagaaaaaagaaaaaaaaagaagacgaacatgttctaaagtccccatatggtgtagcacaatgtaatgaatttatcatgttctcagaaagatgtgagctgagggaaatatgtggtgaatttataaacttgttttgatctgatgtaaggtttagttacacataaaaccaactagataggtaaaaaaactagagtaaatttcagaaaactgcagttttattgactaaactatcactttgctgcaacctttgcgacacttttcagaaaactgcaacattagcgttgaaaattatcacatagctgcatttttttcaggattccctgttactgacattccgggcccacatgtcatacatatatgctcgagagagggagaaacggagcggcacgtcagcatgccacctcatggcttttttttttactgtagcgatgccatgtcagtgcgtgttcgggcggaaaaaattgtggtccggctgcaccatttggctcggtcaagggcacaggccgacagggtcaaaggcaggtccaagacctgataacgacacattactactcccccaattcccaccgtcgccacagaacgctagaatatgtgcacactcacatctataaatgcacacacacatnctactcctatgagcaccttgagaagattgagtccaacatgatgaagtcaccacggatgtctcgctggtgatggatacggcacttaccactgacagaataattagccggaaatgtgagcaccccatgtaaatttagaacttggaccccgatagggtggtttcaagaaaataaactaacccagtaaattatacccacct

SEQ ID NO: 7479 - DNA, 16948 bp, Oryza sativa
ccattgcatatgatgtttaagtagaaccatctataataagtttgtgtgacagtgttaagaaaccatttgcaataaggtgtccctacgacttctttttaggtagtggatgttactcgattctcttttttaatgttgtcacaacccactaaacaactaaaactcaacatgcaagcatattaattattattagtgcatcctaaagactaacatgcaagaatgccacgtcaactcaataggtacctaaagctcaacatgcaactatagctattacatatacaattttattacatcctaaacctcaacatactaggatgctaaattatcattcctcacataatttttgtaatattaatttcaatccaaaccaaatctatccatgtcattgtcatgtggggcacggcctatacacggcgtcgccgggcgcgagatgtgcggagagctgcggagcgagccgcagcgcgtgtcgcggcgcagagcgcgatcaccatgaccgtggatggcaaggacgggctcagtggctaggatcggagtagccttgattctaggagggtttgtttccaagttgttagcgtttatttccaagttagttagccggagggctatatactcttgtaccgaaacatttgagaggaaagcatgaaagttatcgtctaatctccctcttattctgttaagccactagctgaggggtataacctcgcaggtgaggactggagcgcgactacgagttacgtagtcgcggcccgccgtcgttgagcgcccaggcgcttgacaacctggtatcgggatctcgtcgatcctcggcgtccgccgccgccgcgcctttccctaccaccgccgcacccgcgtctcccgaccccgcacccatcaaccctagtccaccacccatcactgccaacaccagtccaccttccccgtcatcctcgtcatccgtcgcctccaactccggtgacatgggtgacaacggcgacctcaaggccgcgatcgacgccctcaccaagaacgtcgccgccatgcagtcgtctatccaggccaacgccaaggcgatcgagaacatcaccgcatcatcctcaggctccggcccacggcaccactccggcgagcaacccccagatcgcccccccaagcattggcgcccggagatgccgcgctacgatggcaagactgatcctctcaccttcatcaacaagtgcgaatcctttttcttgcagcagcggattatgccggaggagcgcgtctggatggcttcgtacaacctccacgacgacgcccagctgtggttcatgcaaattcaggaggatgagggcactccgacatggccatgcttcaaggacctcatcaatctgcggttcgggccaccgctccgctcgactccgctcttcgagctctcggcctgccgccggaccgggacggtcgcggagtactcgtcgcagtggcaggcgctgctgccccgcgcgggcaaactggaggaggcccagaagatccagctctacaccggcgggctcctgccaccgcttagcctccaagtccagatgcagaacccccagtccgtggcgtccgccatgagtctggcacggcagttcaagctcatggccgaatacacgaccgcgccggccaaggctccgggccgcggcgtcctgggcgccccacaagcgcgtccggctctgccggcacccccgccgcaccctgacaagacaccggcggtcaccaaccagggcgagggccgccaggcgaagcgcctcaccaaggaggaacaggcggaacgccgccgccttggcctctgctacaactgcaacgagagctacacccgggggcacaaccgtgtttgccggcgcatcttccacattgccggggtggagctcgacgacgacgccgccgccgacgctcatgaggagccgaccacggaatcgccggtcttctccctgcacgcggtggccggcgtaccgcgcggcgggacgctgcagatcgcagtcaccatcggcggtgcgccactcgtcgccctcctcgacagtgggtcgacccacaacttcatctctgccagcgccgcgccacgcacgaggcttccggtggagtccagaccgcggctcacggcggtcgtcgccaacggcgagcgcgtcgcgtgtccgggcgtcatccgcgccgcgccagtcgtcatcgacggcaccaacttcgacatcgacttgtttgtaatgcctcttgcagggtacgatttggtgctgggcacccagtggatggccacccttggcgagatagtctgggacttcgccacgccgtctatggcgttccacctccacgggcacgccttccgctggaccggggtgacgtctgctgctgcaccatcgctcctctctacggtggccagcgcgtccctcctcgacgagctgctggcgtcgttcgcggacgtcttcgccgaacccgtgggcctaccacccccccgcggccgcgatcacggcatagtcctcaagccggacgcggcgccggtggccgtccgaccataccggtacccggcggcccacaaggacgagctggagcggcaatgtgccgccatgatccaccagggcatcgttcgccgcagcgactccgcgttctcatcgccggtcctcctcgtcaagaaagccgacggcacctggcgcttctgcgttgactaccgcgccctgaacgccctcaccgtcaaggacgcgttccccatccccgtcgtcgacgagctcctggacgagcttcatggggcgcgcttcttcaccaagctcgaccttcggtcggggtaccaccaggtgcggatgcgaccggaggacatccacaagacggcgttccgcacccatgacggcctctatgagttcctggtcatgccgtttgggttgtgcaacgccccggcaaccttccaggcgctcatgaacgacgtcctccgcgatcacctccgccggtttgtacttgtcttcttcgatgacatattgatttacagcaatacttgggccgatcaccttcgccacctccgcgtcgtcctcaccatcctgcgccagcatcgcctgttcgtgaagaagaccaagtgctcgttcggagtcaactccgtcgggtacctgggccacaccatctcggcgtcgggtgtggcattggaccccgctaaggtccaggccatccacgagtggccacagccccgctccgcgcgtgccgtgcgcggcttcctcggcctggcgggctattaccggaagttcgtccacaacttcggctccatcgccgctcccctcaccgcgctcctgaagaaggacgggttcacatggactgccgacgccgcggcagccttcctcgccctcaaggaggccgtgacgaccgcgcctgtgctggcgctcccggacttcgccaagcccttcatcgtggaatgtgacgcgtccacgtatggcttcggggcggtcctcatccaggacggccacccgatcgcgttcttcagtcggccggtggcgccccgccatcgctccttggcagcctatgagcgcgagctcattggtctcgttctcgccgtccgccactggcggccatacttgtgggggcgccgcttctacgtcaagacggaccactacagcctaaaatacctcctcgaccagcgcctcgccacgattccccagcaccactgggtgggcaagctgctgggatttgatttcaccgtggagtacaagtccggcgcgacgaacacggtggctgacgccctgtcccgccgggacaccgaggaggcttccctgagcacgatcatggcggtctcgggaccccgcttcgacttcatcgaccgcctccgccaagctcaagccagggacccggctctggtggcgatccacgacgaaatcgtcgctggcacacgggcggcgccgtgggcgatcacggacggcctcatcacctacgacggccgcctctacataccgccaacatctccgctgttgccagagatcgtggcagcggtccacgacgatgggcatgaaggggtccagcgcacactacatcgcctccaccgcgatttccattttccaaacatgcgtcgatgtgtgcaggacttcgttcgggagtgcatcacgtgccagagatataagacggagcacctccaccccgccggactactgctgccgctgcccgttcccaccgtcgtctgggctgacatcgggctcgacttcgtggaggcgctgcccagggtaaacgggaagtcggtgatcctctccgtcgtcgaccgcttcagcaaatattgccacttcatcccgctggcgcacccgtacactgccgagaccgtggcgtaggcgttcttcaacgacatcgtgcgcctccatggtatgccgcagtccatggtctcggaccgtgacccggtgttcacctcgctgttttggcgcgagttgatgaggctgatgggcgccaagttgcacatgacgtccgccttccaccctcaagcagacggccagacggaatcggcaaaccgcgtcatcgtcatgtacttacggtgtttcaccggcgaccgcccccggcagtggctccggtggcttccctgggccgagtacgtctacaacacggcgtaccagacttcactccgggagactccgttccgcgtcgtctacggccgcgacccacccaccctccgttcatacgagccgggcgaaacccgggtggctgccgtggcacgtgacatggaggaacgagaagccttcctcgccgacgtccgatatcgcctggagcaggcgcagttggtgcacaagcgccactatgaccgtcagcatcgccacgtttcgtaccaggtgggtgattgggcgttgctgcgtcttcgccagcgcaccatgtcttcactgccacaagctacctccggcaagctcaagccgcgcttcatcgggccgtacctcgtcacggagttgatcaatgacgtcgccgtccggttggctcttcctccccaggcgcgcatccacgacgttttccatatcagcgttctcaagaagttcgtcggcgtccctccagcagcgctgccagagctgccccccatccaccacggcgtggtcacgccggagccggctcgcgtggaacgggcccatctagcgcgcggcgttcgtcaacttctcgtgcactggcgtggcgaaccggccgaatcagctacttgggaagacctcgacgccttccgcgagcagtatcctcagttccagctcgaggacgagctgattcgcgaggaggggagagatgtcatgtggggcacggcctatacacggcgtcgccgggcgcgagatgtgcggagagctgcggagcgagccgcagcgcgtgtcgcggcgcagagcgcgatcaccgtgaccgtggatggcaaggacgggctcagtggctaggatcggagtagccttgattctaggagggtttgtttccaagttgttagcgtttatttccaagttagttagccggagggctatatactcttgtaccgaaatatttgagaggaaagcatgaaagttatcgtctaatctccctcttattctgttaagccactagctgaggggtataacctcgcaggtgaggactggagcgcgactacgagttacgtagtcacggcccgccgtcgttgagcgcccaggcgcttgacagtcatcatttctattgcatttaacatgtatccatacatcccacagcaaagcatgggacgtcatctagtttacaatatggtttgaccattcgttagtgattaatgataataatcgtatttgtgacattatattttggtaaattgtcttgaaattaattaagtcgatatatttttcttgaacacattgaagtcaatataataaactatagtgcagttactcttcttttataaaccattgacaattttgctaagtattgtaaaattttgtcctcaatagataagagatttgcatgttgccaaaacaatagaagacattggattttacggaggctttgtaggtaagaacccctccaaacaatttcaatatggttatatccaatgattagatgtgtcaagctccagttgttatataagtaataatcattcttttgtactcagtcatccagcatcgatgtcatgttcttaatatttgtaggtgcttcatatatgcttggtagagctttaacttcaactatttgggggatggtagcagatcgtatcggcaggaagccggttattgtgtttggaattttcttcacgttagaaatttttttctctatttgtattgcacctattctttgttaccttcatttgattcattgtattgcactaaatatcttaggctggtatttaatactttgtttgggctaagcacgcagtactggatggcaataactacacgttttcttgttggatcattgaatggtttacttggcccaataagagtatgattactgactgaatcagaactctattagatatttaaggatgttaagtttagtaacttgggtctttgatctttataggcttacactactgaagtttgtcggcctgagcatcaagctattggattgtcacttgtaagcatacaatattttatagaaatatgttttcactactcgctaatgcaacaactcaatttatgatgtttgttcctctccattattaggatagcacatcatgggcaatgggtcttattattggatcagttattggtggatatcttgcacaggtataaaaaatattagtgatataggaatttaatatgcacttatccactaatattattatgacactgttattttgtctgatagccaacggaaaaatatccaaagttatttcctggcaactcactattcggaaggtatttagtatcacatatgaatacggttataatacatttattaaaaaaaacagttacaatagacaagtggcttcaacttactgtttttaaaaattcttttcataggtacccgtacttattaccttccttatgtatatcggtcttctgctttattatctttataagctgcatgtggctcccggtatgtgcaacctttctatgttattttgctaaatattcgatgtgatgcacacttatgtatgtttttgcaaatatataaaatagtattactttttctacttgaaaatccataagaagatatatagaattacaatggaaaacaaatgtttgaatatttaagcacgaattttgcaattaacaggagctgttgggtgattaagcaatgaaatgtcacatgtggagtggttgtttgagtatggcatatttttaacttgtatgctttcatcgaagattggaagcataaacaatatatggattagttattaaaagaaattgcatgacataatatttcaggagacactgcatgatctcaaagtccacaaaaaggacgatggaccaattgaatctccggttgcacattttgccaaatctgaagaacttcttgagcaacatattactccaactataaataagaatttgtttaagaattggccattgatgtcatctatcattctctactgtatcatctgctttgatgatatggcatatacagaggtgtgtatttaactactttttagcaataatatctatggtggtgcttttaaaatatatggatttttaatagaaacaatgtaatatagtgtttatcatctaccagcaaacacaagcattgacaaaaggcataactaaacatccatacttctttgattatggtaatacaaaagctgagaccaactaaaaatatatattggttgcctaaatcaatacatatagtaggagcttcccctatggtttctaggtcgaaaaaagaacttccatatagttatatattccaatgcctttactgcaattaataatacttatagttcttgttacctgatccaaatagctacattttttctcagtatttatttttctagtcattattgcatttaatcatttcatttaaattcaactttatatgggtacaataaaatgaaatagagagatatgtatagcctttaggctgtctccactaagttgatgagttgattatagatatttctttatgcaaagaatgttttgtttctatggaatttctctaacgtttcaagtcacattttagatattttctctatggtctgaaagtgataaaaagtatggtgggctaagtttctcccctgaggatgttggtcaagtacttgcaatttcaggtaaattctattcataattgcactttccatgtcaactttttaattacatatcaccaataccaattgtcttaaacgatttcatcttatattttctctttctataggtgtgagtgttatgttgtatcaaacatttatttatcctaatattgagaaaattcttggaccaatcaatacttctcgtgttgcagcggtgagttcaatattgcaagttagcatgattttttttacatatgtttaaaaaaattgtacatatcatgattaaattttgcaggttctatctatggttttgctttttacttactcacctatgacgcacctcccaagaccttgggttcaaatagtactaaatattgtttcggtacttaaaagtaatcttgttgtgagtatcaacatgcttgaaatatttattgatattgcaacatatatttgttttgtttctctatgtattagagcaagaaaaaatttaaatatcaacaacaatataggtatatatttcttgcttttgttgaacatatttcataacaacatttcatgttttttgattctctagaaaaagaaaatgtttgtttataaagaatgtttctataataattagaaaaatacatgaaattatcaatgtcacatagccaaattttaatttatgagttcacctaaagagtttttcataggattattgcaattggatgttatatctgatttcttttcaatatctgaaagaagcacaaaaatatagcatgggtcaatatcttaattactaacatatttttcctattgttatggttattaggtcaccattgttacttgcacgtacatacttcaaaatgattctgtggtatgtgccactatatcatagtttaattccttcagttttattataatatcttctttttaagacattgtccctcaatggaaccataagacccaagatcaaagaggaacggcaaatggtttagccaccactctaatgtcctttttcaaggcatttgctccagcaggagctggtattgtgtaagtattattttatttctagtgtttatgtttgtaggaaaataagcatcaattctaacttacgaatttcaaatggcatgaagctttcattccaaaaatgtgcactagatatgttcccttttggaggctgttaagtaatttacatttttttttattcaacttggtatacatttggaatgtacaagtgccaatctggtataaaatagtcatctgttaatgcaggttttcatgggcgcaaaagcgtcaacatgctttcttctttccaggtattgtgaactagtactatttgtggaaataactttaaaacttcacattcttaaataaataatattatgaatcttgtaatatgactaaaatttagggggtatttgacacagcttcagatctaagactttttagagctgggtattcctagctccataaatccatggatttgtatctacaatatatttataacatttggacgaatcattttatttaaattttagatgaaatataaaattttaaaccaatataatttaacatacaaacttcaaatcaagtgtggatctgagatctggagttgtgcccaataggaccttagacactggtacacactgtctggtttgttctcaaattctttccttcgccatatgataatttcatatcatgtagtctatttgatcttctctacccattttattgttaactttcttttttgggtatgtaggtgatcaaatggtgttcttccttttgttcattgtcgagtttgttgggctggtttggacattcaagccttttcttgttatgccagaaaaactttctttaaactattcctccaactgagatagagtttcttgagaagttctgtgacatggactacaaagagtttgtatctcctaggtaattaaggcagcctttgtccaccttcttctgcaatttggggagctaccgatagttgacaacaaagggtggacccaaaccttgggccacccaagcagtggcctggggcctggaagtgaagacccatataagctcatctgatttcaccatgtaaaaggatctgagctaaagttggagcggcccagggcctgtctaaagtatgggtccgctcccaaccatataaattcttgttgaagaattcgaaatattcagcaagaaagaaaaatggaagtacaagacgatgaacataaaaattgcgtagttctaagcacgcatccaaaaactgtttctgaaagtggaaaccatgtgtttttttaaaaaaaaataatttaaattgatagtgttgacactaggaaactggtggaaagcctgccgccggctagtaacctaatggactttggacgatcacttatgattgtttttcttcttggtcattgatctcataaagtttgtttcaatcaatgagatcagaatagtttgtttcaatcaatgagatcagaatattaatttccaatcagatatttcctttaccaaatttgtccatagaatagtttgtcatgttcgcgtaattgtaaacacgcatcaatttcggtcagcaattttaaataggtcggttcaccaaagaggcttgtgcaattaggattgtatatatcataccattacatatagatgcttgaagatctgactttaaaggtatatactagaaaatagatgctttaaacccatacactcaatcaagcggctactctcggggcattgattccaggggtgccaaggtgcaagatcgacggatccggagatggctaccaaactccagcatctgccatggtaaaggtggaagcatggaggtctcggcatagccgtcacgtctgaccagcgagatggttgcggtggtgtgagcttggcaagcagggcgttcaccgccattgaggagtccaattgatcaacaagtcttcgatagcactccaatattcacggaagagccatttagtgcgagtgccatcgcttatacaatcaagtattgcagtcactgccaccaccattgctcctatttaatctcattgcgtagctcaattcttctttcgattgtcaactccttatttgatttaatcaggtaaatgattcccctataaatgttgtttgaaactttttttccttcattagtttgactacaatattgtcttgtttagtgctaaatcatttgaaatgagaccagaattgaagatactggagttctagaattgtgtggaaatagttctttctaaatacttactcttggtctcttggggaaagaaagagagacacgtgtcaacatataattgtgcatcatcttaaccaatcagcgagcagcaaccttgccggcttgagatatataaagatattgctgaaactgcccgttatatagtataactacctagaatatataaaaaatgtgacttttatcccaacacttcccaattctcatgctacctctatcatctactaacccttaaaccgcaccacaccatccattaatgagggcattgcagatcttttaccctaatcgttaatttctccaaaacatagaaagctatattttaggacagaccaagtatctaaagcatattgtgattttctctaggtcaggagtgatgtacgtgtgcccttgaaggtactgctaggatcgttcaacagttcttcacaattcaggaataccaagaaaacatcacaacaggcagatatacgaggataattttcagaagcactttccagtttcctttgtacaatggccatatatcagtttaagacaaacgcaacacctcctgctacataagaaggcctattttggaacacgggaattccatggatccctacagggaaatatacagctaaagcaaaactccaactgaaattcccatgttccaaactaagactatcatccccaaagagcattcactaaactgtataatgtaccaatagtgatgccattagctttaagttttcagtcttctgccatggtttaactacggacttctcacgcagcgaatccacaaaaaccatcatctgtgttggaaaatattcgtcattatcatgtggtcaacctgctgtagtacatgaatcaacacaaagataagatgttgagatttaagtgtgctcaataccaatttgatatatggaagttacccttacattttttgccatgcctgcttcgataggactgcgctggttggcgagaacttgattgcctcacctgaacagagtgaaatacaaatggtcaagttatatgttggattgtaacaacaaaattaaatatcagaaatcaggaaacatttaacaagttagaggtgtatccacaggttccacccaggtttaagggtgggaggaagatctagagaatttgccataggaaatcatacctgactactgattggtgttcctgttagtccataataaaaagctgaaaatgcgtgatacattacatatattatagtccatatggaggagtcctttattaattgttagcaccagacacactgtataacatacctaggtgtggaggatatctattgctgtcatgataatgtggcagagaagattcagcagtagcagggggcagcgcaccatagctgacataagaggatgcaaaatgattaagtgagaaagaatccgctactctattctgataaataatatgacatatggggatagtttagaatttcagatcaccttgatgctgctgtagtataggtgctaccctcatgacgacgacaagaatgacctctcaatggataataaggatcaccctggattaaaatcaaaactacgagattaaaagatcagtatgcagtttttcaagacgatatggtttaacctaccagtgttgaaaagggacgcttctctccagaataaatgtgggtataatcttgaacagggtatcttactgtttagaggacgaaaacatcagctgatagggattttaaagagaaaacaatatggcaaaacttcaaaaatatattgtattggacgacatgttaattgtaggaggggagcaaacacaatataataggagcgcacatagccagagtggcagcatgaaacagctagcagattttgcagcctagtgaaaactaagacaacaccatccaactatggcttgattttatcaaacagctggtaggggcttcacatgcattcagatggtttatttgttcaggggaaacggtttacgaaagacatctatctaatttacacaggtgaagtagatattagagaatatgctataaaccagtcattacacagataaaaaatgtcaggcatcagacatcatgaaaccagcttcttttccacataagagcaattgtttctgaaaataaatctgagaactgttatacaacctgtccattttgagaacaaatgcaacatgcatacaattcacccaatcaattaatcagttaataaataatcatccaccttatattcatttgcattttgcactagttttatttttcgatctaaggaaaaggtcaagaacatgcaaatggaggcaattgcttggtttcttggtcaagggtctgtcggcctattaaatatggaggattatgaattcatgatttgaccactctcagttgggccttcggtatgtattgactttggttgcagaaaaatgagcctcatgaccatggaacggtttgcaaattcagattcactcaaatgctaaagataagtttgatatggcacttgttatgacaattggggtatatcttgctctttcattaaaatctgaagatttatgtgtcttgagctatcaatcttcagattataatgaagttggttgattaatgtagttaatatttacataggagaaagctggcagccacagatgggtcaaacaattggaaatagacgacaagatggatggaattgggaatgactaacttttagaagtcttcattttgccttccccagtaatactagatttatggtcttccttggtctgcttgctctgttgggcaggtttagccaatgaaactttaatattcacctgggacacgccaaaagatgtaaaaatcctatcaattgtaaactaatactctgaattaatccaagtcgagaaaagacctttgagccgttcttactgaactcttccttgtcaaaagattcaagacacgagattgcagcctcacgagtaatgtaattaataaaggcaaagtccctccttttagctgacggcatatcgcgtgacagaaccacactttcaatcttcccatgtttcttgaagatttcttttagctgagcatgatcccaggacgttggtatcccatccacaaaaatcgatttaacctagatggaacaaacagtgcatcagagtacttagacttcccagggaagcgaaatcaaatatgttgttaagtgttcagaacttcagatatgattaaaggacttgaacggggatatgaataaagccaggtatgttaacaagtggaaacaaatggtcgttaacttatttatgtaataaggaggacgacgatgcacttcgaaccaagggccaaacatatgaaggtccaagaaacattgttcataaaggacatggacatactagtcaaactgatttttccatccaacagagttatgaaacaattaagacagaacagaaggaaagaaatctctcccaaggtttggataaagcaacatcatgaataatatgtccaggtcgaaatagaacagttgacatctgtaagaaccaatggtataaggaccataggataaaaggttgatagcgaaaaaactgaactctacgatcatcaatgaggccaaatcatcagcaatacagagatacagggatgcccttaaaagaacagaaaattcatttcgtgtcagaacttaagcataaacagttacagctagtataccgatgtatatccaggatataattgtgatagcaacagaaccagtaagacacaacctgtgccttatgccaaatgataggataagtgacaagaatgccaaacgtatgactagactgaaagaaagtggaggttgtcttcaaaagaaaaggttaaaacaaataagatcatctgatttgacattcatttgcagtttcagtcttattagagtcacaaaaccaccatatgcatatgatatgatctctataaaagctaagtggatgacacacataggcagtatgttggagagagagggagagagagacctgcatatctttctcatctggatcattcaatggttcagcccatgcaactcttatattcaggcctttgccaaaagcatttttctgtgaaagctttttgtatgccatccgtgcatctctactagtttccagttcaagaaatgcaaaaccacgattacagactggattatttgaatcagacttaagtgttacagaatcaatgttctcaattccaattttctttagctgcttgatgacctgctttgaagagcaacatatgagaatataaaaatgaaattcaggctaacacccaatcaagtcaatcagaacacaaaaatgaaaatgttactcacatcttcttttttccatttcttgttgatgtttccaagaaaaattctgtcattcccaactggaactgcagctcgacagagcttcccacaaatctgtagcagagtttccataaacaaaattggagaaagaggtgtaataagtactattcattacagcaatatgtgggactagaagacctggtctatccaaaattttcacaagaaaccatttttatcacagaaaattggcactgcataataataaagcaaccaaatatatacgaaatacatgtagaagtttatggatttgtgctatgatgagtcaaccataacaaatggtaaacaggataggaattaagatcaatgtggcatatcccattaggggatgctggatcaactagtacgacctgactcaataaaatcaatcatggcatcgtagagagaagtcactggtccatttgacagtggaaaatttttaagctcttgcagtaagcttacatggtcattccatccgatacttaactgaaaaaagtatctgtgtaccggttgcgatattatgaaacaaatatgcagcattgtcccgcatttgatgattgcactaatgcacaggtcatacagcaatcagcactggtgcgggattacaatgatgataaaatcaaaccaaaagtgtgatggcactaccttcacattgccgaattccgcgatggccttcttcgcctgcgcggcgtggcggtagcgcacgaagcagtaccccttgttcttccctgcaagaggattcattatcatccggacctcggtgatttccccggccttggcgaacaccgccctcacatcatcctccttggcgtcccggtgaagcccaccaacaaacacctccatggtcatcctcttccgccgctccgacatccccgcctcctcctcctccactcccttacccaccactaaggccacctcctcctcctccttacacaccgattcttccaccaccgcaacggcattgcaatccgtggcaggtttggattcatccaatttttgctcattcccaactccgccgtcctgatcacttgctggctcgtcggttggggcttctccccctgcctccgatgatgctgctgctccggagaccgccgcagcagcagcaaccgccgccgccgcggccttccgagcggcgaacgtgcccttggggacgaccttcttgacgatgaccttcttaaccactttccgaaccttccgcgccgccgccgccgacgccggcgacgacgacgacgacgacctcgccgccgcgtcgtcgacagcgggaggcggcgccgtcgagggcttcgtggaggccgagggctgaggccggcgtcgcggtgtccaggcgggggggattggtagggtgggctccaccgccggggtggggggagg

SEQ ID NO: 7480 - DNA, 38593 bp, Oryza sativa
atagtaatgtgtcgttatcaggtcttggacctgcctttgaccctgtcggcctgtgcacctgaccgagccaaatggtgcaaccggaccacgattttttcctcccgaacacgcactgacgtggcatcgctacagtaaaaaaagccatgaggtggcatgctgacgtggcgctccgttccttcctctctcaagcatatatgtatgacatgtgggcccggaatgtcagtaacagggaatcccgaaaaaattgcagctatgtgataatttctaacactaatgttgcagttttctgaaaagtggcgcaaaggttgcagcaaagtaatagtttagtcaataaaagtgcagttttctgaatttactcaaaaaactaatatttatgtttttactctgtaaggaaacaagaaatgttgtatctaaataaccgatatatctgatatctatccctaattaataattattaatatgtctcttgcaatcatggtgattactcaatttaataaacccacgcaacgagcatacggcatatttggaatctttcgaggacagaatacgacacttatccgataagggttttgtgaccaaagccaagacatagatctctaaattctccctcttttgcacttcatgttttttgaaaaggggaatatcattgcttactcctggccttctgtggtggagtgtgaggagaacctcctcctttcccctgtgatgtccccctatccaagaactaaaaggcaggataaagccaatggttcctttctcttgacaaagatttgtgcaaatcaaatctttctaccacctgtcctaactcctcagccttcctcaggtttgtggtgggttgtgagtaggaactagcatggaaaaaaatattcttatatttgtacttcaataccatcttggttttgtcatgttcatgtatgtgtttgggatcatgtgtaacctttggcataaaccttatgatattctctcgagggctttcttgtcattccacgcgttaataacagtaggaagaacagagatgcaaaatagaagtttgctttgcaacacatagatttactaatatatgtcaaagcatggacttttgctttgctttgttggaagttcagggatcgccacaaatccaaggttttacttgacaagttattgacttttcaattgactacagagctggttggtataatctgcttagattgtctagatttttattaaattcagcaagtaatgtaattggcatccaattacagtaagcacataaaacagaggtaggagatatcatctgatacgtgggctgcagctgaacaatccaaagtgcctgtagactgtagtgcagggcctcagaaaatgtacatttcagtttcagccaagtcatgttgacttggtaattcagataaaatgataaacgcaatctcgaaaagaaaatggcaaacacgatggagtatttgtgaaaataaattgatacttggacttggtattagacaaactacagccaagagcaacgtcattttcagaaccaatgtcgtgccgcctcatccattgacagaatgggctcatatcgttatatagctgggtttcagaatgacatgaatcagtcaggtaaaccataggtgaattacgacattattttctccgtttatatccgctcttcgatatttgcaccaacgacaaagcgaaaacagtgttaggcccttttcgcaacatttagtatcattcttaccttgatttattcgttcaagcaactaacacaatgacttaattattttcaacagacaacagtaaccccgaaaaccccaatagcaaaagtcatgctcccaatactatgcttcaaacctgactacaaaaaaatggactgtattttctttcctcatggaactgattgtttcagggcaatgcagccttcaggctcttggctagctcttctagcttcttcaatccttcttcgggtgaagcagcttcgcccaattgcctcaccatagcgctcccaatgatcacaccatctgcgccccatcccgcaatctgttacaaggaatgaagcgacaaaggtcatgcaatgaattggggggaattaaacgtatactgttttgaacataagttcttgagtatgatttacctgcttcacatgctctggagtcgatataccgaacccaacagccacagctttgtccgtgacctagaaaagaacaagagattctatgagcatccttgaatgttatataaatgttttggagatgccaacaccaattcactgacgatgaatgatgcatacctgcttgatatcctggagaagagattgcaccttgccactgacatttgcacgtgcacctgtaactccaacagtgcttacctgaataacataggagttagcaacaagccccatcataaatctagttcgctatcatcaaacagattcttgagatttgataataacaaatttccagcagtgcactgtgattacaagcattcagtttaattttagaacgttgaggtctatgaggtgcaaaattactgactggccatcaggaatatatgctatatgagaacagggtcattagatttcgtaaataagttaaaaaaagatatagaagctcacaagataaataaatccttcagaagcttttgtaattttctccattctttctgttggtgtagttggtgttgtcagtagcacctgtaggcatccatgcaaaataaatcatattcattaactgaaatggcataaccaaaatgatgtgggctcaaattacatatacatagacagaacgacacaatgttctttggtaatcagcagcaacataagcttgctagtaccacatggaaacaaacatcttgtatatatgaagggaaaagaacagaattatggaagttcaggactcaggacccatgtacccaaaattaaattactcagttatgcacggttgcagcaaagcaatactgacagaacaatattagagcttttttaaaaggttcatagcatgagagtggacctaccagctcaaggttgttcttagcagcttcactcctcaaaatatttgtctcttccagaggaacatcaggtaccacaagacctgcaacacagtaatacataagaaacttgataggtacctttataaacagttcaacactaccatattgttctaggtttactccatagttcagctagaaaagggtttactttatagtctataactctatacattgaaatgcaagaatgtacacataacaactgacaagtgggagtctgatgacactctctacaaatatcagtggtgtaaatttgtctatgttgttatacaagttctaattttctgaatgcctaaattaatgttagtccaaattgaaatacaagatatgaaatggaataccccttctagttgattaggtgtgtattgagtagaatgccattttatataaaatagcatttgtaaattcataacagaaaatatctaggacataccatggacaccggcttcttttacaacagtcatgaagtttgcgatgccacgcttcagaatcgggttataatatgtgaaaagcgctacagggcaggacagctcaggtatcacctcctttaccatagagataacatcctcaaatgtggtgccttttgatagtgcacgtgtagcagaagcctgaaatgatgcaatgaaatggttaaaaacttaaaactactcataaccaagactcacaaccaccatcaaacatcatagaacaatagcagaggtttttcatggtatacctgaatgacggggccatcagccaatgggtcagagtaaggcacgcccaattcgatcagatccgaaccacaagcatcaagaatcttcaacgctttcgctgtagtcgccaagtcagggtcaccagcagtgatgaatggaatgaatgcggtctgaaagttttcaaacatataagagagtaaacaaacataaagtggattgcagaaggggggaaaggcaaggtatgaactcaatgctgatctggatgcctatcacaacttaggagacatataactatgtcatctcatatcaattggtattctacatagtaatatatcacaaataataaaggaaaggtgattgggctcatccaacactaatcacaatgattcaattatcctcgagatgattccaacgcatcatcaatcctgaccgcgacggcacgattttttttttcgaaacgaatttaaacccacgacgcatgggaaaactggataaggattatccatcaaccgcggcctgtatcaccggatgcaaatccatccaatcgtaccgcactgaaatgcaagtatgcaaccgcagaacgattcaacgattacccccgcacgaatcgcgacgaatcaaatccatcgcgagcaaacggggagaggagatccacaccacgacatccccaaccccacccaacacgcgcggagatgacgaatcggccgcatccccacgcaccgaatcgacgaggagggggggtggtggcataaaatcaaaatcaaatcgaaacgcgcgcgaagaacggcccccccgcgctcaccttcccctgctccttgagcttggcgaaggtgccggagatgacgcgctcgtcctccccgacggcagccgcctccgccctgatcgccaccatgggagcagggaccccgcggaacgagaccctccccgccgcgccgccgcgcctcccgggcgcggccgcagccacggacagggacgaggccgaggccgaggccgtggacgccgccgcggcggaggcagttgaggccttgagcgcgaacgccatgggtggtggtggtcgacggcgatggcgcgcggcggcggtggtggtcgagtcggggatagagggaggaggcgagcgtgtgagccggtgtttgtgtttgggtcggtattaatacgaggaggaggagttggtgtgggtgggatggccgagccggaccggcgcctcctggtgggcccacagtgtcagtgacagcggagtcgacctcatgggggatattgttcttttgttcttgtggcacgtgcaatgcaataagcaaacatgagtttgctattcgtgttggtacttggtatactttgtagtaggtatatattactgtagtaccacagtatcgtttgaattttttttgtctagttaaaatgaagttgaagagcggtcaaactttgtaaattttagtattaaaatgtacatgatgttctaatctcagcctataaaatatggtaatatcttttacaacatcagcgcatcgtaacttatatagttttagctccaatatagtaaacgtcaatcttgagaaaaaaacacgtttaatagttaaattatggctatttgttgttgccacgtccataagaaaaattgtatgaaaagtaagtaatacccatggccccatatgccaattttctcgtctctcttctttatttcttccaatcttttcggcaagccatgacgggtatattcctttgtctccttaagaagctccatggcattcggtccttttctgtattttgccaaactctgcagcaacaatgagtacagtagcactaggttaaacctcaatacgacaccgcggatagtattggcttctaggacgacacataacctagcatcttgcatacgagagtcttcttgtccaaatgattccagtagactctagcttagacacctcccttagcagggatcttgtcaatggcgcatcattgatcatgatgcctctagctcaggatattcgagcttagggataaccatatccatcacccctaagttaaaaaagaaccacctcgacagtgagcatcagggatcacatcgctcgtagtcgagctcgagctccaccttctttatcgctgcagcattgagattcgcttcctccgcaactacaccgccttgctatcgagatcggcttcctccatcttctactcgagctgtgtcccgttgcaaacgacaaagctcgaggaggcaaagttttgcggaggcaatagtagagtttgaattcaaggttggtggacgaggcagcaacatattttctcccttgcgatgctatatgcgtcgtaatggcttgccgaagagacaaggagaaagggagatgggaaaactggcacgtgggactaaggatatttatgatctttcacactatttatctcttattcaattggaaatgaatattttcatagctatagtgaccaacacaaaataaccatattttaatagtgtattacgtgtttgggagataaaaccatgaattcaggtgttctacagtaaaatttatcatctactactacttaaaaaataagaggtgcttccatcgtccgtcaaaaaaaccgggtggaaaaaaaccgggcagaaaaaaccaagtttgtccgatcaaaaaaaccggacgaaaaaaaaagtccgatccaaaaaaaaagtgaaaaaaaaaaccgggcgaaaaaaacacccgtccctggcaaaaaaacacccgatcccttaaaaagagaaaaaaaagtccgagagacaaaccgtttaatgaataaaaaaagcgaaaaaaaaagagtccgattccctggagaaaaaaaatctgatttccctggaagagatccgatctgtattggattggagaaaagaaaaaaaacacttctctaggtgcttctgtcgtccgtcaaaaaacgggagaaaaaaaccgagcgaaaaaaaaagaaaagtccgataaaaaaacctggcgaaaaaaaaccgggcggaaaaaaaacaaatatgtccgacaaaaaaaaaggaaaaaaaaggaaaaaataccgaaacgaatccgactacatcgacgcggtaaaaagagtttaaaaagataaaaagaaaactgtcctattccaaagaaaaatgaattatatgtatcgtggagaaaaaaaaaagaaaagtccgataaaaaaacctgggcggaaaaaaaccgggtggaaaaaaaacaaatctgtccgacaaaaaagaaagcaaaaaaaggaaaaaaatcgaaacgaatccgactacatcgacgcggtaaaaagagtttaaaaaaataaaaagaaaactatcatattccaaagaaaaaggaattatatatatcgtggtaaaaaaatcgaccgggcgaaaaaagaaaaaaatagtccgatccgaaaaaaacaggagaaaaaaaatgggcgaaaaaaaaatttgtctgataaaagaaaaggaaaaagctgaaaagaatctgactccatcgacgctctaattttctgattgttatcgacatggttatgcatgaaaaacgtatattatcattacgttttttcaccagttgcaacgcacgggcatatttgctagtaaaataaaatatactgtagcttacgcaatattaattacagagtatcttgcctgtacggctgtacgataggctactagcagtagatacttcactctagtctaaaagcaaaacgagtattattgaaaaaataaaaagaaaactaatagacgtgccggttctctcccggtgttgaggaaagagcagagaaagcgagatggacgacgccgtgtgctagcagccgtgcaggtgtccatttcaccctgatcctgcctcatgcatcatgctacaaacgttccccattcctttcctactgctggctagagtagagagtacttgtcaaacttgtagaaatcttcttcttcttttcttgtttgtgtccgtgttaggagtactatcgatcgccgagacgagacgccgatggatggatggagctgtgttgttgttgatggtaactcgtagcctttgaccgatgcgaaaaaagaacaaaaaaaaaacgaaagggaaaacaaaacgcaagaagctttgcttggccttgtattgccaggttcaaccgagactcgagaatcgagatcgatcggctgcctcgaccggtcagcactgcgtcgtcttccggcagctggtttgactgatctgaggcgggcggttggtgaaacaatggccgggccggcgacgggggaagaggccggcccagtgggtcgcgtcgcacgaagccggcctatctcgccggacgaataaggccggcccattaacctggagcctaaaataccctaatcacagagaagtaggacagcgtggcatgcatgcagataggggtgtatgtatacttctactcctacaagtgaaccggagagagaacagaaggcatgctgacatggcacgtcctcagcaaccgtcactgggacccacctctgtcggctttggctgttgatttattatgtgggtctagagataactggaacgaaaacttttgacttccctctccactttagttaacagatgtgccttttatatccggaggccggctaggagggacattgatcagactaaacatatcaagttcagaggagtattctccacttttgcttacatgcaatggcaatgtgaacgagctccttcacgtataaaagaaagttccatgtcaccaaaaaaaggttcacactctcattgaagctaggttaaccaaacattcagtgaacaaggaatttctccaacacacttagtttttcttcccacatcaacttataattcatccattgatcaataatctatcacatatgagtaggtattacgtatctgtgcaatctaaacctatatatgtgtgctcgtgttcatttttactatgcgattaaacactcgagcttggatcttgcaccctagccgtattcacaaaggggagtatttagcttcccctgttgagttccatactccaacagtactaaattagacttaatgcaattaatttggtgtggtagatgttgttaatatttttaataaacttggttaagtttttaaaagttagattagaaaaaaaaacataggtatttattaggtcttttcaagaaaatgcttaatgatttaatcaataggtcatcgggggaaaagaaagcgagggcttttcaaaaacaaatgtagttgtgtttcacagcattgatgattccaaaacctcgcacttgcaaaagccattcctcctttttatttgagagttgagactgagggaggaaaaaccatccccaaaagacagcagcagtagtaagggcctgtttttatctgagtttggtatgggatatttgttcgcacgtgaagaaaaaaactcattaacgtatgattaattaaatattaataatcataaacatgaaaaattgtcttatttatttttaaagatacttttatatagaatttttttagacaaaacacatgtttagcaatttacaaagcaacataaaacgatggagtttacagtttgtagctgaaggaaagaacctggctaagaatcatactgccaataattagagcaggtacaatagtaggctataagctagttataaacatattttaaagagagaaaggaagagagagaagagcagcgggctatagatctgtagccagctacagcacggacttcaagacgtaatgaatgtatgacatgtgggaccagttattaatagtatagtaagcaactattgtatgaattgactattacattggctatagatgatttagagttagtagtggcctatactattaaacttgctcttaatgacaatataaaggccattgttgaaaggaataattgcatatcccccaggggtatttgtctcatcttctatatggccctcctcctccacggcccacaacccatctctgtttctctctcctccgacctctactaaagaagagaagacaacgcctctctcctcactcctcccccactctctctctctctcctctctctctctctcgcccctcgcgccaccgcgccaggagctcgcgccgcgcctcgcctcgccgacgaagacgacgaggaggtcggtggtcgtggtggtctggtttggtgtccatccatggcggggcagcagccgccgacgggaggagccgaggacgacttcttcgaccacttcttcagcatcccctccgccgccgcggccggcgccggcggcgtcggcggattcggctcgggtgaccaccaccccttcccgctcgcgctcagcctcgacgccgagggcgccggtgccgccaggcgcctcctcgacggcggccacgacggcggcaggacggtgagctctccccacctcgccccgtcccccctcggaattcgccgtcgttctgcgcctaggagtgactgaatttgggttctcgcaggaccgggaccccgtgcagctcgccggcctcttcgccccggtgttcggcgccgccgccggagtccagccgccgcacctccgcgccccgccgcctccccaggtcggagccctgaattgagtggaacaagcccgtgtacagtactttgcttggaaggaatactaactctctgaccatgatttggtgtctgatggatgtgcaggtgttccacgcgcagccgaagcccggggagggggccatggcggcgccgcagcctcagcagccaccggcgccccggccaaaggtgcgggcgcggcgcgggcaggccaccgatccccacagtatcgctgagagggtaatgattaatgaaactcaccaccctggctaacgagaaccgtatcgctacagcaaattcgaccatgctgcacatatatgttcatgaacgaatgcttgtgattgtggtagcaaccgagttattttcggtgcctttttcagttgtaacgaagatagcttgccaccgaatttttgcgattacaagttagattatggtgcaagtaattggatgttttaagggacaaggtttgtcttcttagccaagtgttgggcagatattgcggtgaaactgcatggtgtgtggtttaagcatcatcataggctgctcgctgctacaaccatgatgttgtagtgtattggaagtcaccaacttttggccattgttatatcaaattggaaccttgttttgtagcgaatgtgctatgattgtctttagggtatctaataattgtggtttgagggtgtatactccttgtagcttcattactatattactaatagtcattaaagatggaaaggctaacctcttgctggtcccttctataagtttacaggaccatgttatttttaactgcattatttttttccctagaagttattttccatattcttctaggtattttctttaacttccatctgttcaatgcagctaaggagagagagaatagccgaaaggatgagggccctgcaggacttggtccccaacacaaacaaggtaatgatgcatcacattttttattgacattataagccaaagacttgcaagtttcaatgcctgccatcgatggaatttttagaaagtggtccagggctatcatgtcctgataactgaggttttttcattgcttttctaattctttcagctaatgaacagggatatcttcagaacagatgatatatatccatttgcaacattaatgtgctgcttgaaataacaaaaatacttgccctttgggtcactgctatgtgccctgtgattttcaattatttgaaaactgcaattgatctagatagagtgtcactcttctgatgcaaaagaagttaagttaaaaattgatgtattatttttaaattatgcagacagacagggcagctatgctagacgaaatccttgattatgtgaagtttcttcggcttcaagtaaaggtatatatgttttatctgtactatgtcactatttcttataacagcacatccataactaacagctaatgtttatatatgtttgacatggataattgtgctataatgttaggttctgagtatgagcaggctgggtggtgctggtgcagttgcgcagctggttgctgatattccaatctcagttaaggtaatcttctttttttcagatgtaagaccttctgattatggacttttgcaccagtagattattatgttgaactcatttcaattaagatgggtgggctagtcacgataaattttatgtatttgtcgcttatataaaacatgacacatgatcagtatgtttagatttcttttactaatgtcaatgtgctgctatgtgtagtttatttgctcttcttaccttctttctgccctcttatatttatctagatgtcaatcttctgaagttgtgtagtttctttgctcttctcatctttctgccttcttattttcttttttgttgtgctttcttttgttacattatttgtttatatgtgtcagcatacattgctagggttttctgactgtcggcaataaacacaattttcgcttgcactaacaagtaccttatattttactaatgagttgagtagttcaaatccttagctatattttgtaggtctaccaaggaaatacctatctcatttatattgttagatgcgactcttgtcatcaacaaaacttgaaagcatggattacttaacactggagactactaaatgatactacaatacaacatgacagtaattctttcttgaataatcatgttttgtcttgtgccacatttgtttgcatgcccttgtccgtcagtcacacaatatcgttgatctttaaactaaatcttgcttgaatggcattagggggaggcaagtgacagtgggagcaaacaacagatttgggaaaagtggtcaaccgatggcacagaaaagcaggtagcgaagctgatggaagaagacatcggagcagcaatgcaattcctccaatccaaagcactatgcatgatgccaatctctcttgcgatggcgatctatgacacacagcattcgcaggacggacactcagtgaagcctgaacccaacactccttcatagtatagtaacaataacactagcatgcacacctactactactaggcgtcgacctatccaaagtgtaggatatactggacattttgatttgctaactggaaaaggcctaaggatcctctcctcaaagtagtacccatggtatatgatgtcgtctcctcttttcttcttttcttcaaaggtgctttgattgcaaagatatggtaagcgatgttctcatgctcctacatctttcaatgcccctatcgagtgtgagtgatgggtagagctaccaaagagtctggcatgcgctcatatcatttccttttgggtctgtagtgcactagccatacactttgtggtggggtcggtcagtcttttggtagtggacgtttggactaatgaaaagaagctgatgtatgtgtgttaagtctgcacaaatggttgacacaatttaaaagaatgttcagatggaagatgatgttgacggtgaatggtggtgctatttcttgtctatttttccaaagcggcaacggatgttttagtcaatggaggcgaagcgtgtattaatctggttgctagtgggagcgtgctccttatgtgctttacttttctgtctgcaagtcatagtcttgataagaacctgccctcttaaagtttttagcctcttgtattattggttcactcatgaaactatatatatcatctgtgctgacttaacatgtgttaaggatttgtactgccatctttgttgtggattacagctgttcttgcactgtacattgccggtgatcacacggaatgtccaggttttctcttttgagtttacttgccactgtggttgtcaccaatcatggatatttgaacgtcgatggatgtttctgggttattgacttactgttgagtaccatgtcaggattccactgctggatagatcatatagatcataggcaggtcataaagggttgtttaaatatgttgcccctcttttttcctaataccttgagccttactttacaaaaggcctgaattgtttggcacaattatttgtactacttgtattaccattgaaaaaagaattgtatccagtgtatattctacttgtctgaaacaagtgaaaatactggcaccttttttgtacctttccagattgccattgcatattttgccgccatttgcgcatgcaagcttctttcgaattatgttggagaaagataacactataacctggttctagtgctgctggtggtccaggactccagatgtgaaattccattgtttgatccagtgtgctggtgctgtattaatctttttgacatatgcactttgtgttttaacaagacaacaatatcatgtattaaatactttggtaatcatgctcggctttttgcccccctttggtgtagaaaagctcaaattgggtgctttaatttggtgagcaatggttgttgttagtggtggtgctatgttatactacaacactaatgagatgtgcctggaaaggtggttgattgatttggcattgctttgaacttgaacctcctatcagtcagcttaaagcttcttttttttttctctacattctgaatccttcaagaattgtatggacaatgtgatgtgcagatatttttttctttttcattatgttctgtataaacaatgtgaaggaaattatagctggcatgacacattgacaattacaggaccaaggttgaccggtttgtcagtgaaactacgaatgtcaattataatattcatgaaaaaggtttgaattcagtaatcagatatgaaactcaaaagaatttgtaggatttttttttttgcagaaattggttaaagttcagcagggaaccgaaaaggatatcccctgtttgccctaaaggtaactcctggcgagctctcatgatgttcaattgttcatcatatcataccacgcttggtatctgagctttggttgctaccgcttgttgcttgcgtcatcttgcagcttgtgcttctcgcaccctgacgtcatcttttggattaatacagccatgcaaacgagcggtgcgaaagaacagcttcaagcccttcagctttgcctgaaagttgatatttcgcaatctgtcaaaattgccagggattgcattttgtttacaaaatcctaccagagaaactgtcagatgtgtttgaaaaattgtatactgatgtatgtatgcctcctttttcactattagccaaatgctcgcgcttttcaattgagtattgaaaacagcaaaattaagtccttgttgaaaaaaatatattttacattggttgaaacacaacctttcatcttaaaaaaacaaaaaaaactgtcatgcttagaaaattaaagatttgcaagttatatagtttgaatgactccccaaaattctaatatcatgacccacatgttagttgtggtggtgatggccaccaccatcaccactatcttttaatagtagtatggatgtcagagacttttaatagtagtatggatgtcagagactagctgtgcgtagatagaaggctgaactagtaaaatctatataaggttttcatgctatcctctatttcttaaaatattgaagtgccttcgaggctgccctacttctgtatccagccctgaagacaagtttgcaggattcaagcatgatgcttccccccacccaaaaaattgcatgtgttgttccgaagcagattaggcatgtattatatgacgaagttaccatggtctccactcaaatcttcagatcagaagtatgttaagaaaataaacttgagatcacatcacacttcacatgtattgatctgcagtttgcagtttgtgctccgcatagctccgtgagatttcctccagttttaacacccaccaccaccgtcactttagatggtaattagcaccacaagatggatacatttaagtgcaaatctcgatcgatcgcgcaaacaaggaacatcgccgaatttgcaccctcgatttgcaggcgattccgagattaatttcgatggatgcttatataataaagcagggtgtgccatgttgataggtaacacggtatatctctcctcctcgcttgtccagccagctactagctaccgacatcgccggacgacgacggcgccgccggcgtcggagctcgatctcgccggcgatcgccatggacgccggtgacgacggccgctgcggtgactgtgagtcggtgtgcgacccgtgtcccgtgacggcgccatggatgcatttctttagggtacattgttttctttgtttgtttgtttttggtttttttgctgcctctacagcttatcaaattacttccctccgtttggcatttcactcaaagaggttcttttgactggcattgttctagtttgaccgtgttatcttttaaaacgtggtgtgatgatgaacgggatttatacgtctacaactttacagtgtaatatactttattaatatggtttttttcttagtacttataatgtatttgtataaaacggggatgatcaaactaaaaacaatatactaccaataaaagtgtcaattatgaaacggaaaaaattactacctcctccgtctttatattataacgcttattttgttttttattacaaggtgtgttttctttcgttaagataacaattgtttcattaatatattgtttatgtgataaaaaatacaatcataaaaaatataatcctaagtagtttcgaatacgaaataataacattaatttttatgtcataaaaagtataccatgacaaagtaattgtcggtcaaagtcttaccctaacgaagcaaaacacatcaacatagtgagtagtatcttgtacatgaacatgctctggcacactggccactgacaagttaactattaccttcgtttttttatataacaatgttaaacttttcacataattttccatcactcatattatttaaaagttatgtaaatatgtaaaaatataagttaagcttaaagtttatttcataataaaacaagtcacaacaaaataaatatcatttatataaacttttgaataggaagaagaatcaaaggttaaaaaccgcggcggacgagatgcgcgctacctgccttattacagcgtcccaatggcgcaggcgcctttcacaatcccaatatttgtgttttgttgctgcaagcttgaaaacgcagtcaggagcagcagcagtacggtataattagcttagttagcatcgtcgcttttcaagtgatttcaggaagataatatctagacgtttctgcttagtgcacgtatggtcaactagttgtttccccataatcagttaattcctgagaaggtttgtcctcggttgaaattctgtttaagaaattctactccctccattccaaaatataaggcacaaccacccttaacctaaagatcaagaaataattattatcatcttgtagtttggatcatcctcataaatataatgtatgcatccaatagaattagataatataagagtggaggatttaaaaaagttataatttaatgaagaagatgctataattaattgcatgcttgcatgcatgtcttatattatggaacatctatgaaaagtggttgtgccttatattatggaatggagggagtatcaattattgagaaagttaaaagtcaattcagtcgcaaacggatgctggtattcctcattacctcaaaacattgaaacacgccagaaacgttggtttgtggttgtggcaaaccaatatttgtagggcactgtaactttcataaatataataataataaacaacgtgcaacgaaaaaaaaacaactctaaaggtgtaggttgaaacttaaccaattttttttttaaaaaaaaaactcgatcaaatggaagagacatcttctggtgctcccaatttacactgccagaagagtttgcagaaaaaaacattgctggttgagtatgttaccgaccgcagttatctgaatgatgtgcacgaccacaatataaggatttcttctataatttcaaactaattgctttcgatctgaatatttgccctcaatttgaatctgctcagagtatttaaggttagcacatttcatactgagtatgttgtgcacgaataatatttttggtcagtgagttgagggaaacaaattccatccctgcacttgatattcttcatgtccagttgcaggttgtggcacaacgaaaacctaaagcacatgtgaatgccgactgcccaggaatttggctaattctcttcttaacttcaaatgaaatggtatttttcttaggctgtgtttagttgacgccaaaattagaagtttgtttgaaattggaacgatgtgacagaaaagttggaagtttatgtatataggaaagttttgatgtgatgaaaaagttgaaagtttgaagaaatattttggaactaaacacggcgttactgtatgagttattactactcataataatcttcagtttaaagtaacggttatagtattagtcagactttatctaaactcatggttaaattttatcaattggctttgtttctctctcttttttttaagataatggattatattaaaccagccctctacatcttgtgaaggtgtacacagtctaaaagtcacaaacacacataagactctcccgttacatgggtaaagcataaaaaagcttcaatccttcttctaaagttccacctaaaaatagagaagctccatcgtacgcttctccaaaagcttgcgcttcacaattactttaatgatttcgtcttccttaaaaagaaagaccaaagccttgctaacttatgttatttttaccacaaacatgaatattatttgagagattttacagtatcatattttcactttctaccgtaaaatctggtatctctcaattagaaggtacaaaaatttgcaatatctctcaagtactgtaaaatatttcacgttatttttgttttccctgtgtgagagttcatgggacttgtgtggaggagcagtaatcagttcctttctgcggaacttcatgacatgcaaacatgatgtgattatcatgctgtttccttgatgtctgattcatacttatatttggtaaaatttaataatttgacactctctttgttgccactctggttatattaacacttctgcccatgacagtgggccatgatatcaaataatcgaaatccagttcgtagagtgtcgaaaatcgaatctctcgttgtatttgtggaattgttttagacatactaaaattttaattgaaaatttaaaaaatagaggttggttggctgaaatcagaaatttaacaccctatcgaacaatcaaaatttgacaagggaacggccattgtttgataggatctgcacggtaatttttctttttttaaagctgatgcatgtgcaattgtgcatggtctgattttgcatgtaggtaagcagggcctattgaacacccaaagttcgatagggcaccctcatgcatgcatgcactttttttatcagaccatagccctatcgaataatcgtggttcgagaatggttgttggacagattactaaacttgtggttttagccaactgacctatattttttaattttccattaaaatattaatatttctaaaaaaaactccacagcctaatgaaggctccatcaaaacatcacgtacgccctccgttctaacttctaatgatcaaaatatgtcctagcaatttcttcacctattccctcatatcaaacaatcacaatcatctcttatttaatttatccacctaatttctcatcttaaccaatcactagtcatgacatttagttacatctactttcttaatcaccatacaaaacttaaaaaaccttatattttaggaaaatgggataattagtagcagtgtgacgtaaattgcaccccctgaaaaagcagtctcatgtgtgatttctgcgtgtttgggttcttcattgttaattcctcgctgaaagagagaggctatatcccttcaaagtcagaagtacatgtgatcaaattagggtggagtggacccaggatttcgaggttgtatatgcgaaatgcgaaggggcaaaaaaacattgcagccaaaagcctaatatttggcatgtatgtcacatagtgctaatggtataatatatagcatacatattgtgtgctaaatatgacacttttttttcatacacaatatatatatatatatatatatatatatatatatatatacatacatttttttaatcaaaaatcttgggtattcatatcaatatccatgaattgagttgggcccgcccctggattaaatgtttcattcacacatatgtggaatgcgattgacacttggaattcataagtgatgtgttaaccattaagtttattttctcctactacgatgcacgcgctcatgctcacccactacgctcttgtttcgcacacatccatacagatgcctgatatcactcatctacaacttaaaaaggctagaccacattttagtatcctcttagcatgtcaggcaaagcaactaatcaaaagtaataccgagctaattgattcatgtaataacaccacttgacacacgttccttagtcacgaaacaatgcaaatccaagccaatcagcatgggtgaatcgcggttgttgatcatcaatatcaagaatcgtcgagttgcttgcctcaagccctcgatataaagctggggttaagaatgtgaagtcatgaatgcatagggccaactgtccacacatcgaacatgtcgacaccagataatacaccaatagttgttcatcgatcatcctagtagggttttcaggatcagaaagtatattttcctaggaatgtttaggcatcatatatttatttacattcataaagttttggttttttacatagccaagctaggatacctggatacggctgtcaagcgacgtatcagtatcagatacgtgaacagatacggatacgccttctccgataagcgccgatacatacgggatacgtatctagcaattttgtgatttccatataaataaaacaaacccgatacgtcactaatacgtctgatgcccaccactgaatctccttccaggcgcagggccgccgcctccagacatagcaccttccccgtcgaccgtcgtgcatcatgccccgcctggctaccagggctagagccgtcttccttgtgctcgcttgaggcacgcatccccacatgattgctgcaggtttgtagcgctgctaccgccgacgccgatgaatgctgcagtgattcatctaagcaaagcatcaccaccaccggattagcagacgaaacgccatcgccagacaacacgcagggcacgacagatgccattgaatgattgagttgttgaccccttccgtgcttgacctgcactagtttttgctgctccaatttctattttcttagtacaagtgctatatcaatgtagatccaaatcatccgatggattttatatcgaattccaagctagtgtatcccggcatccagtgctcctacactcgaagaactagggcagctgcaaaataataatgaaaagaagcctcgctggattggattgtggcagacaagagaagtataggagatagcactttttttttgtgaataatcagcagttagcagtcagtccgcaagtttattaatttttctgtgaacgcattggttttcacaatttgtcaagagagtttattagtattttattttttattaaatatataggcatatccacatatccatgattcttgaaaaatgccgtatccccgtatcgccgtatcgcgtatccgtatcctcgtattcgggtaacatagtagccaagagcatttgcttaaaccttttgtcttactatgtcatgtactcttgtaatccaaaaaaaaagaaaatataattctcacaaggtcttctattcctgaaaaaaaaatcctaattaacagatagaacatgtaatcttcaaggggatatataaggagatctcgttgcatattgatacgaattcaatagaataagtaccaatagatacattatgaaaactttgttcaccttaagatatgtataattcacaaaattttcatcatcaatactgcatgtaccttgaaccaaaatagatgcaactctcttaatgatgaactggcaccttgaacccaaaatagatgcatctctcttaatgatgaactattatgcttctcgatatatgatttttgccatggtaggcctacacatatatagaatatcaattatgacatcttattttaaaagccaaacgatttaataacgagtgatctttaataaataacaattaagaagtgaactaactaaattccatacaaaggcatgttcaggatgagcacgattcatatgatgatgagtctaatttgctaaatttccataggttagcaaagggaaggctaacggggcatatgccccctcctcgcggatagaaaattggaggggcatgtgccccaacaatggcccatcctcgcggatagaaaattagagggcattgtccacaatagaacaacctggagtatttaaaagttttttttagaaaaatgaagtagagctgcacatgacctatagtggcgacatgagaacctaagggctggggaatcgatctagtaattggggaggaggggaacttaggtatagagcttatatatatatcaatttggaatgggttagctaggctctaattattgtaatgggcatgagaaacacataccccgggaactcgcagggtcacccacgagttcccccatcctaaccccggaaatttgcgggccccgccccgcttacccgcgggtgagaaatctccctggccctagccccgtcggagaaattgccacccctaacagtccctaacttagcaattggagttagaatacaatggatctcaatatgaaaatttgtttgatgctaataaatttttggtcttccaactgcccaaaatttgctaggctttttgagttcattccgaccatgctgtgagcattgaaacgagcaacaactacgctcaaagatttttttttttttgttcttagggatagtataaaaagattgtaagatcaggtttgcttgtaccaaaggctatggatgatccatacagttggaaaggctttatataattaaattactagtagttgtattgtccacctacaccaacacactcgtaccctcaacatgctcgtacactccggcatcaaagagaaatcgagctacaatttggtggtgttttaaaatgaatatgaagtaacacacgtaaaacgagaaaaccattagcatatgattaattgatatttaattattgcaaacctgaaaaatagatttcactacactggtttaagtcatcagtaacagactcaaaccatcaccaagtcatcagtaacaggctcagatcatcacctctaatggactcagagataagtggtcagtgatgactaaactcatctctaatgggtgaaggtccgtaactagtatggatgactaaactcatctctcacgggtgaaggtgactcacccgtgatgggtagcacaatgcccctttgactggtggcattgcaacccatcacaggtgactcacctgtgatgtgtagcacaatgcggcttgtcaatggtgcagattaccaatgaagaaaaacaaaatatattccattctatttctcattgcagttgcattcatctaaaaaatttacaaaacacaaaaatcatcacaatcacacatctgggaatatccaaacactcattcacatccaaacacgcatggcatcacgaaatcaacacgaaacgcatcaagaaatcaacgagacttgttgttgacgatgaaaccctcaagccgcaatgaaaaacttgtcaaagtagtagttggtcgccattgccaagctcgacgccgttggagggagtcaacaccgatggtgctgaggcggttgtcagtgcttggtagtctgtggagtcgtgcgaacgaagcctcggcggccggcaatcggggggagggatgacggttggcgatcgaaggagtgcatggggaagacggctcccaacggtcgacgacggtggtaggcagttgaagtaagatagaagagagaacgggtgacgggaggatttttctttatttttaaatcatcactaacatgtataagaattgaagacgtttgaggtgaggtatctcacctatgacgagtgcaaactcaacacccgtcataggaaagaggtcaactgtgacaggtttgtatgtgggcttgtcagagatgttatgtgtttggtgcttatatagatctagcatatatgagttcttatccatgacaaaccattttcttagcctcatctacaacaggatttagttttacccatcagagatgatatcatccgtgacgggatattttggttcgttatagataggtcatcacaaatgggctgatctgacatagtgtttatttaatatttgaaagcaatttttatatattctttaaaaaaagataaaccaaaaccaggtaaaatctacatctacttggccgaccgaagacgagaggtgaacttgtatgggcccacatgtcggtgaaccactccgatctcacgaacaggaaactattatacattgtcgaggggtcacctcgttgtttgcatatcatctaaatggttatgtaaacatttgaaaaaaattcaataagatagattaatatgtgaaaaaccactccacaaatatgcaaggtcaatttttataagttgcaaaaaaaaacatatttgactataaatatacgttaactagttatagttcaatttctttttttttcatcttctaaaagttaaaatttaacttatatgttcatatggattgatttattatatattaatctatctagttaatttattttcataatcattcgaatgacagaggacctcgagagtcaatcgacttcctctcacgaaccgccctcgccaacctccggcgccgccgtccgccgagtctccgcagagcaggcgtacgtccacctcgagcctccctcgcaccgctctcctttgtcctcgccgccgcgcgttccgcgacgcgcaagcacggtggtcctcctcctcctcctcttcttctctccccagcgtcgtcggtgccgatggcgagtggcgacgcggcgggtcccaggccgaggaacgcggcgtgctccgcctccggcggcacagggaactgcagccctgactgatccaggcacagaacgccgggcgacatgatccccgtgaagctttgccacttttgatctgaataatatatttttgtgttcatggtattcctgaacagctccattcttggcacatccagtgcagagtttgttgtgcacgaatagaggtggtaaacaccgattccatcactgtccgtgatattcttcacagattccatcactgtccatgatatattcttcatgtccagttacaggttgtgaacttgtgattccttcagggaaaataaaatggttgcaggcacaaccaaaactgtaagcatatgtgaattgatattgcctggaacttgggtgattctcttcttcttaacttgaaattgaaattgctattgagagaatgtttttgtgcatcccttgactagttaacttttctgtagtactagtttacgggacaaaataatcttcatttttatggaaacagttgtagtcaacatgaactttattgtttcccttcaacttatgttattgttaacacaacaagcaagccattttaatttgctttgccttgtgaacccagttcatggaccttgtgattttgaggaagcatcacggaacaggaatcagttccctacaccataactccatgacctgtaaaccatacattgattatcgcgctgtcccctagatgtccgattcacacttacatttgtgggtctaatgacagatcgtctctatcaagaaaagcattgcaagtttggaacggcaccagtaacatggagagacattttcaccttcacattgccatcatctgtactgctgccctgcatgcttttttctttcagagattaacatcaccattacagtatcgttttgcttcccccagtgctgatcaggtcacatggctcctcttaacctctggatctctgatcatatgatggcaggtggtcggctgtcgttattttcagtacatttcctcactgttgcagctgcaggccatggctcgggcagcgtgatattctggctgcaggagaattcctggaaggtggggcaccagccagccatgcatacgcatcatcttgtcctctgaataatcatcatcgtcatcagctgtgatactatgtgagtatttttgacagaattttttttgtgtccttttccttgtcttgctggtgcagagtgcagactgcatatggtgtggcatgaactgctcccctgaggaagcagcaaggcagcattgcgtggctttctgtgcgtttggattcttctatggagtttttatttattttttcgaggtaattcttccacggagtttgtgctgattcatccgtgcatctgcatctgcttggttggcagtgtgggcaggcagccaggcaagggccttatcttcttcagagtttgaaccaatggcctgcaggttaagcacttgattggtcttcaaggcataaatcttgctgaaattaatttacttctttgattagatcaccaataagatcaaattgtttgtgtgtgtctgtgttcattcagatcaggtatatagccttgacatgcctttgatcttattcagatctgaataaggaattacctctgatctgacaaatactggcttggtactgtatttatgatatgaacacagagaaacaaggaatctttggtgtggagaaatgaccaagcttaagtcaaatttctcccttttttcatattttccagccttcgctcatacagtacaaaactcaaactgaaaaaagaaatgagcctaattaaaagactatatacacagttcatacatcttgtccctcttggattcagaaacactgaaacaaggcagtgcctaaactctctctgtacagcaacgaagagcacaagccatcagggctcttctagtcctctgctcccttcttgatcccattcatctcatgccatgtgattcatgatctctgattcatcatccatcttctcatgtggtgtgtcctagcctgtgatttgtctcctttgatcatccatcagaccatcacctggcttcagagcccttcatgatcctcaacttcttgcaggaagagatgaacattctgcaaaagaaacagagcaacctagagttagatacagatctgaagaaactgataacatgtcatctgaatattctgaatatctgatgatgatgatgatgatgatggcacttactcccagggcacatctccaacaagcatgaggtcaccgtccttgtcctcgtaggcaatggcgaactggccatcgctgcatccgtcagaggcggttgcagagaagcacttggtgaagaggagatccagtgcctccctcagctccctgtagcccttgcacatcttgagatcaaccttcctcaggtatggtgccccatccatgctcaccttcacatacagccctcctccctgctgctgctgcttctgtttctcatcaccacccttcttggttgcggcggcggcggcggcggcctgatggaaggtgttcctccggtatgccctcactggtggccatcctaccacctgtgccctgaaccaaggagaattttagccatggttagttttgtgttgttgttgttacaggtgtttgtgcagggtcagggggttgtgagcttacttggccggtgcggcggtgtcgtcgtcgtgctcgtcgccggcggcggaagttccggtgccggaggccatgctgtccgtgctctccagcgaccgcttcgccccgagggacctcttcgccgccgggtcggcgccgccggtggtggtggtggtggtgatgctgcttcccggcgggccgaggcggaggcagaggttgtcggcgtcggtctccgcggcggaggcgaggcagctggtgctcctgagagaagaagaagacgccatggctagctactgattttcttgagagaaagaagaggaggaggaggaaatgtggaagaggaatttggaggagaagatgagatgaggacgaagtggggagggagggggggattggttttaaatggtggcgcgcaggtgtgcatgtcgcgcggtcggggaggccggtggggcccacgggacaggcgggccggggtggggtggggcccacgggccgacaggcgggccccaccggctttggacgggatgggtggtgggattccctgccgggtcgggttagttggctcgcgccatgtgaccgacaggtgggcccgcgcgtcacgcgtgcggtcggggccccgccgcccaatgggcggagcacacgtggcgacggtgggtgcggctcgcgcgtgcgggttcgcgacgctgtcttttaaatttgtgattttttattattattactccatatgtctcaaaacataaacattttagcatggtgcaaagtcaaatatttataactttaattattaatttaaaaatgtaaaaaaatattaattatataaaattaatgttattagatttatcattaaacaaactatcacaatatgtaacttttttatttaaaacatcttaaatagcgttgattaaaatagtatcttgaaaccgtgccaaagtctaaaagtgtttatattttgggacagagagatattatttttcgtttgttttgatttaagttgcggtgctgtgttagtgcagtgctttgtgttaatttttaatcagagtttagtcaaatgatgtggacagggaatcgacacgggaaatacagttagatgcttggagtttccctgtatgcctacatgtggctcatttaatagtgggttattcgattttctgattggacgcggtgctcatcatggcagacacagtatgggcttgttattttattcttctacttgacgaaaaaaattatatatatcatgccaattttcagttagatgctgcttcggagaactgatagctacttacaagttgataattcgtaatgtatacttctgtatgtacagaggtccatttgttataaaaggaaaaggtatacctaactcactcgaattattttgctggagtaagtagcaaataaaaaaaatcagcttattttaccacctaaaatactctaaagcagattaatatgactatcaattacttttaaaatatttaatttgcacagtagaacacaattcattagtcttaaaaaatacgtcgataaaattaatttttacttactgtaatgcattataatacaaatcataatcaaagataaattttgaagactgtattattgtccaaaacgttaagaattatatataagactgaagggagtgtgtctttttttctctttataaaagcatgtccaaattttataaaaaaaaatatgtcaatagtcattttcaaaatttcccatggtagttgtgtgcttaattccatcttacatgtttccagtatattgtgtaatagttactaaaaattcaaaaacattttagagggttaaataatactccggtaaaacattttaacagtagaataggcttttttccgttacaattcctctacaacattatgcagctttggactcatgccacacacatccttcgcacgcacggaatatattggtcgtgttcatcactgccctttggcctttgcgtgtgcacatgcaacgtttccaaccattctggtacaccccatcatcaaatccatgcataataatgatcattccccccgcaatttgtgttcgtcttttcttttgtacttgtagaagttttagcaaacatcgatcatttagttagtagtttgtgtatacaaaaggctagccgaaaggaacctactgacgattagagcaaatcgctagttgattgcatttacaaactttataaagagcacgagcgaaaaatgcagctagtgattaaatttatcttatagttacacaaacatccaaagccagcatcattagtcgatctactactgtctctacatgcacattgcacggatcgacaatattttttcccccttattttaaggagagagcaccttttcccaatgaggataacaaaccaattaattaattatttcctttctactaaaatataaatactccatccatttcaggttataagactttctagcattgtctatatttatatagatattaatgaatctaaacacacatatatgtgtatattcattagtatatatatgaatgtggtcaatgctagaaaatcttataatctgaaatggaggaagtaacaaagaagttaaattaaataagaaattattacgaatggttgagataagtagtggacaaagaaaagataattgtggcctgttaagataaaggaactacgtgaaaagattattaatattttaaataagttttaaacgttaaaattatttatattttgagacgaacgagatgtaattaactgttcaattaggcttcaagctatgcatgcatacatccaaacgcgaagaataatagtttgtcccctcttgcacagagagaacaaaataagcacacgtacactagcttttaactatacgtacgtgcgagctaagcacgcatgaatgtgcgtagctgtcagtgacacatatataacgtccaaattagcattggatggatgggagaggcgaagaaaaatcaacgggagttaatggccggtagctgatgatcaggggtggctaattaggtcggggcttttggtagccgtctcgctgtcacgggcatatatggatacataaacctggctgtgctgtgacactgctgtgcctcctttttcccaaaagacaagacaccatcatgcgtacatgctggcccatcgacagaaaagccagatcggttttatacaactgtgagtgagtatacgttactagctaggtgcctctcaatgctcctaatatcaagtaggcttttatttttctattttctttctttactttttttaagaaaaaaacaaagtgtaggtgtttagataaaacctattagtaatctcagcatcgagtcatcttttttacattcaagtgtaggcttttatattaagaatttatgaaatcaaatcagtcgtcatcggatccggccaccatagattttagcttggctaggggtaaattaatagcatttaataactaactgatacaattaacaacaactctttctacatctaacggagaacgagtatagctcagcaggcagggagccgagcaagctattgcctattgggttgtgtaacttgtgttccatccctcgaataggtcttttttcacgactttcttctctatcaataatactgagttaactgtatgtacggggctacgggcccccatttctcgtcggttcgattcaacgcacgtttcgtggcgaacgtatataacgagctgcaaaatgcgggaaggacacgtgttacgttacagcggcaccatccatgagtgcgtgcattatattcctgatcgatccggccagccataaactccggtgctccacgctttgactccacccatctcgtctcgtctcgtcggcgcgtctcgcttgcccggcccactcacccgacacacggcgtacgcacgtacgacccccccgccacgcgtacgtacgctcgcgcgcgcccccacggttaatggtggcgcctcccctcccgacacataccacgtactacacactttaccacactgtacgatcgagcaccgcaacgtcacgtggccgcagccaatcggatggcgacgcgctcccgtggcgccggatgccggggccgcggcgtacgtgcgatgccgatgcgtcgcgtgtgcgtgcacgcatgcgcggatgcgccacctgccggctaggtcggccgcgctgtggcccgcgcgcccgcactgcgagaccagaccgagtctaggtgagcgatcgaacgatgcatgcgcggtgcgcgcggctgcggggaggggcagggcagcgtgggctccgccgtgtccgaaccgaacgcgatcgacgggtgagatggtggaggcatggagggtggagctatttattatgcgtaatgccatgtacaatacaccgccgtcgatagcggtctcaaactctcaatccttcacatcatctatcaaaaaaaaaatgtccttcacgtcagatccgaacatccatggcggtggggaccatggttctatgatatgtgcatatacaggttacggttgcctcgacgcgcttcagcttgggattgcgaaaccacaactcgggaccatgcgttgagcaacaccggagccctgtgatatgcatgggaaaaaattagaggtcgaggcgaggcctaggacttggtgtagtcgttgttgccactcgccgacgttgtggtagcctcgccactccccaccactgccaaggacttctctcgcagaggtcgtcgccgctccttgctactgaagtcgccgttgcaaatccagcgagttcgtgaccagattcagtgaactcgtggccagatccgccgccggcggttgtccctcggccgtcgcaagaatgggggagggaagaggccggcggccaaatctgacatcgccgttcgtagagaaggaatggcaagaggccgacgagctcgcagcttaatccaccgccaccatggggatccgctgtcgctgctcgcaaagaaaggagggggagtccaatgatgttatcccttccaccatcgccactcgcagagaagacgcggaggagaggctggaggtggaagagaagtgcacctgtggatgcgaagtaggccaggggagcagcgctgctgtggctgaagaggaggtgacaacgttgagaggaggaggtggcattgcggtcggccagttgtgggaatgaggatagtgatgggtaggaatagaaaataaagaagatgacaggagaggctgacggtgggtacatatctagattaggagtatctatatatttctttttgttgttataagatctaaaatagttatttataataacaaatatcataggggctaggggcagacacacaaaatgtatttagaagttgtcttcattgtaaacatcatggcttttgtatggtcttatcctatgtggcaggttaagaccactactccattgttgtcatgccctgaagtttcccttgccagctttaaaatttgtaaaataaatcgtccgaagaaattgttctttttaacctagagatgaatccctaattaataaatgcaaataataatcggaatctacatgtggaattttttcatggattctacatgtcaaaatatgctaacaggatttttagtggaattttcagagccttggaaataattttaaccaattaaaatgaacaaagggcaatattaaatccctggaaaaatcctttcttctttttctttttctttttcctcttttttctctcttcttgggccgtcggcccagtccattcgcctcccgcgccggccttccctcggctgggccggcccaagccgactcctccctcctccctaacccctccgggtcaccgataggtagggcccacctgtcggccccttcttccacctcccgcagtcgaaaccgccgcctaccgccgtcggtttccccgcttcccgcgcccactccgcccgtgccgcacgcccacgtcgccgctcaccttctccacacctcccgctagctcgcgcgcccgcaaacggcgggggatttgctcctttcccccactctctctctcctcctccacttcccccacgtcgccggccaaatcggccaccttcccggcctcgtccgcccctcccgagcccatataaaccatccctccactcccctccaccttttcctctttccaccgctccctcccgtgccctctatcgctcccgcgctgctacacccgccgccaccgccttttccactcctccggccgccgctcgccgccgctggagccgccgccgagccaatccgccgccgccattagcttcgccgccgccaaagctaccccggccgccgcatccccatccaatcccgccgtcggggcccgcttctccccgcgcgccggtgagtaccaccatagctgccgctgtcggccatggctctcgctcgtcatggacaccctctctccctctaacctctcacacttcctctcttagggtgtcctggagctcggccgccgttcgccgtcgccctccggtcgctcaccgtcgccgtttgccgtcgtctcctcccgcgccggccgaaccccggtgagaactccctccccttctcttcctcccgcgcgtgccgccgctccccacatgcgcgtcgccgcgatgcaccgtcgcccgcgtcgccggccgccgccgtcggtggccgcttgccgccgccgccctcgccataaccggccggccggcttgaagccgagccgagccaggctgccttcctccttcccccatgagccgccgcccggtgggccccgcctgccagtacccctccctcctccttgagccgctgaccagtggggcccgcatgtcggcgccgccccaccccttgctgacgtcagccctgggatgaattattgcgcaataaatacattaaggctttttctttattagtaaaaacacagataatcttctaaaaacataactaattcatccgaactccgattaagtccattcaagtctcagtaaattcataaaaatgtatagaatccattaaaaattgttttgtttcctgtttcagtagtcttatagcatgttttgcttgtgtgctttgtttgtcgcgtagatttcgcccgtttcgtcgattcgcggtttctcgaagacgttgctgtggttccatcagtgcgagagcaaggcaagtcatacattacaattgatcatattgtacccaatttacaaatgtcccgcatttctattaaatattgcattgttttacaatatcatgtgggatgggtcctattactcagctatatgttgtttcccttacgccattaataacttgggtattaaaatgactagatgttggtttaggagatgcttagccatgcttagttcaactagtgcacaaaaggggatcacattaaagcatagactttgattattggcaatagctttggattagtgccaccgcaatggtgttggttaattaaaatacactacatggtgggctgtgggtgcatggttttgctagtcgtgtccatggcgattaaggagcggttcacgggatgccctggaagaacttatcgtacttaccacaagccagcgtgggcaacggttgggcttgtagtgtagcttttctctagccgatgtacccaggcgagggtgggcatgatggagttgggtcggccggggtgtccggttgatcggcttccggattcaccgtggcacgaaaggggggctgcccgttgcctgttggggacgggggcgaaccctaaggtgtggtgcgatcggttagagagggttatgcgaagggtcctgtcacggcctctttccggtatgtcgtggtggcatgtcggcgcacgggaacgtgtcatgggactgtgtcttgtgggtacagttgtacacctctgatcagagtaaaactattcgaatagccgtgcccgcggttatgggcggtcgaccagattcaccgtgattagtctcacccctagtttagcttaatgaactggtgtagttcaggtggttggttgggcctgttgcaacgtggtgtagcgttggacagtgattggttaatactgcttaattgctactactgttttactgctttcaacttctgcttttaaatgctagctttatgcaaaagaacctttagcccccttggatatatcctgcatcatacctcctcttccggtacgacttgctgagtacagtgggtagtactcagtcttgctcttttcccccacaccagagttgaagttcttctcagttggagccgtctcagagaggttggttccgtcgctgccgtcaaggattgcctgtggaatggagtcgccttgctgctgaagtcaagctttccggtttagctcgcttttatcttttccgctgcatttgtaatcttttatatttttgtaagacgtggatctgtatgtcaacaattgtcgtttgtgtaccctggctggtcctggacagaggtttaatatacattcagcttagaaattctggttcgtgaatttctaggcgtgacaagtacatgccctaattggctggattcatttgactcgtctcatcgtggacttgatcacgagcaaaatttaagtgatgctctttttaataaagatggagatgaagttaagacacggaaaataagaaagtgaatatatatgattaattaagttttaattattataaatttaagatggattttgttcgtttgaatcgaattctagctattaacatagatcttcttttgtgcagttcccaattcaaaatttcttatagttataagtatttttagctccacaaatctatatatttagatttctatttctattttggattaaattttaaacaactataattcaacatacaaactttaaatttactatagatctaagatatggagttgtgcctaacaagatcatagatcccctattttagatcatagatcccctatttttctttttttccccagctgccagaagaacgccgactgtttttattaaggttaagataagaaaaaaaagtcagattacatgatgacaacggggttattgtgctgcctcaagcacatgcagccaacaattaggggatataaacaaccttagctcgacccagcaagtagcttaaaactcactggcattgtgtgccgcaaagctacggggcgccatcaagctactgctccaatcagaagggggcacaataatcttgccgctcggcaatgcccaaaactcctccataatcgcatccaataccagttcctgcactgttctggaggtctgcgcggtgagaccattaaattcgttgcaattaaatctttaaaacaagaccacacatggatatattccgacggaattttttttagcttattattgaattatttttaaatgttgcacgatgttccactaggtatatcggaattgtttcataaatcgaaaatatttcactcgtttaaatcgagtgttgtttcaccttatataaaaacaatgtttcagcaattagtgaaagaatgtttcagttcactgcaacatttgatccatacatagtgaaacattttttggtggaaaaaaataaaataaattccattaaaagggggtttccaaaatatgtgggttttttgttgcaatgaatatttcagttcactgcagcattatatctatacatagtgaaacattgtgagtacactaggtgaaatatttttggtggaacaaaaaataaaccaaattcccttaatagagaggttccaaaatatgtgggtgatttgttacaatggcagataggagcagagacgcggtggggcctagagcctacatgcagtgcgtggggggaggggcgcgtgggggagcgcccgatccggctccccccgcgccggtcgcccggcttagagcattctcgactttactatattataagaggcagcaatataaggatccggctgctgaaggcagaggcccacggtaaaatgagcatgttgctacagtaaaaccaattatttgtagttaattactcactccgttccattttaagtgcagccatagtttttcccgcccaactttgactgcccatcttattttaaaattttttttaaaaaaaattaaaacataagtcacgagtagagtactattcatgttttatcatctcataacaacaaaaatattaattataaaattttttcaaataagacggacgatcaaagttgagcgctaaaacttatggttgcacttaaaatgggacggatggagtactatagcaatcaatctcatttgttcgtcgtaaatcagacgggctaagaattaccccaaaatcatggcactgtacacttcattgtgtaaagttagaggatcccgatccgtaatatattcacacctatgtggcagagcataacatctatgcaatcgtggcctcaattacaaatatagaacataaactacaagtgccccaatatacatgttactaacatatcgaactcgaacgcgatagtatatattttggcaattggacccgtgcgggcgaaaaacggccctgcgcgaccggatggtccgaacagtgtgcccccaaggtcgtcatcggacttgtttctccggcaatgctcggtttgaaaatggcgggactcggtgacgatttacgactagtcgctttggagtactagtattttggggcgtttttccttgcccatccgcggttgttgtgtcgtctgcttcagttccaccccccaacttgagtcgaggttgttgtcgatcgatcgagctagcgtgcgtacggggcccggccagggcgaacacacgaggggaggggaaagcgcacacaccgtacgctactacgtgcgggggcgcagttgacgggcgggcaatccggctcgcctgcctcggcggctgtagggggggggggggggggaaagagatgaatacgcttaaggaataggaaaaagacggaaggaatgccataaaggacataaaaggaagagaaagaatgggaggtcaggagttgctggagatcacgatatggttagatctcacttccccaggccccactccttcaaggacccaaggagtttttactttgggggccccccagggcattgggggaatttgtggatggaatcagaggagagagcttgagccttggtccttttgggagtgtcttagcctctttagtcaccattgagataggttgcctctggcctcaaagactccccagggccttggggctcttaggcacgattagccttttttcacttaagtacaagcagtgaccgggcagacccagaaaacaatatttagaattgaaagaaaagaaattcaactagctacccaggtggt

SEQ ID NO: 7481 - DNA, 50628 bp, Oryza sativa
ctttgttcgggctttatatccctccatgttcgggtatatcataaagcttaaggccggactcattctagcagaccaggtaagggacagtgtccgaaacaactgatagagttatatcttaacttaattaagataattacccataggaatcccctctatcctaaccctaccatttggtttttgtctttggatgaatcacgatcttagatagtgcacacacgttccctgtgattagatacccctggaatactctgaggtaaagtgctacagcggtatccgtactttgcaaatttatttgtgtgcataataaataccaacacctacttgtattaggatgatagctcaagtatacttcgagctcgagcctacaccctaaagtttgattgagctccactcacttggtcaaagtttagacatgttgacaagtttgtgtgcccctcgtctaacataatttataataacatgctacaccaggacatccatcatgcatttgcgctttgtgtgccattctcttggcattttaggttgtgtcgtagggcaatggagagagagatttagaagaaatgtcaacccacagagtgacattttcatcttttcacgcgggtaaagaatattgtagtaactacgtctacaatggcatgtggtagaaaaagtggtaaatttgtttgtattgatcaatggatgctatgttgatgacaaatattcatttttggacaagctcattgcttagaattgactattttattagcaaatagtattgttgtaaatccaccgtaatttgtgcctttcttttcacaaaaatatggtgctggtgccttgcaagtgcttgcatgtagtctttgagctatatgccatcacaatcttttgcttttctataccatttccagtttggtatacaaagatgaatgcaagtatgtgacatcaagtccgatgtgtgctgcaaggtgggaagcttggacattgttgatgacatgtgggggctcttggatgtgatagctagagagaaagggacgaggaaatgaatggaaagatgaagggtgcatgagagacaagttattaccttgtgttggcatacagtcatgaaatcgattttgtttttacattcaattgaaacacctttgcataacttcgttaagcgttgttgtgttgttgctttgttttgacgtgccatgataacgccatacattctgtctcaatattagtatccaaattaggttataaccaacacaaggctacatggaggaaatttatttatgatatggatgagaataatccaaatccttctatacaacaattgtttttgacttcattggggctttaggatttgccacttcaaacaatgacaattcaagatttgctaatatatgtctatgacatgtgggactaaggttaaaatatgagctgcgcggtgtcaaatcttagaatgccacttggaggagtgtcaaatcatgaaaaaattccattacatttttctcgtgaaaaagggctaaatttgaggccgttagatcagagatcgtacgactaggatatagtcgttttgtctatatatacccatatccccctctagacctaatcgctaccactcccaaatccgcgctgcctcttcatctccttttcactctccttctcttctctcgtcatcgtgtcctttctcccctggatctcccctctttctccccacacccctctattcccaataggttgtctagtcggtaccctgtcgctcaactagtgcccctttgccatgcccccatctactccaagacagggtgatatggaggcaactccttggtagctcgaaaaactcaactcgaggtagagcccatattttggatggagaatacatcgtcggaagtggatatgaaaaactcaactcaaggtagagcccatattttggatggataatacatcgtcggaagtggatttgggatgcgctggcttcatatttggtataaggtgtacctcatctccctatatggatcgtggagaaacaaatagaaggtaagaaactcaatctttttctcctaaacgactacgtgatcgttacacatcatttttccatatatctacatataacgtcatcaattccccactcttctattcatctttcttcatctcacaaaattaccttatagatagctaatcatcttgcaaaaatctcaaggaaattctaaccgagcatgctttcttttttcatcggaaatggagttggtattcaccagccccgtttttggtatcctcctccccagtcatgaagtagaaagaaggtaagaatctcaatctttttgctaaatatgtactccctccgtcccaaaaaaaccccaacataattggggatgggacattatctagtccaatatgtccagatgcattggactaggtaatgtctgtccagatgcattagactaggtaatgtcccatccccaactatgttggagttttttggacggagggaaatatgtccagatgcattggactaggtaatgtcccatccctaactatgttggggttttttgagatggagggagtagtcgattggtatatactattatcatttatcatttttctatagaaccaacatatctcatgagtcctggttcttcccatctctccccatctcacaaaattaacttgtaatcatctctcagaatcgtgaggaagtttgaacatgtacaactttcgcaattcttcggtagcccaacccccaccaagcaacacacaaggatttgcacgaatccttacggtgtgagtcatacacggtcactaatcacctgtcacgatgccactacccggaaaaaaaaatcaggctcgcacacgcacacactgcacagaaaccgtgtgatccatccatcgcacggtcgccggagctcgccgcgccgccgggacggagcacggccggcggcgaccaaacagtcacacgggccaccggaccagccgtcaccgaatcgccgattgccggcgctgccctgcaccaaatcgagcgggatcggtcgcgttcgaaagctagtttctggctctacagaacgggagtggtctcagccgaaatggtcgatcgtgtcgacgggaatcgcctctcgaagtcgggagagaagcacaccagtaacaatagtttccaaaaacgaaccaaccatcactcatcgagccatttctccctcgactctcaaccaaaccccacaaatttggtctcgttcgaaagctaatttgagcaactaaaattcgtagaaagaccgcgtcgtgaaatatccatcgtggagagagatatttgctcgcaaagtcggggcagaaacacacgagggaacagcggccggcggctgtagccccatcccgtgggcggaatccgtggcgcgggcgcgtcgagcgatccccgccgtcggatgggttccgatccgacggctgcggtggatcgtggcgcgcatccgcgtggctaatccgtgggatcgcgtctcgaccaatcacagcgcgtcagctgcgtcacccgagtcctccactcgtctccgctatttaagccgccgtcttcgcctccggcctcctcacccacatccgccgccgccgccgcagaatcggaagcaatccgccgcgagtcgcgaccatttcttgcgagtagtagtagaggggagagtgagtgaggggcgtgctgcaatggcgactgaggaggttgtccctgaggttccggtgaccgaggtggaggctgccgcggcggaggaggccgtcgaggagacgacggcggcggaggagaaggccgccaagccggcgaaggagaagaagaaggccggcaggccgccgaaggagaagaaggaggccaagccggcgaaggagaagaaggtgaaggaggccaaggccaagaagccccgcgtcgccgccgcccacccgccgtacgccgaggtactaaccgtctcaaccctccgccgtcgcggggattcttggattgaaatcatcggatgggttttggattcgtctcgatctatcgtttgcttttgcgtgtttggatctgattttgttttggggtttttttcagatgatcatggaggcgatcgtggcgctgaaggagaggactggatcgagctcccaggccatcggcaagcacatccatgccaaccatggcgccaacctgccgcccaacttccgcaagctcctctccggcaacctcaagaagctcaccgccgccggcaagctggccaaggtcaagaactccttcaagctctcctccacccgccctgccgctccggccgccgccgacgccaagcccaaggccgcccccgccacgaagcccaaggtcaagaccaccaaggccgcgaagccggctgccaaggcgaaggctcctgctaccaccaaggccgcgaagccggcgaccaagaccaagatcaaggtcgccgccgcgccggcggcgaagcccaaggcgtctcccaaggcgaaggccaagaccgccacctcgccggtgaagccccgcggccgccctgccaagtccgccaagacctctgccaaggactcgcctgccaagaaggcggcgccggtggctgccaagaagaaggcggcggcgaccaagaagaaggcgtcggtggctgcggcgccggctgctcgcaagggtgcggcgaggaagagcatgaagtagaggtcgccggcgatgatgccacctggattggattgcccaccttttgatctccacaggcgacagcgccattagcatcatcatcagcaagtagtagcagaaattgtgttctgtaaatgcttgttcgtcttagttcgtttcacctccctctaggcggtatcatcatcttctcgcctgtaatgataggatcccatcatcctcaaaaaccataatacaaatatctatttcgtcttaatctctcgtgcatctctttgtgaatcgttcttgaattttgatgctgacctcagatttgcctgtaactttcatgtgccttgattggttgatttggatttgggaattctaccgtactagtagtactgatgggtcgcgaatgtttcatgtgcaaaaataatcagcgattcgagttgtgaaattctttcgcgaaattctttcgctccagggcgtttgaatgctgtagtaactgaaatttgattggggatactggtggcggagtactttatacagttgtccttcggttggattttttgattttgaatttggactcgggaagaacgctcgcttcggaggcgggaaaactttccatttttggtcggcccgtgggccgtgttgggccgaggcccacgtgggagtgggaaggcccacgcaccgcgatgatgagttgatcgacggcaagggaagcggagccggagggtggaggcctaactaaaaccctagggcttccgcgacctcaaccctagttggcttccagaagcttctagaaggtgcccgaggcgtcgtctcggtcgagcgccatggatctggaccccgagggcctcttccgcgacgacagcgacgaggatgacgacaacgtccaggtcgcgttccaccctgttcgagcttccctatcccccattttttctgtggctcgaatcctgtgaattgatgagcggtttggtttcttggagggaacaggagagggaggccaacaaggagatggtcgtctacctcatcgacgcctcgcccaagatgttcacccctgcgaccaaggtgaaattccagcagcttcagcgcctaatttgataaatctctctgccctgtgcgagctcaagtgttgcaattagcgatggatattgggaatgggatgatacatttaccgattattttatctgtgatgtttggtctggattggattgtctatgttcaatcaagttcttttgctaggtagtagttaagcatgttttttctgccatttattgcaggcagatgaaaaggaggagacacattttcatacgatagtgaactgcatcacacatgcgctgaagacgcagattatcggtagatcctatgatgaagtcgctatatgtttctttaacacggtaagactaattaaagaactatgtgtcatcttatatattgctatgactctgcttctattagtcagctagttaatttctttgctgtttaaatctatgatttctacaagtatttaacatccacagtgttgtaagtctacaccacactgttgcttgttagttttaattaattatattttctaagcttgacagatgaacatacttaaaatgtgaaaaaagaatcagaattgccaagtggtaaaaggaagaaaaaaaaagacaagttgctatattttggtaacagtaactcttaattggttgaaaagctgatctgaattttgttactttgcaccatggagattataaatataaatatatgattctcagataattggtaaaataatctatgatattcttatcccactcactatccttagatcattaacaatgtaggatctgtatatcgttatccttatgtcattacaagatatgcttgtttgatctggtttttacataactattgcagaaagaaaagaagaatttacaggaattggctggtgtttatgtttataatgttacagagagagaaccacttgataggcctgatgcaagattgattaaggaattttcttgtatagaaggtaatgtaattacataaattgttcttttctcaatacatgaatgtggtgatgtggtcaaggtttgtgggatatgcatgctttacttctttcatgtactaggtatggttcatagatcatcattgaattgtccaactgaacgcttgcctttcattacttgtatggaatattataggattgacatgtttgttttcttttagcaaaatattctgagaaattgtgaaatttgtgattatgcaatctttcctatcatctatctgtagaatttgtttgggttttcattttcttttgccacatcatcaccattcctattccacctgcattttctagcttacaatttgtgctgccttatatgttctatcttcttctcaaaacttatttaacagactataatgcctagtgttttagaaagtcgaacacatgatctgttatctgtgtcttgagttgcttctctgttcccattaggaacttaaggtttgataatatcatatttcttctgtaaaattgactccaagatctcattagaagcagtacatcactatttcgtattgatgttttatattatatttattttgtctgaaagtccaggtagattgaattggcctgctatacttattgtgtagcaaaattgagcatctttttttgcatgacatgattataaagcttattttgattaatggtagattcttttatgagtaatattggaagtcggtacggaataacttttggatctcgagagaataccttgtacaatgctttttgggttgcacaggcattgctgcgtaaagggtaacacaccactttccctccttcagctctaaaaagcagcatagctttaataacaaattctattagagctttaacatattctctatatacctcaacctgtttttcaggtgcactcaacaaatttaaaattttcgcatattgcgcaaaaatgatgcattttgcaccatttgcattatactgaatgttgatgaggatatttaaatactttaagtgaatgaacattctgctggtggttttataaattcttcagatctgtgaagactgtgagtaagcggattgttatattcaccaacgaagatgatccttttggtggtcttacaggagcagtaaagactgatatgataaggacaacaatccaacgtgcaagagtatgcctatgacagatatatgttcaatttcgtgctgaatcacaacaacataccatgttcttagtggcctttgtatcattaattgtctattgtcttcctacaggatgcacaagatcttggcctgtccattgaacttcttcctttgagtaggcccgatgaggagttcaacatgtccctgttttatgcagtaaatctcttttatcacatattgcgcaacccttttaagttccaacggctaaacaacacctatttcccaggatttaattggtctggagggagatgaaatagtggattatctgccatcttctggtgaaaagtattgctccctaagcatcgatttcacttgttgattgttttctgattagtgattagttgatagttgcagatttactatataccatcttttgcttgcattaccaaagtacggaacaaaagatccatcattgagtggagataacctgtgctacagaattagacgtagcaatgctgtcctctatttttctgtagtaggtggcagttctgcttggagttccctgtagtatattgttaaaatcttcaaagttgaatagcttcctgtctgtgttccagccttttgggcatcgtgtatgggatttaggtgaagtagcctctgggtgtttctcatatgaactaatgttgcactaaacttgaacctctgtatggttgctaattaatagtaatgaccgacttacactatattaagaaacctcagtaatgtctactcttggccatcaatgtcttagtcttagtcatctattaatatgcacaagctactctgttggtccctagtaattttagaattctattgtttgaacggcacagattagcttagacctagttattctcattgtcttatccagtattgtcttctttgaaggctggaggatatgactaatcagctgaaaaaacgaatgatgaagaaacgcaaagtcaaaactcttgcatttgcaattaccaatgatgtttgcatagaggtgaatacatatgcgctaatccgttcaactactccaggtatgctctaacaactggcgatatttacttctttatctctttgcataatgttgctgtgagaatgtatgtataggcttgttactgtgacatcctttttgtaggggcaattacatggcttgattctatcagcaacctgccattgaaggtgattcatgcttcatgacaaagagatcaattttgtgttacttttttttttttggggggggggggagattcggagttataaaatatcaagttttatgcggtactttaacaagaatgtatgtgtaggctgaaaggtctttcatatgcaatgacactggggcccttattcaggatccacaaaagcgcttccaggtgtacaatgagtaagtacacacatgagactggtgaaccaaagcggtgttatttttgtataattttctgggttgggttctgtgatctgcttcttgattgcttcatcaagcgcagaagtctacagttatgagtcatggcacgatcattgtctcgtcattccgtcatgttgttccttttccgtttcagtttgatgcttatatttgtaatccaaaactactttatcatatattcatgcacttttttgcacagcaaaattgttaaattctctactcgtgaattgtctgatgtgaagagggtttcaagtcatcatctacgccttttaggattcaagccactggactaccttaaagattatcacaacttaagaccgtcaacatttatttaccccagtgatgaggtaataacattacttcatgtacttcttaacttcaatcttgaggccctcttggcacagctccggatccaagatttcttggagctgggtattccgagctccacaaatccatggatctggatctgtgattacgttgataaacatttggataaatcatcttgttcccatttaaaattttaaatcactataatttaatacacaaacttcaaatctaccgtttgagttacagtttgaagttatactagtacaattatctccttcatcttaattttttttgtcaaacacgcaggagagctgcgtagtcttgacaatattttgttatcttgttcgtttgttccctagattattgtacttctctagcttgaagcaataatataatagttgaaaaccttaatcattttatttgatgatattatttttcataataaaagatctatttgtgttcgatacacatccctgctgcatgctacttccaaactaaactaaatctgtctgaacatatttaggattgtattgtggtgtatgcttatttctttctcagtctttacttaaatctagggtgcatgttaggtttacctccttttgtttgatgcagcaaatatttggaagcactcgtgttttcgttgctttacatagctcaatgcggcgtcttggaaggttaagtcgacttattatatttctgccataatttctttaattttgaaagggtttagaaactgacatagttataaatggacataatgtatgtcaagtcataaaatgtactgtggattaaattaattaacattactgctcattttttgggataattagtgaggggatgcaattgaaaggggatgttagttttgttgaaatatcactctatgcgatagttatctcaaattacagctcactagtaatatgcccgtgctaaatgctacggtccaattttatttgtctttaataattttcaaaacgtcatgttagccaaaaaataaaaataaattatatgatctgagctttacgtacatcaaacaattttcacacataacacatcagtctcctttagatgtagataactcaaaataaacacataacacattagtttcctttaaaaagaataggcaatcgaagaaccatataatatagatagaattccttgatatgccaaaggacaaaatagctgaaaaaatatatgttggctagcttatgaaatgccacaaaaacagaaatctaactttagaatcaattaaataaagtttgcatatagtttgagccagaaacatcaaatagtaatactcccgcaaatcctaagatatcatttgaaaaggatgtgctcgagtgaatagtgatacaggccgccctccgaaccttctaaatgaactcaacaaagcaaaattacttagtggtttcatatttaaccatacaaatagttaagccaaggcactgtcatgttctaatattcagattagcattcaagtgtccatataagccctaacaatttattccacttatacttaaatccaacccattcaactcacgttatacattggaaggaggaactacatagagtagagctctcagcgttggtgggagattacacaggaaaagataaagctaccaacaaaattcagcaaccttaggggattactgaaatgtgtcactctcgccatcctccggcatccaaaatctgctctgaaatcctctgaattagcttctaatagtgatctcctcatggaaaacccaccttttagaagcagaaaagagctatcaaagtgaaaagagtagtagttattatttctgtcaagtacagataaccaagaacatatttgttaaaattgtaagttttatccatcgagacagaacagaaacataaataactgaaaagttggactcttgtgcatctgtaagatttgagtgaataaacactaaggatggaccatagcagcaacttgcaaagcacaggcttttttagctagtttatgcaaaggtactcaagtgtccatagaagccctaatgatgcattccacttatacttaaaatggaaaatgtcaactaaaccaaaaccatcgccaattaatgtagtccattaattatccatgctaatccagttcttccataattatgcctactaacataagatgccataagtaattacaggaggcctcccatctggatgacagaagagatagattgcttttagcaagaaaactgaataatattttttaacacaaaaaatcgcaagatacaataaaccagtccaatcacttaacccaaatgagaaaactgtatgccagatggataccttgttggtctggccacaatatagaacactcaagaaatctagaacgctaaagatgtgctcaatgaaatgcgtctgtgctgccaacttcacggtcgcaccagagctgctcccctacatgaaaaaaagaacacaaaataaaaaaagaatcagaaaaaaggaggccacaatttccttcagcggatgccagcttagaacgaaagaggttccacactttgtatccaaccttagtttcactcttgttacgtgcatacacaaacaacattgccttgcacactgcaatatagaaataatagatgaagttctagaaatagatggatttcgttactgcttaaggcctcaacggacttggattcgccggggaccacgctccttgcccgcacttcttcagatcttgttgcagagaagactacctcctgacctcttccaccactctctccgcatcctgcatgaagcagagtatcatgtatgatggacaagatgataatggtgaataatatggttcttatatgcttaccatgtaagattaaatggagatgatgcgggagagagaggacactgggagcaacgtggtcacggtggattgcgaccggcgcccggcggggcgtggacgcggccgaggagagcttaccttgttgcctagatcgtgtcaccgctgtacgcctcccattcggcctccgcatccttgcctcgccgcttactaccgcccgcctgaccgaagaaaatccctcctacatctgccgttgtcgcgtccttggtcctataaccggccaccgcctctgctggcgcaagggcaacgacggcgctagtgttgagggggcgccggtgtgtggaagggctcgagggcgaggtggcacaccgaatccccaggaggcagatatattagcggcagctccagtcagccacggcctagatcagcgatgcgagcggtggtgacggcgacgtgatttgcgaagttcggcgtgatttttgcgcagggagggagggagggagcgcggtggggatgtagagagcggatctgggagatggagagagggtggcggagagccggagaggggttgtgctgggttctggcggcggagcgaatcgtcggcggggagggctgtgcgacggcgattttgcggagggaggcgcgggatgggggtgcgacgtgcgagggcgaggccgtgagggcggcggctggcgatttggcggagggcgaagggcggtgtgcgaaagaaaagggaaaggaaaccgagcggtgatcccgtgcgtgcgattttccgctggtgaccccgcctgctaagttgttgattctgatgcgtcagatctcagcgagataatctggaccgttccatgatgaatgaaagaatgaaagaatgagtaaaagtatttgttgaactatagggtagataatgtacaaagcggcacagagttgtttgaattgttaaatgacaatagaaaatgttttgggattttttgccaatcttgtcattgcaattcactgagtttttaagaaaatgagaaaaaggaagaaaacaggtgttattttatgatttgtaaagctatactgttgttgacatcagggaatatatttctttaagtcataggctcaaatggtttgtttatttggcacctttttctgaactgtaagtttccagtgatgtcacttaggctttccgtcctaatgcaagtcatgtatttgtgacactaagtgactgggaatatgtattccgtcctaatgcaagtcatgcataggcaaaggtcctctgtagcctagtacatgcttatactaaccatgcatatgatatttcatgtggtcattttatatggttacatggtgcatttgaaaacttacaattatgaattgtaccatttcaggtttgcacttgcattttacgggaatccaactcgcccacaacttgtagcccttattgcacaagtgagggattctctccatgtctatattttgctttacgacatttgctgcattcagaattctagtttacaagtacaatatcagtgacctagttaaaacatatatatcaattgttaactaatgggttaatcctactgtgacgttgcaaaagaaagttcttatgctatttggaacttttcgagattgattgtggtacaaacacctgttggctacaaaaaaagaactagactgagccttgcttctttccacatattcccagcagccacctatatattaacatgggtgggaattgggaaaactggtaaagtgttttgtgaaatgcataacatagagacgcacatgcggccacatattttcgttttgtattctgtctgaattttgtttgtcagggattcttattacatagctatatcttatatactttttgaaattgactctggagaaaaataacaggaagaggttacttctgctggtggtcaaattgaaccacctggaatacacatgatctatcttccatactcggatgatgttagatatcctgaggaggtaatgattggcaccgcatccatatttcatcttttcagtaagctaataatttcaccttggcgtgcaggttcatctgacttctgatgatgcacctcgtgccacagatgaacaaattaagaaagcttcaaatctattgagacgtattgatttgaagaacttctcagtatgccaattttctaacccaggtaatcactgcatttatttgaacctcttattcacatcattaccgacagtactacattgagggtctgtttggttgttgcctaacattgccataactcagtttgccataggtgtggcatggcaaacaaagtgtggccaacaatttgttggccacaagtgtggcaatgtttggctagaaaatgagtatatgacatgtaggcccatgaaataagaaagtgtggcttgccacaactgaaacaagcaaccaaacgctaagctaacaatctgtggcatgcctaacatgtggtgtggcaatgtgtggcaccaaaccaaacagcccctgagttcatgtatttgtgaacctatccttcatacataaattctgataccatctgtgagcaattgctgctataatccgtagagctcattgggtcctgtcaataggcattaaagaagtattatgaacactccaatatgcagtacgactgaactattctgatcattgttcatgttttctattttccaccatgaaacagcattgcaaagacactatgggatcttggaggccttagctttaggtgaagatgagatgccagatgtcaaggatgaaacccttcctgatgaagagggcttggctaggtacttgtttttatttgtctattggagtctgctgaaatctccaaacccttatctgttcctctcgaatggaaattattgaataactatagagtcaagcatgttcatgttatttcagacactgaagatgaaagtgcagtctactacatattcaattcagttttacttttttgcataacaacaacgtacaacagtcacctcttgcttatgtgggttgtttcctaccactcttatctcaggccagtagtagttaaagctgtcgaggaatttaaggcttcagtctatggtgaaaattatgatcaagaggaagccgaggcagcagcagcgaaggctggggcttcaaagaagaggaaagcacttactgatgcagctgcagagaaaagtgcagcacataattgggcagaacttgcggatactggaaaggtaagcatgcaggtgctcttaccgatgggacaacaaagtgttctctaggcactgaattttactatgaaatatcttcttaatgctccaattaatctgataagaaattgtcttccagtagtttacccctctatggttctatccaccagtaattcaaaatgctagcttgcagtttgatatgccaatgtattacggaccttgcttatgtatgcaccacagcccaaaaagttttgaggcacataaataaaatgttgaaggctgtaatctcaagggaacaatacagccaggagctctatgctagtaacaattagcaactcatacttgaaacatcgatctttgcctgctttagaatttctgcctagtgatctgtcctgttcagctgttctgctctggaaatccaaatcaaccgtaaccctaatcgtttcgtaatttctgaattcgtaatttgcagctgaaggacatgacggtggtggacttgaaatcttacctgagtgcacatggcctcccagtttctggaaagaaagaggcactcgtcagcagaatcttgactcatctaggcaagtgaaatggtccacttcgacggcctactcagttttagctaactctgtaagctatctaaatttctctgaacatcttgaagtgcctatcaaaaaccctctccctgcttaggctgtgccaaattttgtagcaatatgacaacagctgaccccagttcatttggtatcatgtgcttttgtgacatgtaccactgggatttctcttaaatgtcactccagtctgcagagatcagatcattgttggtagaggaaagtgatccattagagaaagcaacaccaaacaagattattaagacattttttaagtgaagcagttgcaaccataatattcattttgagagaaataggtatgaaactaggaaggatcaaaggaccaaaagtgagagaaagcaagaagattggtacatgaattcacatcaatctgacgtctatttgttgtttttgccagcaaagcatatgcattaccagcaagatctcatataaacataaataaaatataaataactcttaaccttcacatagcaaatatttctatgtatgtacagacaaataatctggaaaaacaaattgcccactttacgcattctactactcctaccaagttcacctaagaaagtcttgtcaaatcaaatcaacaaattttataaccacagacaacttgagcaccgaagcttcagtttgtcagtcaccaaatggctaaacaaataaacaatgatattataacataaaaaattgtcaaagccggtgcagtaatatttattgcagcctgcatagcgcacccaacaagaagaaagagttcttgtcgaggaaataattaatttaatcaataagatctcaaggaagatgttactactaggcaataggcatggtgagattttccttgttcaatgttcgtggttttacttttaggttagaatagtagatgcctttccgtcgtccaatgcacgtgcacgaagtcagattattctcaccttattccctttccacttcattttattttttacttgaactgggctccttacaagtgctggtctgttttagatttatcctaacttaaaacttctttttaaagtctgattaagtttataaaaaatgtgacatcatccacaataccaaattatttaatggaactaattttgtgttgtagatgctgcagtattttttaaatataaatttgatcaaatgtattaaagtttgtcttgactgagaacaaacctaaaactgagatagtttctaagcaagggcataatgatctttgcactagaccatgtaatactatcttacgttaaaaaagaaattaacttgacaactttgaacgtaactgttttttataaatcccaaaagaagttacacaagaataatattacgtctgcttttgttatgacatactacttggttgcatcgtttttatatgtacaaacctatactgtaaacaataatcatggtcaaatttaacttgtatttacagtacaaatgctaacacagcattcttctgtacatgaattggtcataacaccaaccctagcaatctgcttttcgaagggattgacgaattcttatgagaaatccaacaccaaaatccctacttttgtactaaaaaaaagagatcatccagaacatgcagttgctgtagttgtttagctacacaatcattgaacatatgcagaagagtccagaccaacaaaaagtgtgaaattaggcaccgaaacttgcatttctgcaatgtaatgcctccaagatgccaacctgccatacagagaacctcactgcgtcctattcccccaaaccagtgttctctttgctacagggccatgattattgtgagaaaaattcaattatttcagtcagaatggaaagcatgcatatgcctttccaatcctaccacccatggtagtaggttcagctttgatgcttatctgaaaactatacaagccaaccattgcacaaagttgctcttaattgcctaatcattcagatcagtggacctctgtaactctcactaagtcattttcaattcttttcttttctcaaattaaaacctttaatgaaaccataattattggtctctgatgtagctgtgttagaggtgcattcagacttgtgcaaattgcaaatattgcattacttacatggtatacatagtttacatgattaaagtagaattatttgtataacacatgataagacatatgtcaacatctaaggaatgagagagaggatattgaccagatggggacttgagaggacaggtgagcaatacgtgtacatatattatatatataaattttataacttattttggtgcaaataatgcatgcaaattgctgtatccgtgtgtgttcatgcattgcattggaccatacaagatcaccgacttgtcaccataaagtatccttggatggagacccctttctcctctacttctagatgccccatgaatgatggtaagctggcaaatctcatggtatgggccatttcaatcatttatcagaatctagcacataaaacaagtaaattaaacattttgaactaatttgcagggacgattaaaaaacaaacgatgcaataataatcttcgcttcctcaaagaataattcctaggttgatcaatacttgatcaaagttgcccacattaaaacaaaaggataaataaattagtatatccctttgtgcatcatggagctcccaattgaaaatgttatgaaagcagcaatggatgcctccctgcaatagctggcaatgtgcaagtttgcatgttcatgtgttagatctattgtgtaccagagcttgacatggatgtccttatcagagacagactcacaactccaaacttggacttgtgttttgtagctttggacaccactatagtctcaatgcctttttttcctgcctaatcaaacacaaagaattaaacactgatcaccaacttgttatctttcagatgtcagctcaggaaactttgccttatgttactactgaatgacacactttgctttgctgtaccccttggataagaatgccaccctaatatttcttctttgaataagagacgtaccaaatatgaatgaaaaacatatgcatctttcctgattgcactttcttgcactactgatttatggtcagagaatgctagatacagccatgcatgtaactaactgaagccaatgaagattggaagtaattgcacttggcctacctaaactgtaccctatcttcttcagattcatagcacagtcacaaaacgttatactacatctttcagtttcttccctacaatatatgctaaatctctgaaaaaaagacgagcaaatccaatcttgaaactgtagatttactttgtcagaagggcatgtcgaacgtcagtagcattgttcaacagtacagactttgttgctcttgcaatgtgtcggcaaggtaacctctgaaagtgagcagcggctgatcgagattgctgtcagcaattccccctcacaatgagcaattccccctcacaatgatcatgaatcctttgagctaccatggtcatgatcatggtggcggcaccgactcgcgccattgctcaaatccaagaacccatcaatggttgtaaacatcgccgatccgtatcgcctatcagcgtcgaattgctcgatcttcggatgttcatcatcatcatactgaattactgatcatggctgttctgaaccttgtactgtgccatcttgtgcaatgccattgatgttcatgacctccttgtccttgcccatggcgtgctgctcatggttgctgcctccggtgtcagaggagctcccctgcaaatgctgctcctcttcgtcgtcgtcggcttggaacgtgatctcctcaaaccggccgtgcagctcggcgcaccgcctgcagccatggcgctccgccgccgccgccgatgacatgaagtcgacgagcgagccgcaggacgacgacgacgacgccgccggccggcagttcttgcagcaggcggcggcggcgccgcccggcgcgtccggatcatcgccgccgccgacgagatcgtcgtcgtcgtcgtcgtccgtcgctggacccggcctccagcccggcaccagcgcggcgaccttgccgtcgatcagctgggcgatgcgagtcacctcgtggtcggtgatgtccagctcggcgaccatctccgccgccacggtcatcgccgtgtcggcctcggtgtcgaaccggaagcagattatccggccacgccctgccacaattcagctcgaattcagacgaaattcgcccccacatttgacatcattttgtattataaatcaaatcaaatttgaacacccgccagttcaaaaatgcaacgatcacgtacctgtgccgttcttgtcggcgatgcgcaggccgaggtagacgccgccgtcgtccgtcctcctccccttgatggtgatgtccacgccaccgacacgctcgttggcgtcggcggcggcggcgtcgtcgtcgtcctcgtcgaacagcatgtggatgtcgcggagccagttgtcaccgtcgtcgtccccccgctgcacggccgcgtccacgtcgttgtcgccgacgctattcgacggcgacaagccgccattgctgcaggcatggtggtcgtcgatgcaagcaggctggtgcaggtagttgtacatcagattgtagtagccaacgccaaaaccgccatgtccatcgccgccgtcgccggagaagaagccatcatcctcaagcggcagcaggaacgggtcgtcgagcagctccctcgccgccggccgccgcgccgccggggcgaggcaccgttcgatgaattgcctcaccaccgggtcgctcaccctgtacaacgccgcgggcttgatcccctgatcagaaacacgcattctcttgatcaaatcgtgtccaagaattcacgagaaattctgtggtgatcagatcatacggagatgactcgcttgtagatttggatgggattggagcactcgctgtaggggtaatcgagggtgaccatctcgaggacgcacatgccgaaggagtagacgtcggcgagctcgtcgtaggactcgtcgtacacctcgggagccatgaactccggcgtgccgacgcagcgggcgtggccgccgccgcggcggaacgcggcgaggccgaggtcgccgatcttgacctcgccctggttgccgttgacgaagatgttgtcgcacttgaggtcgcgatggatgatgggcggcgagtgggcgtggaggtaggcgaggccgtcgaggatctgcgcgcaccagcgccgcaccgccgccgcgctcacccgccggtgcctctccctgtactggcggagcgtgccggagacgaagagctcggtgacgaagttgagggcgcggcgcggcgcgtccacccagtaggcgtggaggcgcacgatgccgcggtggcggagcgcggcgaggaggtggacctcgccgtagaaccgctccagctcgccgccgccccgcacgacgtcgcgcagccgcacctggttccacgccacctccactcccctccactcatcgaaccccctatacctgcacccgaaaaatcattccaaaatcaatcaaacactcaaattctaatcaagaaacacaatcaaacagaggattaaactaatttaggagaataaattggatcatctgatgaacttacacaatctttgacgatcccttgccaagaatctcattgaactgcagagagagagagaggaagcattaagaaacaaggtaagaagaagctggaggaagaagacgatgagatgggattagtagatgattactctgccatatcttccagtgggatcaacctcggcatagccagcctcagcgaggaggaggacgccatggccatggccattgctctgctgctgcagggctcccatcattctacacacactctgctcagctcagcagcaacacatctccattgatccactcaagaagaactcgtgagcgtggcacgtcgatctcgaggagatggaggtagagagagagaggagacacctctctctgttgctgcgtttttttaagtactattattcctgggtaagaacaaatttaatggtatagccaactactagctccaaatcatctatagttaatttaatagctagtttatataatagttatctataaacttatattgcactattaatttctagtcccacctgtcatacacatattgcgtctttaagtccgtgctgtagtactgctcctctcttatcttttatctttttaaaatatgattacagctcgtttatagtctgctattgtacttgttcagagctagtgagttgcatgtgcgtgattagagatgaaggagacggtgattaggctatgctacgagcaagtttaatagtatagccaactactagctacaaatcatctatagctaatataatagccaatttatacaatagttgcttactactatactattaatatctggttccacatatcatacagacattacgtctttaagtccgtgttgcagctggctacagatctatagtccgctgctcttctctcttcatttatctctttaaaatatgtttaagctattgtactgctctaatgacggtgcttaagcttagtggatgctgtggtggcggcgcttacgaaaagtggagcagcttggaagctttgaaaaaaaagtttgaaggcgatatgacaaattgataaggtgttggtctgcactgggcgtagaatccaggagctgcaatcaggaaattcttggtctttgtttccattaaaaaagaatacagtgataattgaaacttcgttcccattcaaagatagtaatggttgagacattggatatgtgggcagccggataatgtgattttttttctttcgccattagttacatcatcagacacatgtacaccacctgtagacacatgaatgcatatgcatggttttggggagaatatggaggggtttgtccggcctgtatgagcctaatctcttatcaagaaaagaaaactgaatgctcatattcagtttttctttctctctctttctatgggtgttacccagatgccgaagatggtgcaaaattgcaaaaaacctctgataatctataattctatctccattttatattataagatgttttaactttttctttagtttataaaaatattagtaacatctactacataatcgttttgtataagaatattactatatttgttctacaaatttaatcaaaatttaaaaagttcaacttagaaaaaaaaatcaaaacgtttttcacatacacattgacagacggctctgacaagtagataaccagatacctgccggtagtagaaattgcagcccagcccaccaaataacaggaggtcaaaacggcaagacccagaacccggtccaacaacatcgttctggctcaacaaaggaaagggccacaaggtggcagcattcacgttattataacaaaatgaacaatagtcgagaattacggcggagaattttattatcaactgcaacagttcaggcacattagcaaaaccttttaataattaatcccccattagacatatcttcaattcaggtacattagccagagacgacgatctgttgttacgttatggtgacgatacacatgtgcgacagcgatactgcataaatacgagatccaaaattaagcgtgctaattatctgcctcctgtagtagcaccgcatctatgtccttttttttttcgctttacctcttctctacttgcaacatgcacagtctgaagcgcaagagagctcaacgccatcttgcagaagctgacaggtagggtgctgatcactcatcatcagtactcagtcatcacttcttcgcctgccttcttgatgcagctccgatgaggagagccttcccaacaagcccagtgttgagcacgcagacggcagccactgcgccaccgaacaccacccatttccagtcgaaccctggttgaaccgctctggaattctcactctcatcgatggttttcgctgcattggagggctcttgatccagggggcaactggaactagcaatagatgtcttggtggttactcgagccatgatggcactgcgagagagggtgttctctgtgtctctcatttgctggtatgctctaaatccggactggaacttctttacagcaccccacatgccatgccggacacccaccttggcgacatctttagggatgcccatgtcctcgtagtggaccagcgttacttcacatgcggattgctgtccatcttgtttcggtgattgaactgtggttacccaaacagaaaagggaacagaatgtcaaggtataaacatttgtgttccttcttgaccaaaacttgtgatgaaaggaactaattcaggtgaagtaagaatagtggtaggaacaaaagttacctgctctaatacgccaacttgagaaatacagttccacacgccttggtttttccttcttaggcaaagctggataaggaactccctgcaaatggaagtgtttcagtgctcacaagtctctcaacaagcatatgcgctataatagatagtagtcaaattttctacatagtgcattgccaacaatcttcaaatacatgtatttctaatgttgattatgcaagaatgctaggccatggcgtctgattctctgggctgagatccaggtttgaaatttgaaccaaatgtaagaagagctacatgcatgagctatgcaaaagtatcctctagaagccagacactattgacttcgatctccattcacatcaactacaccttcaacaccttaaaatacaatggatgtatgtttgatctagcactctcaaaaaaagtaagtacaatcgtatcgatgtcagaattgcaatttgcagaaagccaggcaagattgctacgcaacaaacaatgttttagtataccagatcttttgttcactaaaagatctgccttgtagtcactaataaatctaattaccttctagacctagaatcctcatccttttagataattggaaaatatccagcctctgcgtcaagagaagcacccagaccgctacctagaatcctcaaaaatcagatactatctctattcatgaatatttatcacttttcaccacattttcttctgaataaatatttgtcacttcatgttcccaagtagaatttccagttttgtccttattcccctttccacttttggcagaaaatagtaagtagtttacttactagggttaatttggtcacatataaatagccttcgcaacagaacattggttaagcattcgtgaacagaggtagtatcttgcaataggtgctcatacaattacagtagttaagcacttaagttagatatccatatgagaacatcagccaaagccaggttagcatatcataaaaatgtcttgtgaaaatagtaatactggaaccttgtggtagaaatacctttgtaacacaatagtaagttttcccagattcccatatccgccgcccaaaaatgtattcacggtcactgcaaaagaaagggaactacaaaacaagcaacatgttgaaattacatgattcaatatgtaatttgggggatatgcttgtcaagagatatgcaggtcaagttgtcataccttttttatccagtgaataatcatagttccattttgggggaactcctccaaaattttgaaatatgcaagcatgggatcccacttcagacgaaattcatcatcccagaagaaatctctaacaagctcaggagtagcatcctcaaaaatagtgcgactacagtacatgataggtcccacctacaagcaaaggaagatcagtccattagatgttgcactataacctatatgctattgatttggtcacatcaaacgtagattcattgaaaagacaggaaatgaaccaaaggtgcaaagcaaggaaatgaattaatattataccacggcaagccaaggtcatcacaggattttaaaaacataaattctgatcttggtacagttgattcaactttcagagtttttctttcaattcagatgctagtatttaacttatttctaatacagggccctctaatcatttacgcaatcacgctatacatatactttgacatctgtttctttcctacaatcccattggaaaacatacctcaggctcacggcgccaggccttgtaagtcatgttggaagtggtacgttccatcaaatgctgccatgttgtatccccactctccttgttatcaagaagttgtacgaggtgttctaggtccttctcagtgacaacatgatggccgccctcaaaaaatgttctaatatggacagaagaaaaggattttagcaaacagtttgttgcataaacctatattgaagtcagtttaaatagatgcaatcatgctttgaaataactttttgtttgcattagttattaactactgtaacataacaaatgggtcacccgatgaaaaaacatatcaactaggtcaatatataacaggcaatcatgtaaaagttcaattatgtccaacaagtctaaaattctcaagtcctaatcagcatttgaaatttcagtcagaagctcccagtcatttatgttgatgatggcttgatgcattttatgtcagtacatcgaccattgatcacccacttgacccaatgaactcaatcacatcaaattcagttgctaaagaaagaagaataagtctgttactcaactccacaatttggcaataacagtattggtcaaattcaagggtaaagtacaatggatcatcttattaacagttgtacttaacaaatagcaaacgaattttcttgtactaatccttccactatatgattttaatatgacacattgaaacccttgatacgcacaactttcacttaatgttatctgtcggagcataaatactacggacatcaagcaccttaattttaacataacatcgataatttgaaattcaagcatgccataagcataaattcgctctgtcagtacatgtttttttagataatggattttcattaatccagcctctatagctctgtcagtacatatggcatcatcatcagttcagttaaaattatgcaatttcaccaaaagctacggcgctcctaacctgccatcagcattagtcaccacagaattgagttgtgagcacattgatttcgattatcagtaataaattcaatttcgagatggcgcacacctagttcccaacggacgcagctaacaaggcaaacgctgcgcattcccacctcatcctaccacgctaacccacagcgataatagataatccaactcaagaggatcccacctgccatcgacgcaatcgccggcgtccccggaggcgtcggcggcgtcgtcgtcgtcggccaaggcggcgtccttgcgctggtgcttgccgcggctgccgaaggcggtggagaggagccgcggcgcgacggagaaggcggagagcgcggtgcaggcgagccagaggcggcgcgcgccgaggcccgggggaacgtagaggaggcggaggcggcttcggaaccccaggtagagcagccccgtccatcgcggccgccacgcccagccgatgacgagcccgatcatgacggccgcccagatcggcaccgcgcacagcagcacgtccaccgccatctccgccaccgccggccgccgcagcagccccaccgcctcctcgtaccaccccgccattgctagggctcgaagcttcctccctctctctctctctctctctcctctctttttttccccttgcaaaaatggagaaagggaaggggaaggggaggagagagacacgggccagggcgacgagttgtttttggaggggtgggtgaaacatgcgtcggtgaggctggccggtggggccgcggggatctgggcccacctgtcagtggcagcgggggaggggcggttggtgaggcgggcccacctggcagtggataggggtgaatcggcagcatatgcctccgacatatacgggtctcgcgaggcggactcgtgtttatccggagaccggagtggatagaaataataattaatttagcgtgcgagattcacgatgagatccctccgcttgtgacgtggcggggcgttaatggccgcgggtaatcgttgaaacggtacgggcagtggggattggtcactggagcttgctccctgacacatggggcagccaattaattactgctccgctctgctttgacctgcaatgacatgtgggcccagccatctggtatgttgatcgagagctccatccataaattcgtactccctccgtctcataatataagagattttgagttttttttatttgtacttcttgattgctcgtcttattcaaaaaaatttaaaattattatttattttttttgacttgctttattatccaaaatactttaagcataacttttcgttttttatatttatacaaattttttgaataagacgagtggtcaaacagtgcaagcaaaaactcaaaatcccttatattatgggacggaaggagtattaattttgacttacaataatcaaatttgaccaatggtataaaagaaaatgctccatattagtttagtcaagttggtactatattgttttgtgttctagtcaatgtagtttatggaataatgccttacaataacagatattatctttactattaaatcatcgatggtacgagttgaaattaacaaatattgacaattggaatttgggagatcggtcatgtttgatttagattattaaacgaattattaaaaaataaacataataaatagcttagacaagttaataatgtgctagaaaacatctttttgagattgttttgttaaagcatggtgcaaataattcggtaaataaactgaaaagaatatggcaggagtaattatttctgtagcaacgcacattcagatggattcatggagtgcgttgcgaaatattcagagttggtcgaccttgttgatatcggttgaagacaacagaaggaatccagttaggcggctgcctcctgcatatcctaagcgaagcagctgggtcagttcagttcactttctcgaatacattttcaagaggtagcaacagctaatagcacgaataaaatatgaggcggttgttcaatgatgacacaaacaaagctgtaccgaattgacattttgagtctcaaccctcaacgatcaaccagaacatgtgattgcatcacgacaattattcgatcagaaaggaacataaaagtcatggaggaaaaacagcagagagatcagaaaagcgtatatgaatatataagctcgtgcctgtgttaattgagattccagaagaattgtcacaaaccgttgaggaacatgagcctagacgcttaagatacaataatttgaaatcacattaaacgcatgtgcaggatgtactgccaatccgagcagagagcaagatttgcaaagaaaacaaaaaaaaaatgtagctagcacatatactacttgtacaatcctcgagtgccatacatagaagagctacacttgaaaacaaacttctcgaaattactcaaattgagctacctttagaagaactatattggctttgcaactttactcaaccaaccatttcttgtcttgcaaaattcagcagcaccatcccttgttgattgaccgaaaatagcctgtgccccgatagtaaacctaatttaccaaccagcatcctccaatccctgcaacatcatgatgcatttaaatactgaagaaagcaagtaccagttttgaaataactaaacacttcattggaatcgagctcctagcaactgatgatctctttgctactcataaaattttgggggcctttcagtactctcaatcttttctgaagtaatctatgtgaatgctcaacaaacaaacatcaaggtaaaatatgtacccttggccacttttaatcaaatttacatattatattgttgaatttttttttttgtgtgcatggacaagagtaacccctgtctagtccaagctccagccaacattagtactacaccatcttgtccccatctcatcctctaacctagcccctccagcagtgcctcctttcttcacaatgcattggcatccataggaattgagagcgactctactgcccacacctttgcacagggcaggctttcgctgcatcaagtgggatgaagacacattcagggtggcttgttcaagtccataaaaaaactgagcacagctagaagctgatgaagcagttcactgtctttattggaagggtcaagtccgatttacccccctcaacactattgcaaaagtacaatttacccccttcaactataaaaccacaagatacacccctcatctattcaatccagacacttaaccccctcataccctgttttaggtggtttagggctgagttgtcttgacattacttgttctcatacaaaccttgcttctgacacattttgtgttctcataaagaacaaatccctgtttgtcattacaatgtcaacctggtgctattaagacttatattacttgttccttgtccttgcttctgtttctttttttttttttttggcacagacctcattgcacaaacaatatatatgacaggaaacaactgatttatatttctgtaaagaccttgggggtttctgcaaacaactgatttatatgacagaaaacaacgataaatttcttcttgtccagaacttggggggttttgctgttacattgcatggctacattttgatgttttgatctactaacggtatatgttcttcgctgtatgagtcagtcactgaaatgcaccaaattgtgagttccaaagaccacgaggtgccatctgggagaaatggcacaggtaaaaaacaagtgcctgcatcaagctaagtttgcaagattcagtggattatcaagacaactcagctctaaaccacctaaaacagggtatgaggggggcttaattgtccggattgaattgatgaggggtgtattttgtcttgtttcgtagtttaggggggggggtgtaaaatgaaatgaatccatggttcaagttccaggcctcacttaaatgtgacattgttcatagtgttaaactgacatagttcatggtattgttctaattaataatctgacacggttcaatacaaaaacctcgcatggccctgactagtctgggtggagaagcaactcgacagatccatcctcagaatcttctccagagtgaagtcagcaggaccggaggagaagaacatattccggttcagcgcgcttttgtggctgccatggcttgccgttcgatcaaggttttggggtcgggttgggaatgagttagggaattcagagctcaggtcttgggtggggccaggaatagccagtggtaaaaaacatccagtcaaaaatgcattgctaaagaagataaaaaatcgggcaaagggtatacaatggcatgcttggaagcaacgccagtttggaatgacatatttctaagcctcaactgatcagtggcatacatctaaagtggtaactatggagtagcaccaatctagtttttcttatattgagtacttgttatgggagcaaatattctggttgtgatatcaacttggactaccacgctgtaaattgggcttccccaaggcagcaaggccccacttacactagaatgaaattgagatcaagatttacatactggtcaacaaccaattcaaaataaagtatcagcttgcaagtattcaatgatctatgatgcaatgcaactcagtaaatcacccacaaagaaaaaaaatgtagtcattcagattgtcaaagttcaaactctaagatgcaatgaagctacacgcttttgatgggaatagccagaatgtggtccagaaaaaggatatgcatcagaactatttgttcacattcagcttcgagctttcaactatcataactgatatgtactgaaatttatatttacctgtctaagttatgacatgattgcctctactttggatcgtacttcaaccccagagaacgcttctaattaacttataatttataaaatactgtttcagaaatctaaggtggtgtttggatgcagggagactaattttagtccctatcacatcggaggttgggacactaattagaagtattaaacgtagactaatgacaaaacccattccataaccatggactaattcgcgagacaaatctattgagcctaattaattcatgagtagcctatgtgttgctacagtaaacatgtgctaaatatggattaattaggcttaaaaacttgtctcgcgaattagctttcatttatgcaattagttttgtaattagtctatgtttaatactcctaattagtatccaaacatccgatgtgacagggactaaagtttagttaggggtatcaaaacaccccctaagtaatcacactggaaaattaggtggaaaggaattgcattctatgtgtggacaactggactttaaagtgggtcaccacacacaagtcatataggtgtagattctaaaatagagacctgccacgcttgaatagacacacttgagactggcaattttatgaggtttcctatgttataaactgtcactattaaaccaccatgcgataattccacattttgttaccataataatccaatattcacatcaaatgaaaaaaaaggcccataacctatgttggacatctttgggctcaaccctgtcggttaactggtaaaggttcaatctgggaattttctcaacactacataatgcaagaccagctgtgattgacatgttgcaagtttgtttgatcacttccatgagcaaagtttgtatcataaaggccattggaactcattatttatgcacaaaataaatactgattaacacatgaaacacacctatattgatatggtttactccacttatcaacaacagaggcaacaagacaatttacattgttttcaaaaatcatttgtaactacgagattcgaccatccatagccttgcattatcgatacaattgcaagcaagtacataacattagtctccatttgcaaattaagaggcatcacaatataaccaagtagctcatcctccaatgcgcagtacataaatatccaatgcgcaatacataaatatctagcccccagagcatcttttaaaacttctaacgtgatttttttatactctagttatgcatctactgcataatcataaacttgcaaggacggataattatctccaagcaaaagatgccataccataaccaccgggagcaatcacatgcgtggctgcgggcgaaggatcatgatgatgatgtcaatggccatgaacgcgatgagcgggctgaggtcgagcttgcggccgaacacggggggcatgacctcgcggcagagcgcgaggaaggggtcgcagaggtcgcgcagcgcggagaatggctggcggtcccaggggatgttggggaaccacgagaagagcacgccgacgagcagcacctccctgtacacccccagccaccgcaccaccgccgacatcgccgcggccaccggcgcccgcagcggcgcgaggttgacgctccgcaggccgacctccagcgtcgagagcggggccagcagcccgcccaccgccgaagccgccgcctccgccgcggcgcgcggcggcggcggcgacgagcggaggccgcgggggagggggagcgggcggagggctagggtttggggcgggaggaggcgggtggcggggctcgggaaggcgcggcggaggaggggaggggggcgcaggcacggggaggtgaggacgccgtgcatctcgccgcctctctggggttctggaaggttctagaaggggtggggaggcgaggaggcggaggaggagatgaaggtgggggaggcttgcgaagaggaaaggatatggtgtgccaattgggatcctctcctgtaatgtatgtgcagtaagtgccactgacatgtgggcccggaataggtggaacccacatgccagtgacacatactgcaggtgcagtacagtgtacagcagtggatttgctactttttgtgggctccacttgtaagtgggtgtgtgttttgtatagtatccatgtcaaactggattaggctgcgttcagcatctctagtttccaaccggaaacaaacagttcgcacgaaaaatggagcggtatattagtgcgtgattaattaagtattagctattttaaaaaaaaatgaactaatttgattttttaagaaactttcatatagaaacttttttaaaaaaacgcaccatttagttatttaaaaatggtgtgcgcggaacacgagggagaggtgtttatatacggcttatatactccctccgtccctaaataaaaaatgattttggttgaatgtgacacatattagtacaacaaatgtctagattcgttgtactagaatgcatcacatccaaccaaaatctatttagggacggagggagtatattagttctaaaaacaaacttgtctgtggtcggcaattctgcatctataatttcataacttttttatttacaattccattgtgatgaattaatggccggccagattttggatttctttctagcaaaactcctattagaaagtagaaatccagataactagttatatatgaattttagacataaccagatgataatagataagttgtgttaatagtttaatatgtcatgattatttttggttgtgattgtatgaattatcatgacagtcatgtcaaaagttataattaaactcatgtagccatgtcaaatataattgatagtggcaacaaaatatactactccctccgtattttaatgtagggaaaattggaaccatgccattataattttgtaaaatttgagatatgtcattctgacccacatgtcattgactcatgtgggtactacatgtcattaagataccgatggcatatctcaaactttgtaaaattataatggcatggttccaaattacgctttaatgtatgacaccgttgactttttaatcaaagtttgatcattccttttattcaaatcttttgtgcaaatatgaaaatatttatgtcatgcttaaagaacatttgatgatgaatcaagttacaataaaataaatgataattatataatttttttgaataatacaaatagtgaaacgttagataaaaagtcaacggcgtcatatattaaaatatggaggtagtatttttttcacactgttaaagcatcagagtattaactattttgtagggcgaagaatcaaaattccatcacatatattcgagatgaagcccaagtgtccaactcccaggccctgcccacccatgggtgatgggccattgataccctgtgggttggcctgtggactattgagattatagcagcattcccttgcatgaaaataattctgagttttgtatttggaatcgattttttttctttttatgaactgttgcaataaactgaaatgactaatgtattattttcctcctgagaaatatcttttggcaatactatagttcaaacttctgacttctgaatatagataaacgaactcgatcgttgaaatctaaggatgaaatgatgaatgattgttggcagcatgtacttatatattttcagatataataacagtaacaaatcacatgtttgccattttcctttaacagcaagtactaactcgagggtacaagcgaatccaacaacaagccaaatcactgggcggaagcacaaatacctttggtatattaaagatatcaactgcagacctcgtcggctacattttttttctttcttttaaccatcagctgcattgtcagctaaccatcttcttatctttcaatttctacttgaggcaacacaacatgatcttcatgggaccaagacaagatatacaacttgataaacacatcacaaacaggtgcaaaaagataaatatattggacattagagcatctccgacattaggtaattttgcagagttgtagatgtcatgtcactgatagataacactaatgctgaaatagttatgaatactcgggcacagtaatatactagtgtttagttccaaagctgccaaccatgaatatgcagtgtcatactcataccccttacttgtcattaagacatttaatagtacaaattacagctccattaataataccagggcaattacttaaattagtgcttcaataaccacagcttagaaaaatcctaataactacattataggattccacggtgcagaaaagcatctgtcctagaaataatagcatgatggaggatgccaaagcaaatcttccacaacacagggaactactttccctgtggaaaaatcaacagaatgttgatccctaaaggaaaaccaggcaggcaggcaccaccaacatagaatgggagctgtttacggctttacgcctagaaaaacatgtgccaagtcagtcattatatatattaactgaaccaatcaagtcaaataaaacattagaaaaatcatgcataatgaaacattgatatagagaatctatgcgatcctaaatatgcaaaagacaaagtaacatctatagctactgaacagtgaacatattaagcttctagaaaaccaacatataagagcaatgcgtgttcaacacttcaactaacaattcaataacttgcaaatacatatgcatatcgtcggaaaaatacacctgctttctctctgctaattaagttcagcgctaacaggcaaaaaagtcttgcatggtaacaagtcatggtatgattttaatagagacaacgttgcaatcataaatgacaacgataaccaaatttcagttgtgttgattgcggctgctgtgcttagggagttatctaagagagcttggaacatatacactctccaggttcatgactgatcaaattgtgttgtactttgtcctcaaggtcactacttattgattgcaattttttgttgcaaaacctaagaagccagtacttcttctaagccctttagcagctccagacaagcagctgtgagactaataattgccaaccttgtatgcacatatcttatactaatccggtggaaagccggtagattccgaacaaatttcataaaccaaaatttaaatacaaattcccttagtttaccgataagctcatgaaaaccggtcggctttggcgaaattccgggtgaaatcatcgaaatttcaatcggtagctagaaaaagaggtaaactaaaattgatttcctttttttaattcgttattcttttcttttctactgtaaatttcagtaaatacatggaatacatcatttttttcgaaaatttatatcccaataggttctattaatatcatattatttataagattttatttgattttttcccttttttatcaattcaaatttgaatttgaatgaaactcatcgaaatatcagacggtttctactttcgagcctcgttgaaacctcggaatttcgcggaattcgaccggtttccattggaattgtgaaccctggcacatattggtgcaactaatagttcatttgtgcggccggttaagcacaaatgcaaagctgaaccaagaacatcttataacaatagttgtaactaacacacacaaaatgtttgtcaagaaaataagcaatcagtgctggtaatgaatacagacacttgtaacggtttgtaaacccaatcgagaaatgtgtgtacatctaattgcaatacattatatccaattaaaatgcaaagctacagccgcacagctgatctgggactgttaatagtataactttaatactaggaaaacacctaataattaaattgatattaggaaaacacctaataactagtaagccctgggtgcaagtgcaataatcagtgaatgttggagaagcccaatagaatcattcccctggaagcaaggcttcacttaccccctttctccactttcttttcactctctaccccttgctttctctctgaaagcttatctgtcccttgttccttcaggcagataagggaaacaatgagcttgattaattacctctagcaccacaaaatgctccaatcaaaggaatggttactactaaagagaacaatggagttaaaaaaaaattggtcaccaaccattgtctattaaagcaacatgtgtagatatgatgaatgatgctggtaggacttggtataaaatccgccgtaagtcgtctttatgatgctggcgacaatgacggggtttgaatctcctgaagataaagatagagatgaatattaagtgtttcacgtaaaacgaggtggtaatagcgtgtgattaattgagttttaattattataaacttgaaaatggattaatcttatattttagaacaactttcatatagaaagttttcacacgaaacgcaccgtttagcagtttgaaaagtgtggcacgaaaatcttaatcttcatccaaatcttattagagaaagaacagggccgattccgaggttgtattgtgcaagacaaaattccatgtgatggtaaaagacaatggtgtcgctaacaatggtaagaaacgcactggagttgacacatagattcctcttaccaaggaagagggaattgcaaccgatggtgctcaccaggacaaccattcccagcataaggtcgggtagcctgtaaactgaaaaatgccgatgaacactactaagatttgaggtggtcaccagatctgaatctccaagccgcattccaccaaattgtaggataaatgtgcttcgggtgttcttgctggacatttggcaatcaatcttggcggcggcggcgaggtgtccgtcggtgaatcgatctgcaatctctggttcatcgtaaattggcatgatcatatactccctcagctccgtttcattttaagtgtggttgtaagttttggtgtccaatatttgaccatccatcttatttaaaattttataaaaaaaattaaaaaataaagtcacacataaaatattatttataatttatcatctaataacaataaaagtattaatcataaaaaaattaaataagatagacagtcaaacattgaatacggaaactcacaattgcacttgaaatgggacagagagagtaacacatatagcttgccttggaatgacaatggggagaagaaattcttcattctcctgtttgttgaaatcctccattcatccattgcttatcgccggagatggcgacggacacatacaccgttccaaatagccacatcgtgagcgagacgactccaccggcggccactctgacagcggcgcgcgcctcgacgtctctgagacaaaaccacttacctcacatggctcacgtatggcagctaggtgtccagcggcgggaactcagcgatgccgccggtgaagggggtggaggaggcggatgatggcggttgttggagtgtataaagtgaattgcctgtcttttcctataaagtgcaacatgcttacttaatatggtatcagagtcagaggtcgcgcagtggtcgcggaagatgagagagacggacgcgggcgatggcgccgccggtggagaggttgaagaagctgacgaaccccgcgcagcttgcacggcgacgacacggccgcgcgggcaggtggtggctcaccagatcctccgggagagatgcccacgacgaatcatcccgagtggcggcgacggcggaggcggccgaccggccgtcagccgccggcgcgtgctcctgctgctgcctccgcacgggatcaaggcagccgggcgcttgctgctgctcgccattacgagacctcgtcggcgatggcatgccgcgcgcgtagacgatcggcgccggcggcggacgagctcgtcgcccgcgaggcggcggcggccgatgacaaagtctagggcatatcctcacggcccaactctttgtttttagactagcccaagcccaatctactgggcctcacacaccgatggcccatgggccattgctagctcgtggagaatcatggagagcatgaccgatgcaaataaattcagagcttttgtactactgtattactaggtcgctatattttatagtgcattaggtcgctaggtcgttccaaaatgttatcttttattaagagttttattctttttttgcgtattaaaaaaacatattgttgtagatgggtattgcatcattttcgacaatagttcagacatcagggtacagatgaaacgacttctcgtatgaatcttcagttctgagcctctttcccaacttgctgaatgaaccttggcagatgtgaaatgatcagaatgctgatacattttcagatatagttacaatgaaaaatcacatgctttgctcttttcctttaacaacaaatattttgggaatttgtttttttttcctagctaatttctgaagaatttgtactgcttcattttattgcaagtgactctgatgcaatgatgcattctatccatccaatggttattgttagtcatctctcacgcaaattttgccgacatgctgcagcctcaagattggtacatccaagctacattgccatgatcgagatgagcaggatgcagacgttgtacgttctgtacaaatcaaacaatcacatgatattacttctactactactactacctttttttctaatttcttcaccaaacagcaaagcttcgaaataggatcgagatggtgactgccgactagactagcttgtactacgtattgtcaaaactgaaaaagaaaaaaaaaagaagaatgacaattttgttgcttcaaaatgtgtgcaaattctacatgtacactcccaaagatgtagttattgaactaagtgcagtgtaggcaaacaattcagcaaaaaatatatgtactggatcgatccattaaccacatcgctttgcttaaatgtgtagctttctactcctctttaatagtgtggtaggctgtcagttgatgtaccagtgagtgattatgggatctcgacaagaattatggctctagctaggacagtagtactcagcaaatggagtggaaggtatcactttttttggtctgtgcaatcatcttcaagatctctacagggttatattgatggttcatatactaaaggaaaaaaagtagaaatttgaaatttcacgaaggatcgaggagaaatttcgccaatcaaataatgatctaacggctcataccactcggagagaaaatcagacagtacatgtttattttatgacttgacactttagtttgtgagaaagattattttttccattacgctagatggactctgaactaccatctctcattctaaatataagacggtttagacttgtttctttagtgcaagtcattttgaaacatctactatacattttaatccttttcctccacgtctgcgcctcctaaataaataaatatgactcattttttcccaatatttcatttcttagttcctgtttgttttgtcgctaaaattaaccctaatgccaaattttggttatataaagatgttgatgtaatatttggtttagaaccttaccaaaattgggtgcagcatttttggagtgcaagctttcgaagttgccacaatttggggatttaattatttgacactctttaccatatccgtctcgtccttatcacaaagtggcaatttgccacccatctctctggagtggctaaaaggtattatcacgctaatatttgatagggtagtaatggccaatacatgtttggtttgttgcctttacttaaatttagcatcatcaaaatttgacacgtttagtttagcaacaaacaaaaccggccttcaattaattcttatacataactctaaaacaacttatattaaaatcagtaatgctacttctaggattgttcaagaatgataaggtgccacacatatcacataattaatcacacactaatttgagctttaagataaccaccctatctgttttagggggagaaaaacaaataacatcccccaatggacaaaatgtcaagatcagtgttcctttcttaaaatgcaaaaggtgtctgaatttgcaaggtgcagcatccccatcttaaaatttcacactgcatgctgaggtgagctttgcaacatgtaggtaagatcagatggattggacaccatgagtggacaatgctggccggataaaatcaagcaaaccattatccctgcttgccttaaggaagctaattaattaaagttcatttcacactcacacacaaacagcctctgtgtattctgtggcaagataattaacatggtgaggtgaggtgaggtgaggtgatgttgctgtccgccatgcattattaattagtgtcccccattatcgagctaagctagcgtcgcttttggattaagggtttggtgctttgtgctaatcgagcttggactaattagatccaggcgatccatccatcgatcgatccgtcattgaagatggccacttctcccctgtgatgacttttattttgctgctctatctgatactgctgaacggcagcagatcgatcgatcgcgatagtacgttgcccattgtctgactggggatggcagttagccagtagccagttactgctgagtgctgacgaattcacgggacagtaaccgttccaattcatgctactgccaccgttaattgctgctatctgttaatgagttttctttttcgtcccctcctcccatcttacgctcatgtacgtagcacgagagaaaaaaaaagtgttgaaaatgatgtccgtggtatatataatatatctagccaaaataaatcttatcaaattttggtaaagttattagatagtaaaaagtacgaattacccccccaaactatcgtggtcgtccgaattaccccctgaaccacaaaccggacattcttcaccctaaactttcaataccggatgaaataccccccttgacccaattcatagcggttttatcctacgtggcgtatgcgtggcagtccagtcagcatttttttaaaaaaaaattggtggggtccacctgtcatgcctccactctacctcttcctaatttctctctccgttctgtctcacttgtgcgcgcaggcgcaagtgcggagcggcgggcggacgacggcggcgctcaggggcgagcggcggacgacggcgagtgggggcggcgcggagctgcggacgacggcggcgcgtgggggcgcgcggcggatggcggcgcgcgggggcgggcggcggacggcggcgagtaggggcgtcgcaagtgcgcacggtggcgcggagctgcggacgacggcggcgcgtggtggaagccggtgtgcggggggcggacggcggacgccggcgagtatgggcggcacaagtgagctcggcggcccggcgccgcggacaacggcggcgcttgggggcgagcggaggacggcggcgcgcgggggccgtcggggtcccgcatcgtccttccagatccgcgcgtcctccgcccccgtccgccgccggtcccgcgcgaacaagctcgctggcccagccttctccctcgtgcgctgtcgccgccgccggtgccccttcgtgcgagcgcggcgccgctaggcctggagcgcgggaagaaagcgacgccgccgtgtgcctccccgtgcgcgcgcggcaccgtcgcccccaactggtccgcccccggccgtcgccgtcctcggtccccctccgctgccccggccgtcactcaagcagctcctcgccgaggcccacgccgcgctccaccgccgcgacgcaacccgcctcgcctctacattgcgtgacctctccgcttccgccgcagcgacgtccgactccggcgagtccgcgctaccgccgccgcctccgcatcaccctcatcccccaccgccggccgccgccgccgccgcagctctgtgtgcccggcctcgcgcccgtgagagagagagaggaagagtatgacatgtaggtcccatatttttttaataaatagaatgctgactcagctgccacgcgtacgccacatagatcaaaaccaccgtggattgggtcgaggggggtattttgtccggtattgaaagttcagggtgaagaatgtccggttttgtggttcaggggggtaattcggacgacggcgattgttcgggggataattcgtactttttcctattagatatatgtatctgttaagtgtttttaccaaactcttttaaatacataataaatcttatcaaaacttggcaatattgacaatttacaagatttattttggctataatatgaacggatccgaaatttatagagatggggcacgtcgtttctatcaattgtgttgtaaacgaaaccaactggataaaattaatatataataatacgttactctctctgtttcaaaatataagacataaccacctctgaccaaaaaaccaagaaataattattatcatcttgtagtttggatcatcctaataaatacaatgcatgcatccaatagaattagacaacatgagggtgaatgatttaaaaaagtaataatttaatagaaaaggagttatagttaattgcctacatgtatgcatgtcttaatttaatggagtattatgaaacatctaaaaaaaagtggttttgccttatattatagaatggagggagtatatataatgcctaagtgatttctaactagttttccgatgattttagaactcgaatgtggtataatatatgtactcgatgccagattatttaaaatctaatacattttgtacgaaaatggctaagggcggttacaagtgaaataagctgcgagttcctcaatatagtttctacgaaatcaatgtataacagtataagcccgtcttacgcgaaaatgcgtgtgcaagtagccacgacgaacactgcaccggcctaaaggattgaactattgaagactccaaaactgctttggatttgattaacaaccatctcaaaatacgtttaaaaagtacttgatgcacacgggtgacgagcgaatccacctggcctgacgaacaaccactttcggtgccctcgcctatacgttggctgacgtcacttgtaaatacagttcaaacttccaacttccaagcatcctgacttttgcttcccatctcggagaaagaaatcatttgtattttcgttttcgaggtgattctgaaatgtgggagcatgtacatatccacaacaacccaaaaattctctgtggctcactggctacttggctttgttttacagtactatgatttttaaaaaaccgacagtggctcaagtttttttctcactctctcttttggattacaagatatatataagacaccatttaaaactcatgaattattctatttttcacggaccatgaattgattcgtgtgaggttttcacaaggatcctatatgaaaatgctatgtatcactacaagacaattgagctattgccaccaaattattacaataaaaaataattcgtagcaatatattgtactattgcaatgataatttttctatggcaaataattatattttattgcaacgatctacaatcgttgttttatttagtacttttgttgcaatagaaaataagatattgccaaaaaaaacttattgttgcaaaaacatgttctatcgccacaattttaatttttgtggtaatttacatagtacatggtatttttcactattttttgttgccacgatcaacaagttcattacaataaaaaaattgttatctcataatttaacttaatttattcatatggacacggattgagacaaattttatatgaaaattatactctcgatgagatctacaattttataggtgataactttttcatttgaaatattttagatattcaaatctatgattcaaatctcagttagctaggctcaaatggaacgatttgcattttctaacataattgatgcgtaggtgagttggcaatagaactaatgccacatatgaagtgttgcaatatgattttttgccacatccattccgtggcaacatcgaaatttattattaccactaaataaaaatcgttgcaatagcctattaccacgctatttattaccacggttagcaacgattttaaaattgtggcaacatgtatctattgccacaattttaatgttgatgccacgatttttttcgtggtaataaatgatttttctagtagccaagcataagcgcgcacacactacacaagtttgatacgctaaaaaataaggatgacttaaaaaaaggctatctatattatttttttaaaaaaatgatgataggagtaaatatgtcatccgccacggttacccccacctatttctattgtaaattaccctttcaacttcttaatactataaaaacaatcaaacaaaagtaaatgttaaacataggaaaaaagatgggtaacacatttcgtatcaaatactatacctcaatttattttaggtaatattataatatattttatttgatccatagccaagcacgagcattggactaatgtatgtaaaattttataaccaagaaaccttaagaaattctagtgaaacatgcacctgtgtgtaaacagtggatagtatataatgtatgtatgaatccatatacttagttaaggctgagaaaccgacaatttcaaattgttttcatatgttagttgagaaaaccaggcatgcatggtaccactataagattcaatggctatatatgataatgagcttcccatgcaatatgtcctattatactctttgaaagaaatgtttcaggacaaacaaaatctttatatgaaaaactcgaatggttttcatatgcgttggttgagaaaaccaagcatggaccactacatgattaagtgagactatgatagtgagcctcccatgaaatgtcctactatactccttggaaagaaatgattttagacaaaaaataataattctttaggtgttaattttttccactacaaaataaagaaaaatgttttgggccatactatatataatttggatggtagtgatctctttaaagaaaaggacatatcaggaccatatgtagttgtgtacaaccacttcttgtggaaaaaaataacacaaattaaatggcatcaagtattcaatcttagatataaagaatgttgtctttctctccattactttgaagcaacatgaagattctccttgccttttcagaaagttaataggaagagtgcaagacaaataatatatacggatcatatgaaaactccacccagccctaaacaggaaaacaaaccgaccctaaattactttgtaagagatttcaatcaaatttcactgccttattctgaaaagatagccgtgcgtaacagcgtaagtacaatcttctaaagcaacaatatgtacaagatcatatgataactccaccgaatttccatcaactgcattcctcatcatgcattcctttttaccatgcaatgctaaattttgcacgtagccaacaaacaatcataatttctaactcatcaacaaccattgctgatgtgaaaatccctagcctaagggagtcaattctaaactctcgagggaacatccccttattatttatatatcattcaaataattaattaaaaaaaattaacaagatatattaatatatgacaaatcactatacaactatgattgatcaaattaaccttctacgagttgtaataaaaaaataatttaattgtacatatacattaattggttatagggcttgttcactgtgctaccattttcaaccttaccaagttttggcattaccaaatttttataaggttaccaaaattttggcaagattgccaaattttggcaagatttcatatgtacttactaaaatttggcaacaaactaaacataggatgtgtttagttcacgctaaaattggaaatttggttgaaattggaacgatgtgacggaaaagttgaaagtttatgtgtgtagaaaagtttttgatgtgatggaaaagttagaagtttgaaaaaaagtttggaactaaacacggtggtagtcaaaattttggcaactttattaaaaaatggtatggttgaaaatgacatcaaagtgaataggcccataatttaatttatttttaaacttgtactctctccgttttttaatagatgacgtcgttgactttttctcacatgtttgactattcgtcttattcaaaatatttacgtaataataatttattttgttatgagttgttttatcactcatagtattttaagtgtgatttatatcttatacatttgcataaattttttaaataagacgaatggtcaaacatgtgagaaaaagtcaacagcgtcatctattaaaaaaatggagggagtattaaactatcaggtcgaatttctctaaaactaattataactatttagataactctcgagagcgtactagtgatcagctctcctgtacacaataaagagagttagagagcgcaaatgaaagtttgctttgaagtgagcctgtggatattgttggttgggctcgttgccgctgacaccggaggcaggagtggggcccacctgtcctttgacttttcaacgccctggacaaggacacgcgggggaaaactaacccagccggcccaaccagccacagaagatcccggcccaccgcgccgcgccaaaaccggcggcctttcaaaagcgccggaacccaccaccgacgtgtccggtcccccaccgaatcccagccgtccgtttccacaccaacgccccagatctttcgaaagcgcggggggccagtgacgtaattgttgccaccctttaattaacacgagtccccccgtcgcgattagcgcgctgaggtggcacggattaaaaacaccgcggacgagcggggcctagctaaggtcgatgacgtgtggggccccgggagcggtggggcccacccaggtgggtgtgggtgtgtggattgcggtggttaaggtgggggctcgtgcggtgtgtttcgctgcgggtcgcgtcaccgcggaacggaacggaacggatcggcggcgtctcgtccgttttgggtgtgtgtgtggtagttagagagtgcttagcttgggagattacaaccttaatcatgccgttttcgttatctcacatctggcaagtggtgtgaagatgatgtttaaaatgtgggtggttaggttgaaacctcaatcgttggctattttatcataattcaaggatacgcaaataaaaagaaacccaggtaaataagatagtagaccatgttgaatgcttaaaatgatgatgattattattcggtttactcattgtttgtgaaccttcattaacacagcctatcatttgggagatttacctagcctagtaatgcctagagttttgtatatgttttaaatctcgtgttttcaaatcaagtattctttatagcgatccaaatctagatattcaaacacataacatatagcatctagagtttgcatgtagtgacggagcgtcccatatagcaagtgatcgagctagccaccgaagagaaccttaccctatgcgccacaaggccatctctactaggtatactacatatgtcatctatttgctgtcgagagaaagacaaattaaaaagtgttgattgtttttgagtctgtaactatattggtgggtcgttacttactatgattggtgctttagtgggccgacaagtgcaccagtggacaaaaccgacgtgtggacacctcccgctcttgcccccaaccgctcaacgcctcaactgtagcaccgccgtgctttacgccaccacctatcctattcattgtccattgtcgccactcgctcgttttatccacccgtcacctaaatggccattacccgtcttatttggcctacatatatttgtttttttgtgctccatcattgtttgcatgtactcccaacccttttcaaaggttatcgaaacaatacgtcattgtttttcaaagtacatgtcatacaagatataaatattaaataaacaaaaatagtgaagcgaacatattttcctacgtagccctttgactcaaaggattggaattttccaaatcctaaaatttttgtatggaatgacttatgtacgtaggttttagaggaaacttagcaagaggtccaaccatttggaaaaatttctgagtctatccctctcatccaatatttttcttacggttcaatcaaacgattatttctatatttttcccgtattttacaatcctctattttacacttacattcatgttagaatccatgtttttcctatttctcaatttttttcatttctacgattcaaatgagccctaatactataatacacacgcgcatgtatcttctacacccatttgaacactgtcgatttcatcaaacatcacaactataataattgatcgaagaatgaagattatataatacgagactaccatgcactggtttattttctcacaccaaacatgaaagcaaactaacgtgatcacacaggtgagaggtcaccgctcttcgcaacgacaaaacactgctccaaaacccatttaatctaattaaaataaaattatcattactacttatttaacgattcccagaatcagaatagccaacgaaatgctaactaacccgagtttccacgtggctggtcaaaaccaaatcccccctcctccccgcggtaacctcacccggtcaccggtgggccccacctaccccctccgcccccacaaacaac

SEQ ID NO: 7482 - DNA, 55849 bp, Oryza sativa
  unsure (1)..(55849): unsure at all n locations
ttcgccagacgacgacatcgatagcaccaccgacgttggctcgagggctaccacttagatcgacaaaaccgtcacagacatcgagaccactcaggactagtgaacaccgcttatcgaactccttaacaccaacaagttgccgcaagaggacacgggagtagaaaactctcacgttaagccaaggcctactatatgattgcggaccaccctataaaaatggtatttttttataaaaaaaactccatcaaaatttagcaaggcttcaaaccaaacattcaatgctacaaaacgtcaaatgtatcaaattttgacattattaatttttggtaagataccaaattttgttaattttgaaattacccactcttaaaaattagtaaaatttgttaagacatcaaaccaaacaccacccaaccttaattctatattattaaaatttggcatgtttttcccaacaaagtgaacataccctattctttttgaaactgaagcaggagctctgctgtttcattaagaaggaagagagaaaaggttgactgggttgatttttacctgtaatggttttgaagcccagatgcctatgtatcctgccacttatcattagcttctccaggtgagatagaggtttcaagttgtccatagatcaagaatatatcgatcgcgatcttctgcgaaaacggacaatgaattcagagatgtctgattgaggcccatagatctgtgttgtgggactccagtaccttcatgatctcatccctgtcaagcatccaatgtttttaaccatgtagctgttggcttctatgcttctcagagactgtagatgttgcagttgacttattttgctacttgctgacatcccaaaccgcccatctacgagtaggtggtgaagcttagttaacattgtggtttcacttggcaactccagtacagaaccattgagataaagcatttgcagattgctaagcttccctatcaatctcggtatgtctttcagttttgtgtacccgaagtttaggtagtgcaagtaaaacaattggcactttctgaatattgcaatttctcaggcagcagtctgaaccaagacgatgatatttcctctgaaaacacgaacatggaccgaagctgagatgaacattttgctgcttggactaaattgccataatccttttgtaagaagcacactgtgatccattggtaattccatccgagttaggacagtcccatatggtagcaattttttccttcttggatatggttagggctatttctctaacaagatcatgcatctgggcttctggaatctctttggccttccttccatattcattcatttccaaaacctgaagcaatgatcgactagcaagttccttcaggtgacaatgctgctacatctgccattggtgtctcaggttctctgtcctgaacagtttcttcatctattcacaatctgattaaccattttctgtcgatccgataatcttcagggaacaggccgcagtaaagaaagcaattcttgaggtaaaaccaggttgattgtaactgagattcttaacactagtgtcccagctcagctctggattgtttactcagctgccacctaagttgattatagaacaactcccttctcatgctcctccatttctttgtacgataaaaggctccctatagctacaagagccagtggcaaaccttggcatttctccgtgattctttcagcgacagtcttcagattaagggggcaatttctgtcatccaattttgagaaagcctttacatagaaaagagtccagccttcctgcttcggtagaaccatagaatttcatggtctgcaactgctagagatgccacaatttcgattcgagttgtgataacaacttggctgccattgttgttcttaacaattgcatgaccgttcggtgtggcttcagtcagttcagtaaactggaggaattatttttttactccagagaagagagagagagagcagagcagagttcatctgaaaaatctgacaaaaaaaactctctcacactctctaaaaaagagacattctaacagagaactagcaagggttgggctaaatcaatttcagtgcttctctaggtgacaacctactgcgaagtgaactgcagttagtgcaccctaagtattactaagtgctgaagggggaaataaatcatatcagaatagagaaaccaatctctgatccaaccatctgcaaagacaaaaaaaaaaaaaagcgaagaggcacagtaaacaggtggtgtggaactgtggataacttgcatgttaacatagtatcttatctcaagctttgccttttgtgcttaagcattattgactgcattaccaaaagatacataaggttaattaattttaaattcgtccatgtgtccaagtgagacaagtccttcagagctttcttgagtacggatttgacattaatgaaccatggatagtatgaattgcatacagcaaattggacccaatacaatggcagacacaatcttcaagtgcatgtctcaaatctttattgcaaacaaagaaatgaatataaatgagacactagtatagtcgtggataagttttatggaattaatgtacgtagctgaaagcatttcgcatcaagataccaaacaggcatgtgttaaaaacctttccgatgtatgatatcaccagatatagaacaaattttgccaaaaagaaacagtgttcttttcagttccccaaataatgacataagccttaattgacactatgtttatgacacgcttgtcaagatgcatagttaaaagtagctatattttgcgggaaaatatgtagtgcaaaccatatatgtagtggaaacttggaaactaccgttggatcgagaaatggacgtccgagattcgtccacatcaccatgagttaaaatttaactcccagtaaaattttaactcatgagtgaatctgcgagttaaattttaactcatggtgacgtggatgaatctcagacgtccatttctcgatccaacggtaggttccaagttttcagtacatatgtggtttgcactacatattttcccatattttgcgacagaggatactgaatatttctcctcacagctatctgctaggagccaataacttttctccctagcattatgccattgagaaaacaattgacaatttaatctaggactgatcatttcaactatctctgtattattatccacttctgcataagttcactatttggtgaagcaatttgtgacttccagcatttcttggtcactacatgagataagaccatagaacaatccattttctatattaactgaatatatgaaaatctgatacaaatgttatgtatgtttttttttcaaatgcaaattagtttctgttgtaaacagatcataacagactcaaaagaccctcccattattgtgctttttttcgcggggcagcggaaagccagctgaagtttattaagggaaaagaaggggttttaacaactgttacaacaaaattacagtaagcaaacagctgagcaaccaacactagagcacaggcagctcaactcacagcactgctaagaacatacagcaagcaacaatcaacaatcaaccaagaggccgcaacagacccgcgaccctccacacctcccactcatcctcgatagttacacaaagacccgggttattatgctttctaatcaacgcatggagaagaaatatgttcgctcggctcaatcctccttaagcgacaacttcagcaagaattgcctcttgccagcaattcataattataatacatctcaatgaatagatgatcaagtgtttaattactgactgaattcattttatttctgaaaaagaccatcaacctatataggtccatttgctaattgcagttggagatcatcatattttcgtgaccttgtggaagttttttgcatcataaaagcaactaaggcaatgaatatgaatcattatgattaatgatggattttattttatttccgatgaaacaggtcatcaaaggccatttcctaattggagttggagatcatcatatttttgtgaccttacggaagtttttagcatcataaaaacaactaagacgatgaaaatttaaacggaactaataaaactgctcttgttatttaaaaataaataaccaaatgaagttgatgtggctaaaccaataaagcgcacaaacataaccaaacaattccatggatacgagctatatgatgatgtgagaccaatctttaccttgtcacacactccctcgacataataaacttccagtgtacacacctactccggtatagatgctcgtttgagttatatcccagaaagtgttagttactggattataaatctgcactatcccttccgatggcatctgcaaccagagtactacatttccctcatccgtcacaagcaacggatgcactttcacacaatctccaatcccatagaaagatggatcaacattaatcctgtactctttggaccatgtacccttttcagaatcagttagaaaccatagatccaccacataaaaatgataatcccaatgcgctgtacacaaagtgtctttaattccagccaacataaaatgatagtcaaggtcatgatagctaagtctgtcattggcttcctcaacaatgctcttcgccggcccctagagggtcatactccactgctccatcgcgaggtcgaaggaaggcaggcaacctgcctctagaacggagggcgaacattggaggatatcgaagttgaagtaagcagcccctttgaacacaactccatcggtgcagaaacaatcaagctgtacaggtggattctccaccttcctccgctgctgtccaccgacgccgcggcggctgacggtgataacctcggacacgtaacgatctctcaatgtcttcacaatctgaactagcttacgctctcatgtgggagatgctacctggccaaatgcaaaccaggcaagaagctagcattgagcagtctgtactgacgtcgccatagtggggtaaagcggacatggattcggtggtgggtaaggcggagatggatccggtggtagggtcgagcaggtgaatgctatgctccttaccgtcgaggaagacgaggtcgtctgaggtcgcactcacaaccatgcctctccccacttgggattggggttttgggatcagctgcttgacaatgtcgccagacaggtcgacaagatcgacacagaatctggggaagctctgcacgccgatggcgaggaggagggcggcgtgaaggggggtggcgggcggcgtgcgcggcggcgaagagcgggtcggaggtgaaggagcgcgggcttggcggggaggcgaagcaagacctcgtgcagcatctccggtggcaagacgccatcaaccacggctccgaaccccttgccctcgccgacgtccatcgacgcgccgcggcggcgaggctagggctcacggcggcgatgtctgaggctcacggatggaagtatggaaccgcggctcgcagcaatcaaggggaacaagtctattctgccttccttatttgtttctgctaatcgaaacttctccctcaaccgcaaaacaaaccggactgagaactttcttcatcttcgaaaatcggtgaagatttcgtaagtggttttatgctgaaacgaaacgtgggacccacgtgtcaacgactcattccctatcaagggatgtgagcatgcgacgttcgctagatctcttgtgggtgtcacgccccaaaaaattagccaaatttttcagactattttgtgtataatttcttgtccaggaatcaagccaggtaataatatcataaatctttatacatatcgaaatataaataaagcgtaaatacttgcagcacagacacttaatcctcacactaaaaagaaagtagtggcggaaaaggagcgatcctgatgacgctctctctcgtggcccaatcttctggtgaggggatagctttctctttgatcaagcgcgacgtttgcgatgtggctacgaccagaacaagttcaagacgtcgtgtaatcgctaccccacaaacgatatcgtaccaaccgtgacgcgtggttgatgatccctgcaatgctaacgagagaacattttaagaacaagataggatgtaatctaaatattgtgaataggtgattaagcacaaagaaatagttgtaattgaagtggtaaatctaatcgattaggcaaatcaacacaccaactattggcggctctcaatgcatagtcgccgactaattgagcgagaactagagacatgatgaatggcactttgcaaaattcaactaaacaaaatccaattgttttagagggtctacataaacatttatagaggttaattcgtggagctgaagggagacacttccgagatggccctagtctaatacaaggcctaaggccaagttcagattcagcaacaacgatgattcccattgactcgagataaatttggatgaaaccggattagggtgtggcaatttccccgttgggccggggacccgcccctacgggggcggggccgggggagttctcacccgtgggtgagtggggacagggccccgcataattccggcgatggggacgggaatcggaattaacccgcgggtgacccagaggggccccggatatgagttatttctataaaagttgcacattgcaataatatagacgtaggggtgaaaacaggtcaggttcggtcagatctcatccttcccatatcctaacccacaatttataatcggaatcgggtcggacacggatagtatcaaatacggatataaactcggataatatcgggtataaatatagaacgaatacgtaccaatacagatacatacgctatcggttacgagtacttattgagacaaacatgtattacacgtactagacaataatacctaagcatagtattatcgtagttaaaaatcattttatattgttgttgggcaattcctcactctcacacagaaagtctcgatttctctctcctaatcctaaacagtcatctctctaactctctcttctagtcctagacagtcaatattattgttagtaattgttagacagtcaatattgttattgggccttgtggtgaatgcttagggtgtgttcgcagctggttcctaacccggaataacacgggaaacggagcaatccattagcacgtgattaattaagtatttgctattttttaaaaaaatagattaatatgattttttaatcaactttcgtatagaaactttttacaaaaaatgcaccgtttaatagtttaaaaaatgtgcgtgcggaaaacgaggaagatgagttgagaaaaagggtgccgaacacacccttagtgggttggtggttggtcttttggctttattagggtaggcttgtattagattatccgagtaatacccggatatttaacagggtaatatccgtattttttccggataacccgtatccgtcggataccacgctcccaaacccgatcccatatccgacaataaatagttgtattcggactcgctacctgtgaaaacatccggatacccgaatttgtcccgaaataatatggtcgggcgggcggtcaggaaatatccgtcccgttttcacccctatatagacccaacaatcgcattcaaattaacatataaaagctcaacaccctagttcccctcaaccgtaatccctttccttccttgaaccaacccgcaccgccgagggctattgaaattttatcatactattattcagtgtattgcaatatttgtatggagtattaactccatccggctgatgcaggaccccggtcacccgtcgggtcccctgtgggggtggggatgggtgatgtttttcactcgacttcgtttctggggtcggggcggggatacccgcatgagggcaggggacggggcattccaacccaacccggccctgcccgccccgttgccacccctagaccgaatgcgtttgaaaggtgacgagataagctttctatcaagctcaagatcatctaaatcagagtaggcatgagggcgctatgttcgtttgaagtcagtgttatctccggaggctaaattagacttggacgtggaattatcattggaacgtgtgaagttatatgcgtatatgatgaaatgatgtcctcatcaacgaggtttcagctccactccacaagcaaaaactcaactgggggtacaactgtatgagccttggctctttaactccgtcttcaacacaaaatcactatatatgaaactagacctgccttaacttaatgaacaggttaattaattgatctcattttatagttaacctatctcatgcttatagttgcattgcccattcttatctgacattgtgcagctcgatcggtgcaccagcaggtttgttccgtcccctttcacaatgagaagtcattttaatttttggcactttcgacctgtttcgtatggcaatggagcctccaagttgcacctaaaagcctaagctgatagggaaaggtggacaattcactttatacacttcaacactcttcctcacacgagaccccctcaagtctcagcgtggaatattggagtgggctgcaattattttatttnnnnnnnnnnnnnnnnnnnnnnnnnnnnnnnnnnnnnnnnnntgataccatattaagttgcatgcatcagccagttgcacctaaaaacctaagctgatagggaaagacagtcaattcactttatacactccaacattatccaccaccacgccggtagtagaggaggacaaggaggaggcggaggcaacgatgacggggacaaaagaggaacagtagcggcggcggccaatgttggagtgctgctgcacggtggccgccggagctaggcggtggcggtggcggtggcggtggcgcttgtgcttgtgctgtcagccgccgtcctatcttgttgtcgaagaatccatcttttgaacccatctcgtcgaaatcctagagcaccaaaacacccctacctggcgcgccactgtcgacgtttgatgtcgcaattctggtatttgcatagtatggagatcgtcggtgctaggatatacgcgagactgaggtaaaagagacggagacagggacttttatacaggttcgggcccctgaattatcaggtaataaccctatatcctgttggccgaagccggtattgctcttattcaccataatcacaccagtacaatatgtggggtagcctatctaactgttgtcgacatggcggtctgaaggtctgactcgtagtcgacaacagggtagtcttcctcctcgaatccgtgcccggcgatatcagagaaaaagacaatcccttcctatagattaccaaggaatagtaatctttttttataggtgaaattagattggatttagatatataccattccttgattatatgagaaacgctttcgtctctactgacagtatccagagacaccataggggactagccgtgtctatccctgaagtcgatattcggcgtcttgtcttggtgtatgttgtcttgtatgttgtggcctctgttgttccctccagtctatggtgggtgtcaattgaggtggtcgtgttgtccgtccccctctcctcctagagggccttgtatttatacccataggtgtccctttgttcaagtagaactagggaaaccaatatggatataatccgaatagttcttgtcgtttccatgtagaactctggttgtctttccttatccggaacttcctccatatccgcaggttgtttccatataggacatggtatgtggtgggtcctgccgagatttagtcaactactattaggtatgtggtatccataaccctgacagtagtagagaaagaggatgacacgtggatcctactttattttttaatttatttgttgactgagatgtcacgtggacgtcacgtcaacaaaaccgttctctaaaaccatcaagagagtcaatttacaccggttttaatagttgattggtcgagaactcagggatatgccactagttaagggagtcaatgtgaatcttattatgaatcttattattcctgggtatccatccccttaggtctagcccagaacgatgagtggaccaaggcccaacagccacgaagtgccgtcgcacgccgcaccactgcacagatgcaggcctcaggagcatgtcgtggtggttgtgttcggcagccgaggattgtaagaaatttctcgcgtgcatacttttcgaacggttaaacggtgtgtgatttttgtaaaataaaatttataagaaagttattttaaaaaaatcatattaatctatttttaaaatttaaaatagttaatactcaattaatcatatattaatgtctcatacagtagaattgttcttttagaaaggcagattagtagtctttgtcaaaactgttattacagattatcactgttctgctctgttaatttccttctagttaactgaactatctgaagccacaaggaatggcgcatggaaactcttctgtaacttttgagcttctttttttttaacaaaatgggatggcttcatcgcattgtacatatggcacattcgcagaatatccggcaatgccacgccatgactcacgatggggtcgctgggtcaagtcagcagggaaatgctcctcatcgtgcacgacatgcagtaaatcggaaggaaaaaaaaaagacctgcttttcttttctttttctaatgaacaaggttggatcatgatctttattatggatgccaaaatagttttgtcgcaacgtatttggaaatcttgggtgtctagttcaagcggtaggagtaaccactctcttaaaaaaaaatactaccactaattgcagcgggttttgtttttttaatcaagagtggttttgattaaaaaaagagtttcagtggaatttacaattttttagggcaattattttttgtgaaccaccagattagtgtcgattataagtgcaattgagtagctcggacaaatcagcctatgaacataggcctagtttagttcccaaaatgtttttctcaaaaacatcacattaaatctttagacacatgcatggagtattaaatatagaattaaaaaaaattaattgcacagttaggggggaatcacgagacgaatcttttgagcctaattagtccatgacttgtcataagtgctaagtaacccacatgtgctaatgacagattaattagactcaaaaaatttgtctcgcggtttctaggtgagttatgaaattagttttttcattcatgtcccaaaaatcctttcgacgtccgatgaaacatccgatgtgatatcttttttttttcgcaagctaaacatgcccataattgttgcagcaaagtcagtcaaggagacatcaccaaaatacttcataactagtgtatcactgtggagcagttgcccggaatttgattctgtggccaacaagctagttgcaggaaagacgaatatttatgcgcgagaacacatgactattaacgctgatttgggaattaataatgagcagtggggtttggggccagaagcaattcatggacaaaacaattaatttctttgccaagaggagaaaatgatattcaggacatgagaatgatagcagtgcacaaatgccataaaaagcaaatcttctttcttagccaagaagcttttcttggaagtactagactagtactaccccgtcccatattatgtcgctttgagtttttatttgtaatgtttattcattcgtcttattaaaaagatttaaaattattatttattttgtttgtgatttgttttattatcaaaagtactttaagtatgacttatcattttcaatatttgcactaatttttcaaataaaatgaatggtcaaatgttgcaagcaaacagtcaaagcgacaagtaatatgggacagaggcagtaataaagagagcttagatgatgtttttttctcccgaagatgaagattaagtttttttacgcaaaatgaggtggtattaaagtatgattgattgagttttaactattacaaacttcaaaaatagattaatatgatattttagagcaattttcatatagaaagttttcgcacgaaacacacagtttaacacagtttgaaaaacgtatcacaaaattttttatcttcattcaattcttgttggacaaaataacgagaccctaacaagttcaagaacttaaagccgtttcaatggacttccaaggtttccgtggagtgatatgtacatatattcaagttgcatgtttctacttttttattattatatatgataataaataagacacatataccgcatcacattggacatttactctagtgacatttgttgaagaaaaaaacatcttaattcaggccatgcattttcttgggcatctcaatgcaaaagaggagaatgacctcaattggatgcctccaaagatatattcttacacatcacattgagaacaaaagtgaacacattgatggccacctccaaagcccccactatttcaacgttgaggtacctttcatcgaatttggataatggtgtcgcaacatgtggacacttattccattgactattgcgcatggacgcttggcagcaaacaatttctaatatgggacaatttctaaagcaacaagtgccgatgcattaatatcgaatggggaaaaaaacaatggaaatcaatcatttgagtcgatttgcaacatatacccggtccaacaagaatattttatatttcccttgtcttgaaaacaaatttgtttatacaaataagtgacgcggacctaaaactcagttaaccatccaaaactattcatactcaaactcccttaaactattaatccatcatttcgcctataactagttataagccataacatttactagcaaacaaaagtaatacatagataaaattagaggttgttcatattatagccaaaataaaccttacaattttggcaagttgataatattattaaaattttgataggatttcttatatatttaccaaagtttggtaacaaactaaatgtagacacttttttttggcaatcttgttaaaaagaagttatggttaaaaataacatcattctgaacaacccctagtatacatatgttgtgaactatgatgaaaacgtcaaaatcaactttaaaattaagattaaattccaattgtgattgatgctgataagttgaagagcaattttaacttcagaaaatattttaaaaataatttaggtttttcacatattttcaaccacttaattaggttaaaaattggccactcaaatcggtttttactttttaaaagtataaagttttattccaaaagtactctcattgcttcggtttaccaccttttcaaccacaaaaggtaaacggtaagaaaacactacaagcttgtttggcacagctccagctttctttttctgagttggagtccaatcaaacagtttcggatccatctaaaatgggaatagagctagatgaaacattatcacaaaataaaagaggtggagttgagtttaaacggctacacaactccactccaaacctaactcctagagctaaaattaagtgtccctttgaatcacacgatttaaaaaacaaaggtatagggaaacataggattcagacaggaatgcaagtctaaaataaaggattgcaaaacataggaaaaacacaggaatgatcgtttgattgttggatcacagtaaaaatacatgaattagataaagagagatagtcttaaaagaaattttctaaaaggttagagtttttgctaagtttcctccaaaatctatatgcaatgagccattctataggaatttcatatgatttaaaaagtttcaatcctttaaatcaaataaccacgtagaaaaaaagttatatatgagtatgaaattacaacgtagaatcttttgcttggggccctaagagtgacactaccaaacaagtcctacttctatgctaagcgaaacgacatatttacgaacacaaaataatttgtaaataaaacttttatatacgtgtagcgatctaaataaacactgaaaatttaaatttcaataaaaaaccctaaaatcaactttaaatttaacactgaaaatttaaatttgggctaataaacatatgcaaaagttaaagccgtaaattgccatgtctgttcatcttgcttatcagaacggaataatctttacacgcgtggcatatagcatgttcttgcaaatttgaacactcgaggccgcgaaagttccagaagaaacgcgttccactgcaacacgcggacgagcgtgacgacgtcagcgtcctcggaacgcaagggcactccggtaatttctccaccccttctcttggcctataaattgccacctgcgccgcggcgaaagaacgcaatctcatcgcaagaaaagaaaaaaaatcctattcaaatcgaaacccctctctttgatctcgtcgccgaggaattaggaggagagagagcaatggccgccgaggagggagtcgtgatcgcctgccacaacaaggacgagttcgacgcccagatgaccaaggccaaggaggccggcaaagtggtaagtttcctggcgcagaattttggggatttttttttgggggttttgttcaccagggggtcgcggttcgtcttagatcgataggattttgaagaaatttaggatttaatttcttgctgagatttgtggcatgtggtgaaatcgcgaggagatcgattgtttctattttggcgattggggcgtagggttgtcgcggatttggggattgccgattctggtgggggagattttagtagtagattttcatgaatatattttaggatgatataatgaacaattcttttaaaagaaatctgttgcagtaattacagggcactctgtatttgacatgattaatcgttgatgtttggattttaccatgagatggggcgatttgatgcttacatctgcaagcgaattttcatccgctatctgtatagtatttgactccataggcgaaattgttagtgtttaaatttaccgtaagatgggatggtgtgatgtgatgtttaggtttgctccagttgtttcatgctgatgattctctaatttgagtataagctttgtttaaatatatagatatattcttaaatagtactataatttgacatgattcgccagagttgaaggaaatctggttctaatctagttcaattgttgttatggacaatagattgccacttcacatgtcttggcattgttatgatgtgatgctttgtacagataagcgtccgccctgtagtattggatttggtttcttgctgcgcggcataaacgaggattttgaccaagagtattatatttgaactgtattagatttggtttcttgctgtgcggcatcaccgaggattttgatcaagagtagttagcacttaccaggctgatatattgttgtctatggaattatcaatggttcttggatttattttctttctgtgcaacaacaacaaggttgccaaagaatatttatctagtatgaaattctgaactagtggtacttatgcttgtcatgccaataactgtgaggctaccgttattctttcttactgcgcaattgaccatttgttcatgtcatgtttccatccctaatgatggccttttctggactgtttgatctacaggtcataattgacttcactgcttcctggtgtggcccttgccgcttcatcgccccagtgttcgctgaatacgccaaaaagttccctggtgctgtcttcctgaaggttgatgttgatgagctgaaggtgcgcagagttgcccacaatcttccaaaaacatttttgtcacccctgtgatagtgagtaatgctgttttctttatccaacaggaagttgctgaaaagtacaatgtcgaggcaatgccgaccttcctattcatcaaggatggtgctgaggctgacaaggtcgttggcgccaggaaggatgacctccagaacaccatcgtgaagcacgtcggtgccactgctgcatctgcttctgcctaagaattctcgcaggcgcaagttatcaaataaaggccagcacctggtgttgtagtaggtattagcgttagtcatcgttatcgtcagtttggcttgggtgtcctcgaatatcatgcgaaatcgattccgagttctctttttaaaattcctgatgatgatatatagtttgtggaaatttggatctggctattctgtacgagtttgctgactattaaagcaattattataatatgatgatgctggcaagcttgtagatagcttgaatttgtcctgaatcctgttctgagcttattattcctgcatggctgcatgaacgacgtttgttcatgccatgaattcgagatgatatctctaggcagcagcatctacttctagccatgctgtgtcctttgctccaatgctactgttatgcttgtttctgaagtatccagtcgatgaggataaggacagctagcatttgttgcgatagtagtaataactgttgtgagttgtgacagtaatctgttcctaacttaccatctcctgatgaaagtcatgttgaattgaacctgctcaaccgctggaagtgcaattggattgcgagtttgtgacaggctgacagcgccaagaagatctcggttcagacagcattttggcttgttcagaagttcagagctctcgagtccgagtgagtgactcgttcaaaactagtagaacacgaagttgagaccaagcgaaaaaaaatgagaggataagataggagttagaacaaagaacagatgggttttcagacatcaacagggcacgttaaccataagagatccaccgatttgttcaaccgtacacgttgatgccaggaacaagtgaacaactgcaccttctattacgtccaaatccaacttcaagtttgaagaatgggttcaaacggacgcgaaagatttgtgctgccatcggttggcaagccatatatatggctgattggaaataataataataataatttatggtaaaacttttctttatttgtccttaacgatttaaacaaaaatacttcaaatatataatttcaaaaaaaaatcaaaatcaacttttaaaaatccatatttcggaatctttgcttataaaaccagtctctttttttcagttttgtttatataagggcagggctctgcctgccaatctatcaaggaagaggagggaaaggagtcatagcatgttgagttgttgttgggctaaatggttcggcccgtctctgagtgggccttatcgtcgtcttcggggttagcccaaaatttaggggtactacatactgagggaaagagaaggcgaccggggctctgctttcctctatccttcggttttttagtggttttaacgaccggaattgtaattttctcacttgatttgaagatgtggcttgcaagttggaacaattaaacactagatccactgatccacatgcataataagatgaaaaagaaaagaaaaataggccttggatttgcccaaagatttccaagtcggcaatttctccaatccacgctcgcgagcactcgggctagccagaactggtgggtgacaaattgtgggagtctgggagagattgggccagctatggactaaagaaactcaattcgactgtagaagtaattgaagcaaggaataagtatattttttgtcgttcatcttatgtactcttgcttaaattgtctccctcaaccataaaatcggatataacacattccttctctttgaaaaccggtgcaaatcgattccttcaatagtacgggaaacggttactacaggtgaggtccatatgtgacatatgatatgtcattgagatatgacaaaaatatgtggtaagccccacgtgcaccggaaaatctttcgggcctgtattttacaccagttttggatcaattatggaccttccaagcaggccctaagtttaatattttgaacccagcgagcaggttagggcctatttagttggcaaaaaaaaatgttgcccctccatatcacatcagatatacgaacatacatttgaagtattaaacataatctaataataaaacaaattacagattccgtcaggaaattgcgagacaaatttattaagccttattaatccgtcattagcaaatatttactgtagcaacacattgtcaaatcatggcgcaattcaagggcgtagccagctaggtggcaccgtggtccatggaccacctaagaatttgaaattatagtatatgtgctagttaatataataaaaattgtatagtggaccacccttttaattggcatattacatatagatggaccacctttactttaaatcctagctacgccactggcgcaattaggcttaaaagattcgtcttgcaatttcctgacgaactatgtaattgttttttttttttgcatctaatactgtccaaacattcgatgtgacaacgtgaaaaattttgtttggaaactaaattggaggaaaaacataggaattttggatgattccaattctataggaaaattttctatgaagccctttgaaataaaggattgaattctatccaatcctttgaaattcttatggaatggacaatcctatagagattttggaggaaatttagcaagagcttcaacctcttggtaacttttctttgagtctatctctctcatccaattcctgcgtttttcctgcggttcaatcaaacggttattcctgtgtttttcctgtgttttgcaatgctctattttccacttacattcatatcaaaattctacgttttttctattcctacgtttttttcaatcatgcgattcaaaggggccctaagcaggctcctattccacgaacatacatacacagtccaactaaactgtactcttatatatacaccattgatttctctaaatggaaaaacacaacgcagagcttttttatataggttgtgtttagttcagcgcaaagtttagattttggttgaaattgaagatgatgtgactgaaaagttgtgtgtgtatgacaggttgatgtgatggaaaaggactgaagtttggatccaaactttaaatctaaacacagccatagtaaggtacaacagattgcagtcctacttttatttcaagagcaggtagaagctgatgagagaacaaaatgctaacaacaaccctatgtttaggaggaaattagtaccagctggctgtacaaaaatcactactggagtagtaccgtgcatgattagcaccagttcagctcgagacaaatcaatcaccagcagctgtctgttgggttgtgttcacatcattgctacttccaaacctatcaaagtttaatagtaagatttagttccaaacctattaaattttaatagtaaaatcgagtagtttcagaaactctctcataaaaacattaataaaatacgataaggctctaaattaaaatagattcaagataacacaaaattgaactacctccatttcgaaatatagcaatttctacttatgtatatgcatatgcccctatccagatacatagctagaaattatcatatttaggatcagatggaggtatgaaaattagtactacctttgtttcaggttataagactttctagcattggccacattcatatagatcttaatgaatctagacacacatgtatgcctagattcattaacatatatataaatgtggacaatactagaaagtctcataacattagtcggagtaagtaccaaattttaataacaaagggaacaagccgttgattttaattttcttttaaaactccaattttaataacaaactgttgtgttggagaatggaatgacacgaagaagccaaaagggatggagtggatgagatggcttcccagtttggacggcccagatgagagcacaactgccaaccgcaccaaccaccaccccagtagtccagtacaccgaaccctgagcacgcgccacgtaggacgcccgcgtgtgaacggaaccccacgagccggatatttcgtggaccaaacgcgcatatgcgccacgaaaaaaaagcccatattgccaaataaaattccattttcaaaaatcgcctaaaaaacaagctaggtttcatctgggcgaggccgtagctgacaaaaaacgaatgaaaattaaaaaggctatgtgctacacgacacgagaaatttaaacatggaaatttatcgcaactggagcaagttggaatcttcccagcaaacacgtaccagccgcatacctacctacgaatacgttttttttaaaagaaaactgagtaatatttactttttttttgtaatgtactgggagttagatgctgctgtgacgatgagtaagcacagcgtgtgttttatagggatgtgaatgtgcaaaggggctagaagacttgtattttattgatgaaggaatggttcgtaggaattgttgggaattttattttgttacagttgagtcgttttcaacgaaaacttaatttgagaaaagaaactggtagaatgcattatatcatttttttttaccctctatgtatggtgagcttcattggtggcgaggagagctgacatgagacgacaattcaacataaatcaagtctcataatctatttcatggtattttggttcgtcatgtttacatatcggcctctagccttgctgctttgctagcttggaactggatccactagtgatctttgttttttctttccttattggtagcaaccttgtgtttcaaccaaaatatatatatttcttttgttgttgaaaagtgcaaattaagaaacaggaaaaaaacaaaatactattacacactattgaaaacacatgtaaaattcaatcacatgtacatgtgtacagtgaggtggtttgtttagaaaaacaacatttgtttttttaaaaaaaaataacaccggaagctttgatggaaaagaaatattagagatgcaagtgaggcgggtttgtaggctttgaggcccactaagccgtaattgtcattatcttttttatctgtttatatactagtgggtgaaaaataaactgatgtgtatgtcttacgcatgatagcatgctgcccgcttgcattcctagaaaatacttcctccgtttctccgtttcttaatgtaagtcattctagcattttcatattcatattgatgttaatgaatctagacatatatatttatttagattcattaacattaatatgaatgtggaaaattgtagaatgacttatattgtgaaacggatgaagtacttttgaagagataatatatattagtgggacaatcgactttggaaaagaaaaattcaccaagtaagagctctagtttattctctatgcaattagaaacacacgaaagtagtccagattcagaacaaaccatatgtgctaggcgacatcattcattcttagttaagctctatagaaccatatgcattgaacattcctatacgcttaaatataaaacttgtatttgaaaaagtccacagtgaaagctcctaatctttctttttttaaaaaaatatcttaatataatatttctccattgttcctatatttctaggttcccgcatggcccatatgtgtaaagaaaaagaaacctcacgtcagtgttgtggtaaatatgtgatgtcgtcttttaaaaaaagatatgcggtgtgttttttttttcaaaatgtactccctccgtttccggttataagacgttaaactattttaaatttgactaattctacagaagaaagtattaatatttacaacaccagcattgtttcattaaatctataatttaatatattttctgtaaaattagacaaatttacagtagtttaactttaagcaaagtcaaaacgtcttataacctgaaacggagggagtatattctagagttaatgaaaaatcatgctctcttattggatttttgaaataaaaacatgggaatcgcatgcctctccagtccctagttggcgaaaagaaacgaaaataaaaaaaacaaaaacgttttctttctgaaaggcaggcgaagaaacgcatctgtcacgcagcacttccacgcgttgctaatcacacaaaagagagagagagaaaccaaacgaaacgaacgccaacccaagccaacccagcccaagcgagaggaagaagtaaacacggcaaataatcaacaccgcattaaaaatcttccatccaagtcaagcctcaagcgactcctcccccctataaaagccccctctcctctcctccaactctctcctccccaaagaaatcgcttcttcttccgcctccgcctcccatggcagctcccagctcgtgggacacctccttccacgaagcaaccacagcaaggcaatagcgccacccaccgctcgcatccacagctgctgattcgtaggaggagcaggccagggagggattcgttgattttatttggcagggaaggagatccgagaggaagaaggggaatatagatcgatggggaagtacgtggagctgctcgacatgggggtgcgcatcgccgcgcggttccactcccactgcccgcagacggcgaggatgtactaccacccgccgccgtcctcctcctcgtcgccgtcttcctccgccgccgccggttcggccgacggcggcggcggcggctgcgcgggcttcgccgcgaagaggatgccccgggccgccgccgacaccgcggagatcatcctctacgccgtcgtctagagttagcctctagactctcgatccagacgcttcacgcggaaatggaggaatgtatttttcttttgtttttctttaaagaggaaaaaaaacaaagtggacttggagattggttggtttattgatggagtgaaatgaaatgaatggaatgatttgatatttacgtgattttctttttgttttcatttaagttcgtactactactatctttttttaatgcggacaaatattttcaaaatacaacaaaaaagaaaaggtatggacggctgaggatggacgcgtcacaagctaagcaatcaaaatctcaaccaaaccgaatcctaggaaagctccaccaaaaataaaaacaagaaaaaaaaaaacgagaggcgcgcaggacaccaccagaggcgcagatctttacctttttcccccgatttcttggtgcttgtgcctaaattcacgccgaattcgtgtgtgcgtggggggcacgcgtttgggtgggcagagcagagcccaagcatcgcggagagctgagttgctggtctgtagagcatgtttggtatagctataagactcctaaatttaatttaaggagttgagtctgaagtagtttatcttgtgagagagctctatccagctccactctcagttttagtggagagagctccacccaacttgtttcgatggacctaaaactgtttgactgagctctagcttcacacacgagcgttttggtgcgcacggcgcgggggggttagctgtagctgtgtggtcgcggtgatgaaatgaatttgccaaccgatctgccgatacgatacgggtggtatatggggaaggaaagatttttggaattttcgtgatctcacgtcgcacatatgttgtgcgtctaggggtaggccggcggggcggcgattctgcggtgccacaccaatttacttcatcatatagagtacttacttgctactccatccatctcaaaataaaccgtaattaaatttatttattttaagataaaaaattatttgtttacttaaaattatttattttaagatgaaaaattatttatttattttttttaacaaaaggagtacgggtaaattgatagtatatcgtatcctctctagcaaacgattgggttaaagtgaaactgctaccaacgtcttttttttcttcacttgatattttggacatatggacggtttacaccacatctccgcatggtaggatttagtatcaagtttacagctcgagcgttcaccacccaaaatccagtaaattttcttcggaacttttgtggagtacaaccaggcatatgccaccgaacacaaggctgtgtgttctaaagaaaaaaaaaacacaaggctgtgctccatagttttcttgatcgaaaacggtgacggaaattcataactgacggagcatggtttccgtaaaacttgtattgtttttgcctctagccatatataagatcttttttcttctatattttaccaatgccgtattgcaatcatcactaatcactaaataattaacgggaaggctaaatggctgtatgatagatggaatttcctaaccaacacagaacctttattcccttacaaacaatatggttttcgactgttctcatcccttcccgctttgattcactacaaataaaaaactctgttactccaagcaagacctatgtattgttgttagagggatgtttagatcgagggacgtaaagttttgacatgtcacatcggctattatgtagggtgtcgcatagtgtcggtgatatgggccggggaatcaggaccagagggaggaggctgcccccgatacccacgtggcactcctccgagggggttaggcctgaggtggggaggcggccgcccctccatgcctgggggtcgagcactcgggctgccctgaccccctccgcatgacaccgcgtgtgcggggttaagtggacgcccccaacacccacctaaccgcatttaaggcaacatgagcaggcgcgccacatcgcattaaatgcggtgcgttgtgcgcccgaccggtttgtgaccagtcgaatgattgatgagaccggagtagtgcgcctgcgtgctgctcacttgtcaggcggcgtgccgcctaacatgccccctcacgtcatgatgatgagaggttatttagcctttcatcccagccggagtcagttcatccaacctagtcaaaagtagggtttccatttctcggtgcaagtgaggactcagaagtcttcactcatttaatggtgaatggcatgggtgtcccccgtgtcagctggttggatatgacggccccatgccgcggcgtctgtgtgtggcttccaagtcaagcaacaagacatgcaatgtcctccttcacccttaggtagacttctacgcccatgtggcaacccattgggatataaaaaggaggtccaagcttggtgagggagagagatcggttctttggctaactcacgcttgaatttcagagattgaagtgcgtgtattccatactcgatcaaccaagcacaggagtagggtattacatgtataaaccccttttgtctcatcgtttctggggccccgaccccgtctacatcacatcttccaccgagtccttgattttcacccgctgcccccgaccgaactaacaaagggggccttactgtcccccgcttgaggagttcacccttcgatacatagggtgttcgggtactaataaaagaactaattacaatatacgttaataaaccgcaagaagattttattaaggctaattaatccgtaattagcatatggttactgtagcaccacattgtcaaatcatggagaaattaggcttaaacattcgtctcgcaaagtaatcacaatctgtgcaattagttattttttagcctatattaatactttatgtaggtgttcaaacgtttgataagacatggtgtaaaattttagagtgggatctagacatgcccttatcttctggatgaacacaacagagaacagatcagcatgtttggaccatgataacgttattaccagctgcatatttgtatgctgcgtttgctcgcccgtgaacctgacttgccgagcacaagaggaagggaggaggaatatgcttttgtttttgctctaccttttttctcccatccgtcacagctgctgctgctacggttgcttggccggtagtagctgtaggtgaggcaaaaaaagacagagcacctagacagaaacacacatgcatgatgactgtgtgtgagacattggagtatggccgcattcagcaagcaaggcatagacggcacatgacgtgataccctcacgcagcagctagtggcatacgtaatccatttgcattcttgcttgcagctgggtgctaactcctgttaatttgtttattacaactagtagtacctttgagggctggattagttttttttcttaaaatacgatacaaacgcaagcgtccacaatacatgtacaacctccctctaagagttatcatgaagcgtcttactgtcgatgggtaagtcgcttaccattgaaagaaaaattactcgtaaatacaagcactcatgttaaatctagggggtttttatattgtagccaaaataaatcttattttggcaagttggccactaaatgtaggtattttttatagccttaaaaaaatagtatggttaaaaatggtataaatatgaacaacctctaggatttgaacccgagaggattggttccaccacaagaaacctaaccagtaatttggcaagcttagagtactccctccatttcaagaaaaacataattccgatgttgatttaacataatttaggataattaatatggatatgaggttgtccagattcgttattctatttggtgttaaatcctcgcttaggttattttttttatgaagggagtagtaaagaatcaatattttttttcttctaaaatatgaagtactcctttcgtcccaaaatatagcaatcttcgagcggatgggacacatcccagtactataaatctagaggatatgtcccattcgctcaaaggttgctaatttactatattttgggacggaaggagtaactatcagtactagttaaatattttggaataaaagccgtactcccttcatgccaaaatataagtacgtttggactctgatatggtctccaagatgctatttttgactaacaatatatataaaagtaagatgttttaaataaaaagatttgtatattatgatagattgttcaaaaataaatctagtaacatcaattttacatgattactcttttatttttgttgcaattaatagttacagttaaaaatttgatttatcaccatgcttaaaaatgactacattttaaattttggagccgcgagatagagtatgacctgacctctgatagagtggttgaggagggtgatgtcaaagcgggcgtcggtctgcgtggttgcgatttttctctcacctcacgttgtggaaaaggatggggatgggactatgggagaggttgggcggcggtcggcggagggtcctcgcgtgtgagtgccttcttcaccgaatgcttcgcattcgcatgcaccttttgtttcttcaacgttcaatggaggaggaaagcgtccccgctggcttttaattatttttctgcctgcgaagctgaccgttggtacatggtcatggtagtaatagtagcctccgtcccctactataagctattttaacataatattttacttatattgtttaaccactcgtcttatttaaaaatattatgtaaatgtaaaaaacaaaaagttatgcttaaagtattttagataataaagtaattaaaaaaataatagttctattttttttaataaaacgaatggcaaacagtgcaagcaaaatgtcaaaatcccttatattagggatggagggagtagcgtttttacccgaccgggaaaagtctatccctttagttttcaattcttacttaggtcaatttttttaagtatagtacagtggacatacacaccactatacacaacatcacactctcacatattcacgaaaacgccctcaagcacatgtctaatgaaatggaaaccaactacgcatgtctgatctcattaaaatttcattaaatacctacttatgtgtgggtaaaaatggtggatttgaaccctcgcatacccacgactctattgttacaccatcagatatcggtgatgaataagtagataatttgtggtaattacttgaaattacaaacaactaaagcacagaaagttttgcctaaagaatattacgacgtttagaagttcaggaagagagcctgttaatctattcatcgtgaacaaagtcaacatcaagttgcttggtttccgtagtaaaatagcacatccgtagcgctactagtggtagcttactacgtttgggttacgtacgtggttatcacgttaagtttttattatctttcaatccaccgtgttcatgttttctatgtagtggttaatttgggatgactaacgaaaggcctcaagccattagccagcaggtaaacgtttgtactccatgtgaccatgtagtttatttaaccatataatacccctagttgtaactcgaaatatatccaaacgacatgttctgctttttacagtttcattgttttgcttatacatatgcttatctgtattgcttatcaataacttttaaaataatttataaggtattaacataaataaatttgcatactaaataaatattgtattgctctctccatcccaatttaatcattagaatactaatatgcattactcattatgtaaatgattagataccatactacgatgtcatttatttttacacaaataaatgagtatataccggttaaatgatgataaatttaaaaagatcacaaaaatcttttcaaattgggataaagaagaaaataaattcattgcatttgttcccgtcagctactagcgagacttcccggcacataaaacgaagcagcgttttagtacgtgattaattaagttttagctatttgttttaaaaattgattaatatgattttttttaagcaactttcgtatataaattttttttttataaaaaacacaccgtttagcagcttaaaaaacgtgcgcgtgaaaaacagacagaggagttggtaacttgtactaccgaatagagacttggtcctggtcggtgctccacccaaagatacagagcacctacacacagtgacacacccaccacacagagagagagagagagagagagggggttgtggtccttgtggacttgtggcgatgggtggtgggggtgctgggggtagtggatgggccgcggagagtcgtcgcgtgcgctttccgttgttcatttttgggttttgcgcttgacatccggctccggcgttgctgcaagaaaaactgaccgttggatggatggatggccgtggtccactggtcctcgatactgttgcctgttggtacggcaccacaccactctgtttttattaggccagtcacaatggctagtgtcattgcacggctacccaaaatattataccatcttctctcaaatgaaatcttttatgaaacaatccccacagtggaggggtttcactttgacgtttccaagactaagcaaagcatttaattgatacaagttgctgggatcatttgtacccaaaatccggcgcggcgcgggagaatgcggaggtcgcacggcggaggcggacgcaagagatccggtgaatgaaacgaatcggcctcaacgggggtttcactctgttaccgaggacttggaaacgacgctgacgagtttcaccaggatgaaactctttccttctctctcatccccatttcatgcaaataatcattttttattcagtcttacccctattaaatgtgcatgacacaccagtgaaacccccattgtgactggccttagaggtaagtttgatagtacagcccactaccagctctaaatcagtcaatgtagtagctaattcatataatagttgcttgctatactattaatatctggttccacctgtcatacacacattacgtcttggagcctgtgctgcaactggctatagatctgtagcccgctgctcttctctctcttcatttatctctttaaaatatatttatagctggcttatagcctgctattatacctactcttactgcaccaaacccacaaggtcactgtgcctttcgcttcggtagcagtcaggtaggcgcctaggtgcataggcctctctctctctctctctatctctctcggtggtgttctgttcatcacaattcacagctcatggcttggccagtttggcctcatcactgcactactcaacgtaaaacaaaatgaagtactgtagaaccaaggcacagaagccacggtagatgtcagaacgcagtattacttgtttcatcaatcacttttaataatttatattttttttcttttttacttccaatcatcctctcatatctaaccataaatcatttaataagagacattataatatttttttcctcgaacctaatcaatactgcaggcctgtttggataggtgctgtagttagcgtatagtttggttgcttaacgcacattagtctaccgtaagaagatagatgctcatgaaccacttcgccacttgtttcttcgctaatgttgtggtgctcaaatcattcgtccgacttgtggcatgggctagcttgtgagttgttacgtggtaaattggagtagccatccaaatagaccctaaataacccaaaacgataactaatatggtacagatgtagtatatactcccgtacagtacagtagagcaaacttgaggcagcaagcaaaaaaaacgggaaaagcaaaacgaagaaacggaaaataggagcgacttgcgagccctttttgtacgagcggagctgtgttcagcagttcagcaccaagagccaaaggctcaaagctatccaagcagaagtccgcgagtcaaattgagtggcgaaaggacaatcaagaacagatttggcctacagctgaccaatcgtaaaaacaatgtagaataaacttaaataataatttatagataaaaattttaaacatatatttatatatgtgttatccgtgattttaaaggtaatgctaaaaaaaagaattacgatggaaaaaccttaaaattaagttctgcaattcaaattttagtagcggcttataaactgagaggcaaacaagattctgcatgaaaatgcttccacagtaaaccaattgttttattaggccacaaaattggcatgatattttttttctctgagacagggtagattatactatattaaataagagaagaaattacaacctcgttgttacaagaaaagaagagataagacaaattttacatgatactattgatttaccacacaacaggttttccacaagtcgatcaactcttcaaatcgtgttgcgtgggatcatcttttgctcatgaaaggtagtgtggagtttgatcttctggacgaatatgggaaagactcatgggtgctctggtatgccaagggcgacgagcaaaaatatgatacattggagggtggatgtgaacctggcaaatggcaaggttcaaaccagcaattgtttcgatttcatacgacttgatgatggatgcagatgcataagtatgcttgacaacacattcacaatatcaacacgtgttatttccgctcccgttcttcgaattcttaagctcatccagctgcgatgagaaatgcagagtaagtgatcaaatgcccagctctttctatacaaaacaatctttttatttggacttcaaagtaagctatccaaatgaaactgaaaaaggaacaaaaagagacagttctgaacccagacagatatgatgatgttatcagattttcataagttatttttttcctgaaagtacagaactgtgcttaagatgttaactgtcataatgagaaatctaaattgggtccatcaggattcaggaataccatctagcttgctgtgtgccagccgattactcagcagatgctatagctatcctatgggctgatggaaaactccaagacaataagaaaggcacaaccatgaagaaggaaacatcgctgaggacagaatgctatatacagaactaacaaaatacagtcaaggaattcatttgtgtatttgcacctaaattcatacagtttaatcggactgaaaagtacaccactgaagtattatctgagtggtggagatcctaaacacgtgcaataccaaagtgcaagagccaactaactgcagtgaagtgaccacacataagcaccaatcttgatagacaagtaaatgttagatttccatagagatctccatctctaacatggcattaaggttgtaacacaaaatgctactgtccatatgaatagatcgagtagcaatgcatttacgcaaacacattaaaatgctatatatatacctgtctgcatgtttccttgtgtgtctctaaaagctcattatacttcaattgcaaatccaacttctcagctttgagcttttcatagtcggatattgatggaccacccagcttctgctgaacaaacctgggatataccagcatgtttagttgttggcttcttccaggacaatcaattattcatgccatcttatagtcaaatcaactcactcgaccgcagatgaaggcttgtcattctcctcatataatgcaacaagaactgcaagatgataaggtggacttaatcataatgtatctagccagtggcataactagaatttgttgatataaacacataaggaacataatgcaaacctttcgtgagagtatcaagcacaccactggactcgaggtactttctgaacgcctctttcttggcttctctatcctacaaagaccatcacaaggccatgatcatcagtttggaaaaacaaattgtagcacacatagctgcaccgtatggagatgagtttgaatttggtttactcgttgtagtacggttttttatttatgtgtatggcagtacggtagtatactagtatgctagcatgtgttctttctatgctaccagcttgagagaactgaagcttttccattccaggacccaggacactaagctgaaattaccaaagctgcgaagcaaaatgctcgcggcaaatggcaaattggaggaagattgatcaattcttcctcacaaattgcacactactgtactatactgcaccctacagattcaaccaactaaaccagtactctttaccacaataaataccgcatttgacctttgacattgactcgctgacctccatctccatgcatatgctagctatactaatctcaccgcagaatcaaacatctctctcaccaggggcggatccaacaaacaaactgttacttgtatagttgtattaaggttaaggctctgaaattaagggaagagcttcttccagatctagaagagaagctagggttaacgaacgaacgaacgcaagcaagcaaattccagacccgatgggagagagagatgaatcagaaaagaggatgcggatgctcaccataatcctctcccctgctctgctcgccagatggagatcgccgcccctcccctgttcagccgcgactcgtcttggcggcaggagacgggagattttctttcttttacgtcacaaagggaagggaagacactcgagactctaactactgagaattaagaatttgccactgtcacacatgtcatatactaataaggacacacgtaggacacaattcatattatagacggtgagtagtaaattcttaattactacctccgtcctataatataaatgattttgagtttttgtttgtattgtttgatcactcgtcttatttaaaaaatttgtgcaaatataaaaaaacgaaaagttgtgtttaaagtactttaaataataaagtaagtcaaaaaagaataataatgccaaaatttttttaataagacaagtggtcaaacagtgcaaacaaaaactcaaaatcccttatattacaggacggagggagtaccattttaaaagtggcaaaaatttaaaagcctcagacgagtactctcacttttatctcaatattttactactttaagactagctatttctttataatgactagtggcccacattctaaaaattaacaaactcggttagcgatcggttagcgatttgtgttaacagcaaactcctcatactaccagcaaccactaactgttattccacgcaccgccactactgctctttcttcatgagccaccatcgttcctcatcactgtctttgcatgtgcaaccgcaccctctagttacactgcatgagccactttttttccctctccctctcatcatgcacactattgtagggactcacggaggcaggagtcgacccgatgaaaagcggagacgctagattcaggctccttcttgctggagctagcggttccctgtcagagggaaaaagaaaatggagagagagagttagtgtgtggttgctgagtcactggacttggagatggatgaaataaggtggtccaaattgaaatgtacagttagttgttctgtaaataaaaagaatggttaaaggatgacataatatgaaaatttttaagaatacattgtacgaactgtaatttacttttttttctttagcacaattaaagatgagttgtctattacccgatacttctgtgatatactaagtcttaagcacaactaaagatgagttatctattacccgatagtcttgtgatatattaagtattgttgggtcagtgtacttggctattactaatagtctcatgatatgttgacgcatgaagatgtagacttctattaacacaggctgattaattatggcaagatagattcagctaaaaaaagataaaattaatgccatcaattttgctcagcaataaagcattcgattatggtctccttttctcactgcatgatatacgattgtagatatttccgtaattctttcatattatttttttctacatatacattaatttggactaatattttttctcataattagatagataataaatcatttttcatatttctcctataaaatgtgaagagggcattgtataatttcaaaattatattataagtgtatgtaatttaatgtgtaagatatgaacttatagtataagatttaactttttataaaaatgtcgcacgatagtagataggtaatgaactaaacaaccataaaatatatagagaatctatcgtgtgttattgattttgtccttattctacaatatgtcactaggtttgtcaagttctaatatgctatagcactttgcttaacatctataacataccatcgtcgtctagttagcttccgttagtattatataattttatcataatgaccgaaatagccatgggacgaaaaattccaaataccagattgtaaaatttccaaagtttgagatggatatcttctctgccttgtttataatatgatatttcggaatattcggccaaattttcgaatttctatcccggggatatttcggtcattaaaacaaaattatacagtgctaacgaagtctaaatggacgacaacggtatattatagaggttaagcaaaatacgatggtatattgtataacttaacaaactcagtgccatattatagaacaaggacaaagtcagcggcacacagtggattctcttaaaaaataatctagtcaaaaaagtttatttattttattcaaaacaaaacatttttttaccaaacgcgttaggagaacttcaaaagaaggtaataaaaaaaagaggtttagtcattagctcaaacacacatggttttgataataatattgctacaatcagcactcatacttgcacatgaatactagcatctaactcatatgtgtgtgctccgtaatatatattatctatgtttttacatgagtaaacaataattattatatttgttaataatattgtaattatataaggtacctaactagttttctaagaagtggaaaaatatttttgttaaacataatctagaatgctataaagattaataatgttgaatgctatataatcatatataatcatataatgttactcccaacggatttggaggttggaggaggaggagaaatggcgcgggcgagctatcggctggatctgccgccttcaactgatgctggcgaatctcagaaccgtggaggagaaggaggatgcgtttgcgtgaagccgttgtacggtggaccagtggtcgatggccgctttcggtggaccggatccacattaattccccagttggctgggttggaaactttttttcccctccacttgctagataagcgttagattaatatctctatctctactattataaatagaatagaattgaagatgtttttattggtattttaatatgttatctgtgtttgagttagtttttaagtttgtttacttttaaaaatacagatctgtgtttgagttggattttaaactcgtttgcttttgaaaatacaaaaggagtcatataagaaatctctttaaaaaaactcatgctaagttaaagatgaaatatagctcacgatcttctaatgaattttaccataactaaaccgtataataataataaaattaaaatagcatttacccgttgcaacgtacgggcattttttctagttagataaaaaacctagaagatagattaatataatttattaaaacaactattttacatattttctaaaaaaatacatcaaatttcgcagtttggaaagcttctgtatagaaaataaaagagcagaagttgtgaaatgtagagatgtttggttgggatacactattgccaaagtttgccataattccgttagctaacacgcctaacatgtgcttaacaaatttgaagccacactttagctataagagagcaaatttgacatacttttatatgccaatgacatgtgaaactcatatcacagtgaatgaattttgccttaagtatggcacaaactaaacagacgcctaacttagtaaaacatgcctaacttaagttatggtatggtgaggtaaattattattgtgaaccaaacaatttcgtagtgcagaacacagcctaaaccagctaaagggaatgtggagctgctatcttctcaagaaaactgtcatgactcggtctgaattcgaagaaaataaaataaaatactactactaattttttttctgtattgcatgaaattattcaaattattttctaagaagaactagagagtataaaaatgttatttcctttttaaacttctagtattttttttaaccgtagagcgtagcaaaatttcccagaatcatttggcacagtcaaattcgaacagaaatcaagaaaaatagaaccatttggccaaatctggaaaatggaattttttgaattggatctaactcctgcaaaacttctgcgtataaagatcaacgaattagcaatttagcacaaactaagaacaaaaacttaaagttcgctatgaagaggtgctaggaaggatatgcaaatatacattgcataggaaggatatgcaaatatgcaacgcaatgtgacgtgacatagtaacttcagttgcaaccacattgatttatttttgttaagttattattgcatcatgtgtttaaattcgaatagccagaaaagatgatacattgtcagtttgtcacacggggtaagacaaaatccaagctcagaatggcaatagcaataatgatttaactatgttttcggatcaataaacctaaccgaatgccattccctaaaaaaaaaaggctacactgttagttaccacaaaagtactaacgaacagagttttgagaaaactagtaattatatacaactttttagtttgttattcatggtgtgtttagattccaaaaaaatttggccaaaaatgtcacatcaaatatttggacacatgcatatagcattaaatgtggacgaaaaaaaatcaattgtacagtttgcatgtaaattgcgagacgaatcttttgagcctaattgcgccgtgatttgacaatgtggtgctacagtaaacatttgctaatgacgaattaattaggcttaataaactcgtctcgcagtttacaggtagaatctataatttgttttgttattagcatctttacaggcgaaatatgtaaaattttggccgaacatcttaaacacggcatcagttattcttgaagcactaggctgcgtatatttttatggacgatatagaagaaaatctgtaccataactctaaatttttttatgctgaggatatacaactgcaaaaagcctgcattctgccaacagaagacagggtgcacgatgctgattttttaagaatcaaaagaattatttattgggcccttcttcacagcaaaatcgaagatcactcttggagtgctctaacatgggaactcatctctctgacttgattctcaagccgtcctgggtggcagaagaaatcgacaaatactcgtctttcctgctgcacattgcgcgaaggttgttgtaacatctgcaaaccatttgtaaatttgagagcatgacttctcaatcaacatgcagaaactacctaaagctgttgaacactaccaatgtgaggaagtaacagatgaaaagtaccttggcctttttatctcgagccatcgttacttcgttaacacaagcagagacttgctggttgattatttcaattcttcaagcgattgtgctacaggctgtgataaatcatgcacaagtaaagtagtacatcagaacaaactacgaagtggcatggaagagtagggacatatgagaaggaatgtacccatggtgtcaatgttggttgcacatatgtaaatggtacagacagaatttgctcgagtgtttggatcatcctgcatctgcaaaggaatggagaaagcatgggtaatgattgaaccaaagatctaacagtcctatcaataggtgttgatgaatgcaaagttcaacgttaacacatttctcctgttgataattcacagtaaaggagattcaacagttcaactacacagtgcacagaaaatggtcaaatttatcaaggggaaaagtttcaggaaacaatatgcgaatattactcacagttcatcgatacatcttttgcgttcacgtggaagaacattttcaagctcatgatgaagatactcgagctcattttgcagatctgagatctgctcaactaaaccatatgctgaaacatatgatggagtcattgcttgagcacctgcagaaaattggaaggggaatgaattgttcaacttctggtacagaatgtggatacaatttacaacctatgtgtgctcacctgagtgagtactaagaatatccctcacagcatgaagaaaagtatcacgatcatcaatagatccttcttcaagcattacagatgcagcttgaccaattaaatgatatcggtcctatgcatttgtgcagtacagactatattttgtaagaatgtacacaaagtggataataataagaggctaaccaacaaaatgtactctcaaataaaaatataacatcagaaagcaataccagacggccatcaacaactgagaagtaaccctgcagctccattgctgctgcttttagcagtgaataggcacttgacatttttgcccgtccttcaatctggcaagctatctttagaaactgatgagcagcaagttgattaaccagataattgatgaactgcaagaatgaagaaatgcctcagtgactacctatttatgtaggaaattggtttgcaccaaaacaactgactgttcaaaagatacccttttctgctggcttatgtagcattcctgacgcagaaccttcaaattatgatcccctggaaggtcacagtaaggaacatgcaattatattgccgcaacagagcaaagcattttcaaatgatgattcatgagaagatcacaccttgcaaaatatttgcaccctcaagttgagcaaggtcagcacacaggcttgtaataatctaaagttaaaaaaaacattatttttttatgtcactcacaaagaaaataatatgtcacagttaatgcataagatagccaaacggatgaaaatgacattaaaattggctataagcagcaggaacagagtaaattgaagaaggggtgacagatacataattgcaaagacaaaccagtgaacatgtcagttttctgtagtttgcatttttggagcaatctttagcgtaactgtacattctttttattattttgccggggctgtgacaccatgttgataaagtgtgcttcataggaatacatcattgacccaaggtatcacagaatgcaattaattaaagaactctgaagcgtctgagataaaccatttgcttatccatggtacattaaaaaccaaatttcatgtacataataatttacctcagataggcatctcttcacttgaagtgaaagatccctaagctcttcagcaaactcagagtttctcctcctgaggatgacatggcaaatccaaaaaaaaaaaagaaaaataaaagcagatacttaattaatgaaatgtgaaaattttccgaaacatcacatgtacaaaggtttgttcaagtactaccatacaataaataaacaatccatacaacctaaatgttctcataaaaagatgaagcgctttctggtagatttcgttcaatctactttttttaaaaaaatatatgtcattataatacaatggaaccaagctgtttcatttagagatgtcccataaggatagtaccatgttctcaaaagtttcagctcaaaataatgatgctgtgctatttcagtacagcttttttttttagaaaataataaagtagctatgattatccatgtcttgcataccttagagaatgaacatcctgatgaacaagtgactgctgggatgccaattgggttctaagcgttgagagtatggcctcctccttagcatattctgcttgtgcttctatgtactgtcttttgcttctagcgaatctgttaacaaataaccaagcatcagcataacaataatcatgcatcttaaaatatcaaataaaatgtaaaaaaatgatgttatgtgactatatgaagcatattaagtaattctatgcattgttatgttaactcttttatgaactttacaacaaagtaggaaagataaatgaacaagacaactctcataatgataggggggattgctatgcctaaatactccttccgttttttatgactttttacgatgttgattttttcctaaaatagattttgtttttaggttttctaggtactttttttcctaattacccttattaaatgctaatagatatgaatgcccttgagcttgaccacctcgtatgaagctgcctgccatgccaaaacacctgaatgactgaggaagttggagacttggaggctaaattagagataaaacagatttaataggggtaatcaggtcagaagttttctaccttaagcatattgttaacaaagtttgggaagtgggtgtttggaaggttgatccatttgtttttgtcaaaaacaaaaggttgatccatttgaagaagaactaactaataaatgagctaaagaaataccttatagaactacaacaacacaaggtgtattcatcagaaggcagagttcattgaatttcataatgaatttgcatcacttttgcagaactaatattcaaaaaaagaagtcctaacacagagagtagggttgtggcctgcaggtgggctggcccactgacccacgtataagacattaggtgggccacttgaatctctagaggcaggacaggtgacgacccatggcacagttttttttgtagtttttttttccctaatggaaagacaaatgggatagtcctgtaacatgaagaagtgatatgcaatagaaagacaaaaaagggtagaacggtgacatccaaagactaataaatacttacatggaattaattcgcttcagttcaacagaaagatggtgtgacccttcataatctcctgcgcaaacaagatgaatggaaaattggctgttttctaattcatctctgcctaaagttgttaaacctcatattgaatacctaacccaagtatacatattaataaacatatcaacagtgcatagtacatagcagcaaagtgaaccatgaaaccagtggagaagaacgatatcaaacccttcgtttacaatgaccctcctgcaccctctaagggagaaagaccactcttatattttcaattttttaagagaagcagttggacaaatatgtatactaacatcaatttaaggacatgcataatatctcctatcatggttcaaggtcaatttaagccagtttagcttactcagtgaagaagacagaatttttatggtaaaattgaacggcacaaattcttcaggcacaaaaataggaaatctatatggttacctaatcatgatccttttaccaggaagcttgagttatcgaataaaataacaggacctgttcgcatttgtttaataacatgtgtccatgcaaaatttgaacttctaacatttcacataaaaagtaatatattgctgagaatcaaggtatctttctccaaaaacattatgcagacacaagaacaagtattgaatgtgaaatgtatggtatggagaaactacatgcatgatgactactaaacaattaaaccctcacctcttgacatgtcttctttggcaacaaattggagaggtccctggttgacaaatccccacccaaaaaaaaatcagcagatgataaataaaggttatagctaaattgtgaatttaagattaatttactttggcaatttatcataattccacatttaatttactgtataagaaaacaaattaacatactacagtcttttatagtatttatcaacatatgagatatgaatcacatcaaatagaaaaataagggacaatgaccttgagttcactttaataattcttgtgtaggatcaaataagctcgcctttgcatgttcaagtatcaagatacgtcccaacagtccaacactatgtttgtccctttaggcataaaataagttaataccttctcaaacttcttggagaaccatctgtttagttccttgatacaagccaaattttggattatgtaagactggaagtcactgtatgataggtaaattccaatatctgtgaggaaaggtggaagacaaaatgtattcagaagaataataagaaataaaaacaagcatcggattcatatgatgagctttatttcagtatctctatgtgcatagatgcaagtcaaaatggagttatcaggctttctgcacattttaatatcagtaatgcagtctgataagatgaatgtaatctttatataactgcatgtgaaagacagcaggaataccagcttctgaatgataataagacaactcctgggtggtagcagcaagttttccaagtaatgaattcatctgctaggattacaaaaacaaaaggaaaaataaaatatctgagggacaaccttctttatgatgcacaacactgaacaaacaggctagagagtaccatatattttaattcacattagtcatggagtgttgattatgccataaaacagaacatcaacatgcataaaaatctgtgaaaacaaacagcccagtgaacgctttccttttttcgcatctacggttatagccttcaatatctgatcgctgatagatcctgatcgccaagggaccgatcaggacgattgatcatagatcagccttgattaatcgacctgatcggtactatgtataccagaacctatattctatatagtgcatagtataaaccaatcacagtactaataattgatggcaagatggtcactcacttgccctagtataaagcaactagcagtagtagcacatattcacatgtgctaaaccttaagactagttctaaaagtgattgataggtgctctgatcggacgattaatcggacgatcagatttctgatcgagctgatcaaatgaatgtccctgatcagagttaggggaccgatcaggacaattaatcacgattaatcggacgatcagataacactgatagccctaggccattagatcataaagtctactggtctggttagttatcaaacactatcatgttccaaccgattataggctagataggtgacaggttctaaagccagacatgagtatcatggtgtaatatgaaaagcatatttcagttccatctatctcatgaaaatacagccaagaacagtagaatacagtaatgtggcctctgatttggatgataaaacaaaggaacattttacctctaaacttctcttagcaagtttctcatctaatcttgaaatttgtatattaggattagttttagcagatacacgtgacttctttccctgagtaatggtggtagcttgtgctgtaagcatatcaagctgccattcaagagaagcaagctgcctttccaaatcagaaacttcagctctgagtgtaagctttgagtcactgtaacaaataatcagaaaatcctatgtcaatgaagagatcaaaacagcagggtaacgagataagactaggtgttgacatggagcgaatcatgtggggctgcgctaccactgacagaaccatctgtcaatcactctcaatgtaggagttcagttttaccaaagcatctagaccaaataaattagggaatgatgccattttataacacgtgttaaaccaaataaatatttatacttgtaatctgtaaacatcacaacagaaggtggacaactacatatgcagatccaaacaagaggagcatcgaatgcttttcctgtgtaagacgagatatgacataccggatgtgctcaagactttcttctgtcagaaatgtgtcttcctggttttctccagtctctgagaaggccgaaatactgtcaaacgcaaagtctaagtcctccccctaaaagtcggtgctcaattagcagcatgccactcactagatagagctaatacattgcgataagtgaaaacaagactaatcataccagtaaattttgttaaccaacatggttttcgcctaactaataaccatcacatgtaactcacagtccaagtatttaagtttatcaaacaaagaaaccaaaaagctctatacctccaaaagtttcccttctagttcaagctgctcatacctgcatttaaaaaaaaaagatcaccaatttataattaagctttataagcatcatcagaaatcgttacacagtaacaaaaaaacattgtgtaatactacaattcatattatcataagttggtaacgtgcaattgatccaactaaaccagctctcatagtataactacacctacaaccttaactagatagtgtcatgcaacttctgacttctatggtttatagtactttatactacacatttgtccatcaaacttcagaaagcatgtgcagtgctgcgccttttctcatcaaagcccttctcctcctcaagtttcaaaaacaactccgatttgcccatcaccatttcgcatcccagcacacaccagagttcatccaacccctcaaacctccaaacaattacacccataccataccctctccatcccgttcgaatcaatcaacccccccaaaaccaagcgtaattccgaaaaaacgcccccccaaaacatctagaacgcgacgatcagagagaatttcgtgggggggggggggggggaaggggatcgagcgatggggagtggtacagggcgaggtcggtggcggagaggacgttggcggggcggagcctggaggagacccaggcgagaaggcggcgggcgtcgtccccctggaggaacggccactcgaggctgtccagatcgagtgggccgtcgccgtcgaacccggcggcggcgagggcgtcgcacagctccgccgcgctcatcgatcgccggcgaacgaagcggcggtgggaatggtggaaaaggaaaatatatttttcgcgagggggaggaggagtaggagggacgatgggcccgtgggccctggtggtgggcttgaccagatatgggccgggctatcggcccaggagtggctggtttttctcccatggacattttggccacactgcacagtgtgatctgatattctgatcatcgtcgtagatttgtactccctccgttttatattataaaatattttttcaagcaaacatctttaagtttgattaatttataaaaatatttagcaacgtctatagcactaaattagttttattgaatcccacattgaaaatacttctatagtatgtttgttgaaattgttgctatgtttttcttagttaaacttaaaaaattagattagtgaagaagtcaaagcgttttatactatgaaacggatggagtagtagttatagttctaacatggcgttttgtgctattactttttgaatttgtagcacaaaacaaaccaatggaattatggaaaagtatgagtattattagccccttaagaaaaaaagtgaataactgcattctagagtgattagcattgtgggtcaggagaaaaccaaaatgggccacggcttgggccagtccctttaggacacattgttgctaccatgatgaaaactaatgctattcctcatgttgtaaatatttgacatttataagataatattctcttgacttttgaaaccaatactattagaataatttaaaaaagagtaaaaaatctaataaatctgtgatatcattatatctttcaagatatatctatgcatatcacttcattgtttttacattaagcatttgagaaattattatgatggccaaagtctaaaagtatgataaaaacttgtctaaaagttaaaataatttttttaaccgaaggagcataaagtctatcttagtggcccgggcgacccggggcctggtatatactgtaaatgtctctggatatggtatatattagtgctagctatatgtgggcatgtggccatattcattgaatctatagatacggctgggactcaccaaatatagatggcaataattctctcgtctgttgtagagtcacgttatctcaaaagggagagtagttatacttatagcgtcatattttcacaaaagaacaatcaaattgttttttatattgtataaactatatattcttgcatttataattatattgtgccttttcaaatttaaagagtaattatattgtaattttcattgtgatttttctaatacacgatgtataagagaattaggattaaaaataatttattatccatttggaagaagagataggagaaataagcatgtttacatataggagaggaagcaatcaaataggaaaaaaatgaccgaaattaagtgaaaaagtgtggtgtctcaattttagccaacacataactagattagtttatctaagatgactacagatcaaatatttataattatctgcttttgattggtcaaatcccttgagatatcaaaggcaccttgtagttacatctaaatctacttaccatatatttacgagcaatcttttacgcgttcgtgaaaaaataaatctaattaattatcatcagcgccaagtcttaagctacccctttagaggcatttattttcaccatgcagaggcatgccttgatctaatatgtaactacccgcctcgtgcgcaacttttatagattaacttgttgatatgagtattctattaagccctgcgccgggatgtcacacaatataccgtgggctggtttgggcctggaccaaacctgtatcggcctctatttaccatataaacatttaattttgtcaggaaaatatcaaagttttaagagggttatatgcggcctatatatgcattcctattatttttctactgtttcagcatcggcattaatcatagttcagatagcaaagaatccaataactaattgcaactaccacacgcacggttagttgattatccattgagatcaaagaactcgatcagcttgtacagccgccaggacgatcatataatgaaaattaggatcaaattaatcttgtacttgaaatcttataaacacccaatacttattaccgatgatggtaccagatactccgtccgtgtatcagaatataacaatttttgactatgtatctatctgaacaagagtatgttcggacatatagttaaaaattactataatctattatattattaaaggaatagaaaaggtagcctccatgttcgctctcatggtttagaaattctcacattaatcggagaaaaagaaaaggcaaagtccatatagaaatacaattagaaaatagctgaaattcggaattaaaaaataaggaatattagaagaggagactagagtccatatagaaatataatttagaaatagttaaaattcggaattaaaaaataaggaatattaaaagaggagactagagtccatatagaaatacaattaggaaataaatgaaattcggaattaaaaaataaggaatattagaagaggagactagagtccatatagaaatacaattaggaaatagttgaaattcggaattaaaaataaggaatattagaagtcgagtatagagtcaatatagaaatacaattatgaaataactgaaattcgaaattaaaaataaggaatattagaagtagagtatagagtcaatatagaaatacaattaggaaataactgaaattcggaattaaaaataaggaatattagaagtagagtatagagtccatatagaaatacaattaggaaataatagaaatttgaaattaaaaataaggaatattagaagtagagtatagagtccatatagaaatgcaattaagaaaaaaaatagaaattcggaattaaaaaattaaggaatattagaagtagagaatagagtccatataggaatttaaaactaactaaaatttggaataaatataataaaattaaaagtagagtttagagtccgtataaaaatacaatttataaataactgaaattcgaaattaagaaaaacatgggaagaagagtttaaggtcaatataggaatacaatttagaagtaactgaaattcgaaattaaaaattaaagaatattgaaagatgaatttagagtccacatagaaatacaattagaaataataaaaattcagaaataaaaataaataatattggaagaagagcatagggtctatatagaaatacaatttacagaaaattcggaataaaaaaaaagaaatattaaaaaacgagtctggagtccatataggaatatatataatttacaaataactaaaatttaatattaaaaataattaataactaacacatatataaaatataatatgaatattaaacattagtagttttgtaaagttattgcaaaatttaaaattatgttgtcattttaatatatttgaataatataatgagaaaacatatatgctattatatgagagaaaatataatgatgctagccgcacaatctgcgcgggccaccatgctagtttaggataaagataacaacaaatattatcaatatcatataaatatataatctttaattggggttacatatctggaggcgtggtgtaccaagaatttacaatcatgttcatacattttatttcccattcatcctatatactgctataagaatacgatcaagcttcatctgctaaatcttaactatatgcatgatcaaatttgtgatcggtaaaccttatatagaaccatatggtatgatggttgacggcaacctaattaattagtgaccggcaggagcaggagggcggcagtagccaccggcgccattcccgttggtgcagccggacggcagcgacgagctctccatcgtccacgactctaccaccacaccacttttcctcacaaccggcacggccgtggtcttctccatattgaccatcggccgcgccgccatgccgccggagaccaggaagacgagaagaatgacggcaacaatagctgctaccactgcggtaaacctcatgatcgatcgatcgatcaaatgcttattttttattttttttgactggggatcaaatgcttaattctatcggtgcccaatcttgcagtaggtccttgcactctctgcacatatttatagtcacacggatgcatatgcatgcatgaatacatattgtcgatcgcctgtgtgcagtgtcatcactagtggagttactggagtatggggagagagagacgttttgcgttggaatttgacttagaaacaacgttaataatttgtcgcaaaggggagacgaagtgactgattggttgagccacggctggtaaatcataaaaaggataaacgaagcatccaaaaataatttaaaacaatattttgcacttccactgttttttaagaaacacaatataaacataggcgttctttgaattcgaggataaatgaaggaaaaataaaggaattgaaatcctatgttatccatgcctttgattcgtagaaatgagaaaaggaaaaacgtaggaaactttcctattcctacgattctagaggaaaaacgtaggaaatttaacatccactctaacctcttgtaaaacttcacttgagtctatctctctcatctgattcctgcggtccaatcaaatgttcattcctttatttttcctatgttttacaattctctgttttatacttgtattcctatcataatacttcctgtgtttttcatattcctatgatttttcaatcctacgattcaaaggggcccttaatattttataagcaagagttagaaaatatatagactatatatgatgtaaaaatacctagatcgatcagtaaaaaaataactttcaaattgaaattttgctagataagctgtcgagcagagttgacgaggttgtcaatggatatatatcatcaattcacagagcgaccacggtgtgcgactcatcagtgatcggtggtgtcattttcagactgccgtacgtgcatgcatttttccaggggaagcaacatggaaatgcatgggtgcgcagggtgaccttttccctgctcatgtgtcaaaagaaggagaatgttgtctgcacgatctaatttagcaacagtggatggttaggagtttttgtcaacttttaggtgcatgtatgtatgttgcacgattgtggcttgatattagaaaagttagctatgtgcatgcggatattccttaatacacgtactctatttctaaccccagatcctagaatctttagcagtataaacactgattagattcgactttcatcatctaagggcggatccaccttctaggcgggatggatggctaggagtttatgccctcaaaccattaaggtcgagcgacaatgacagagttagaaccgaagccctgcaagatggtcaactccctaataacctttaaaatttcatgatttttaattcaaatattaatgatttatagtacctaacgtttaactgtgaaatcatactagaaagttatgcacatactcattactaataggtactctgtttctaactcccgatcctagaatctctaggataacactagtcgaatcgactatcatctactaggaggatccaccttttgggctgaatggatgattgccaatgtttcacgccctatgcaagggagtcaattcctcaataacctttaaaatttcatgaattttgattcaagtatcaatggtatatatataccataactatgtgcaaaaacttgtggaatcagctggcccggcccacaggtggaagaacatgcaatggctattgccgagcgacatcccagctagaaacacaaaataatgaggttataaggttactttgtaacatatatagtcttaacccaaattaactaaagatttgtaacatatatagtcttagttaatttgggttataaggtttgtcatggctttacaaaattcatagctctaccactatcagcccgtcaatccattgattattataggacttggaaagaggatttttgaagtagcacatcctcatagtgccaccaagttattttacttcctctagaatgctacaatcatatacaggttaaactattttctatgaaattactgtaaaatccatattattgaacaggctcggtgaattgcaaaatgattaatgaaaaagatggagccaatgcattgtttaatatatgacatcgttgatttttagatttacatttgactatgcgtcttatataattcttttatgcaaacattttaaagaagttttaaagataaattaagttataaaataaaaaagaatgatgagacatatcttaaaaagttaatgatgttatatattaaaaaaccaaaattattaaataaaaggaaccctaaacttagaagcaaacgggcctttaaccggcagcatgcacgtacgcgtggcaaaagaaaaaccgatggaagaaaatgtgtgccggctatcagaaatgtcaaaccagggcctaattctctcttaactatagtattgtcctgcaggccacgacctgaatcaaaacctggatgattggataaccacccatcatggcacgggcctaactcgatcacaatataccctttttcaaaggtcagctgtatgttgtccgagttgtcagtaatcggagcatagaattcaattaaaagggttgtgattttagaggcctaatttgacacatttaccaagaaaaatgattagtactccctgtctcaaattataggatgttcttatttttaagaaaaaaatcaaactcgatagtttttattaataattacattaatgatatctacaccaagtattatgtatgttatattattgttattagattcgtattttaaaatactttcatgtgatactagttttataattgttgatgatataatacgaaataaattaataatcaaaatatgttattaaaaatcgtgtaaaaaattataggccttataatttgaaacaggggtaacacgtaaaaattcacaatttctgacctaattttttgaaatttcaagtttattggtggattcctttaggatgtttttccattcaaacataatcctccccagtccttcccaattttggatgtaccgatgggttcatgtaggacgtttttccatggaaaaaaaatcatctttagatttagtaaaccattttaaacttcagattttttttcaacatccgaaatttaaattttttggtgtcctgaaatgattcggcaatcccagatagtgaaccctgagctcgatcgccaccccttgttctatgagagctgcatgtttagttcagttaattgttgggctctaggcttttgcaaacgttttcaagagaaaaggaaacttcatttcaaataagttgttctagaaaatggctcaaaagtgtgaagttgagctatgcaactagttacttcctccgtcatgagtggtttaaatctagtattcttttttgggtagatgccgtaccccgtatgtacacacgtatatgagcacctgtttttataacgtgtttcttttttaaaaaaatgatatggctcaaaagtctccttggaaattaaatggctttaaagacaattcttgatgactcaaaagtgtgtttttgccgcttttccaacttttttttgtttcgtcaggtcgctgtactagaagcgcctgacatgttgacaactgctcatgagtcatgacactaaccaatatgcacatgctgatatatagagatatagccggtcggtggcgtgcatgcattgcttgcctttcgcatggcttcctcagctggctcactgcaagaaagattttgcagagagtcgattttgctcaaagtcagatcttatcaaccaaatcgtacaaatgtggacctcaagtcttttgacaacttatttttggtgcaaagaaaagtgtgcatccaacatttcgaagttattttctcctcaaagttttgtacttccatgtgataatggggttgaaccaaatggcagcagcagaacgtagagagagacatccaatgcatgagggaggtatttgccatttcagtacttctctgtactttttcccagaattttggcgatcccgaattcaaatatgcagacattcttcgcagattttgcaacaatatcaacaataacaagttgatgcttaaatacaataccataggatctgcgaacgccgccatacatcaacaacaatgtcacaccaacagcctatcggctgccagattagttcttacagcactgactcggttacccccttacaaaacctcgacaaatttacaacacggaataccacatggtctctgtaccaaggttcttacaaggagaatgcaaaaaaaataatccagcaacaaacacactgttgtcgggacatgatgccgtcatcggcgatgtgaggtataaattaaatcgaaaaattgcacgggaatgggaatggatcatgagttaggtttgtacagcaacattcgcagcacctggctttcccacattcttcatgacgcccttggtcgctctgggttttgcggctactccagtctttggagcactcttcggagaacattgggtcctgctgttaacttctttggagttcccaatactgtgacgatgtaaccggcaacatgctgcacttccatttttaccctctggtgtatgaggggtatcgctgcagctctttctccgtgtcaattttggtgatttggcacgagttggaggcacctataaataaaagacaaagtgaataccaacattgcacatgctaaaagctggcaagtttagcacatactaaaagttggcaagttaatggtcgccagttgaaccagcagcttgcataccaatgcttcatgcaacattgtgcacttctattattatcatacaggaaaacataaatactgcatttacattagctattctttttccctgcgtgttcgagaaaaaacattaactacttttaagtaatgtaaaagcctgggacatctctcgtactcttattgttcattcagggtattcccaatttaattatggctctgttcggctgcactgcaatgcagcccttgctgcagcagctacagacacatagtactgtttggattggctgcactacagttgaaacaagtgcagttgaacagggcctatgtagataacaataggaacaagcatgtagtcgagtatgtttttacagatacgcaatcagttcaattaaagggaaaagatctaaacagtaatgggttgagatattatcacttgaattaaaattgcattcaacaacatgaacaataatgagcacacatcgaaaaacagaaataatcattttagctcaagcacatatagcaggagatcggtgcatcaccttcttaagttcaaccttaggtgggggaccctcttgatagaagcttggcatgggttttgctctaataaccagattcttccttagttgtttcagagcttcttcttgctcttcctataaaagttgatacttggacagtgagaaggtatggcaacaataattagcaaaagggaaaatgaccctgctaatgcaaagttaaattaataaattgatccaacttgtctactacgctaactgccatgtcataaaatttctaacagtgtagaaaaagcaacataatgattaacagtcatcagtaacaagacgtagcacaaaccattcagtgaatccaaattatacatgtggtgtctaataacaggtaacaggccataatcaatgtcaaatactctgtagggctaccctgatcatggtaagaaatatcattagggctgtctattagagagagagaaaaaacttgggctgtcagctgtcggtgtcttgtaaagggatgatacctacatatgatacttgtttcctccacaagtcaagttacactaactgatttctgaccatcagtttttccaaaacaaatcaagatggacatttcatgattaaaggcaaactaatttgctgaacaagagcaaaatctggtatgggtgcttatatatttaaaagagtaaagtgcacaggcggtccttaaacttatagaggtgtgtcatttagatccctaaactctcaaaatgcatatctaagtcccagaagttgtcaaagtgtgtcatctaggtt

SEQ ID NO: 7483 - DNA, 83580 bp, Oryza sativa
ttctcccccgcgggcagggttctcggggcaaacagggcttcctcaacagaatacgctaccagcccaaggtggcaaccctatcagtttaaatatatgtaaggaatccatgcaccaaatcaaaaaataccagaagtttaccccaaaagcaaaagagttcacatcccccccgaaataatttcatactaaaaataactcggcaagcgtgattattattgtagtttggacttttcatgattgccgtcatgatttaaatatttttactctaaaatttataattaaacattaggaatttatatgctccaaacaatcactctttgtaactttcttttagctaacgtgcattaggaatttagtattacaattatgggtaaagtgttacccttaaattcattatattttagccacaacaaaaaggttaaaaatcctgacggccttaagagtataaatgtattagaattttgttttttcttcctcccaatatgacaccgcacgcgcgcggccgccatcacgtccatctggacaggacccacgtacgtacgcgcgagcgcgcgtgcttttctcggtctctcttttggccgtgatcgccgacgactggcttgattgattgccatcatcacatatgcttgctgccgtgattttgctcccagcgattatgcttgattatggtatagtaatttcacttcccgttagaattcaggttgcatgttcttggttagctcctaagggagtgttggagagaaagggaaaagagaatattgataaaatatacaaaatgaggcgagctattagcgcacgattaattatgtgttgattattttaaactcaaaaattgtattaatatgatttttgaaagcaacttatatatatgttttaaaaaaacgtacagtttgataaacgtgcacgtgtaaaacgagagatcttctcacccaatctgctaactcgaacacaacctaagacctcaaggcctgtttcgatgtgattaagggtgtctttggttgggcttttgaacctgcttttgcagggctcaagctagctgcttctacccaaaagctacttttgttatagtacaaactaaaagcacctcctaccttgcttccagtggcttttaagggaaaaaattacccatctgccattggttatgagaaaacggttcgatttctttcctcccgtccccttcttgcgaccttcacatgcggtgcgcagcagtggtgcccctccgactggctggccgccgcctgtacggtgccgcccctgctcgtccccgcccagcgccggcttgcccagggttggggcgcacggaggagaggacggcggcgactccacaccgactccgccgcgcgcgtctgcctacccgccgctgccggcgtgtcgatggccatctctatgtctttctcctcttttttttccctctttttacccctctttttcccttttttccaatgtgcgtatgacatgtggggcccgcttgtaagcggaactagttatttcaaaagtcacaactgttgaacctaacgagctttttcaaaagatatagcccatattccacagctgcttttcgaaaagtcacagcctacggccacttttcaaaagtcacagctcaaccaaacacaccctaagtttgtcacaccctaatttgctaactcaaacacagcctaagtcctcaatgcatgtttcgatgtaacatttgttaacaaattttctctaaaaaatttagatgtaaatatagtataatcgtagtataattacattataacttatatggaacttttaaaaatccctccataacactctattcccgtgaaacataggtcgttggaccaaatccctcacccatgccagcactgtaattgttcccttcccgcttgaaggcccgctctggcgttggctcactgtcaactgtcacgccgaggtgccgtggtggaagtcgacgctttgctgggggtgacaactggtttatcgtccagggtcactgtgcccgaggcgtagccatagatctcctccaagtgcacgtacatgcagtacttcactgcgtgctgcgaacgctcctgcggcctctctcggacaccgtcacagtcagtgtggagcacattgccacgcctgctgctagtgaagattatccacacacgtttggggatagaggactggtttagttcctaactttttctttaaatttttaactttttcatcatattaaaacgtttctacacacaaatttttaatattttcgtcacattgtttcaatttcaatcaaactttcaattttaacgtgcaccaaacacacccagagtttgggttgctagtccacgctcgaatattgatccagcgtgtgttggacgaatgaatgaagctcatctcgatgttcttcaatacacatgtgcgcgctacagtcagcctttcaggcatgatgcggaacaccgtcaaggtagagatggacgcaaaacatcaaggcgatgctgaggacgctcttgtgccacttgaaaagaatgaagctcaagcccacggcgcttgggaaccccttcttgagcgcctcagcatggcgccgccggtgctcaaactttattaggaaagattttgggtggtgttggagatcactgcctcgcatttccttaggtggagcacctccacaaacattgcttttatgtcctttgctgttgttgacgccgaagccttgaccacccagatgatgatgaccatggactcccattctttcagctcagctctacctagggtttacaaaaccgccggtaactgcgcggttaccgggtttaccgcagagtacggtaaaaaaaaccgcagtaacctccttaaatttaaataaattttaaaaataatttaaaattttgataaattttacatggtttcatacggtttgtcacggttaccgcggttaccacacaataaccgtacttaccgccggggcacggtaaccttggtcccggcggtttgggaaaccgtggctctacgacctcggtggcatgcgaggttgggatgaagcattcctcttcttccgaccaggttgacagtcaccaaggattagtatagctacaaagagtcattggttagcctggtgtgatatggaggttaatttattggtaggattttgttgtgctaaaactttgaatagagatgtgttaatgcggaccaaaaaaacatgtaagagagcttcacactcaatatataatcttgttttgatcttaatttcttttggagtaaattgcatcgccgatacacgaatttgttaaatgggtgcaatcttgtacacgaacttgtaaaatactcgttttggtgcatgaatttgtctaatgcgtgcagaggaaggcaaaaaggaaacaacatggctaatcttattgatttaggggctcatcaggataactatgtaaacatatatctgagaaggttgctattagataaacacctcttcaataaaaatagaatgggatatagtgatggtagaaaatgataaaaaaaaaccgagcaatgatataagagttagaaatatatgaaattcatcacttccatgatgatggataaagtacatatcaaatttataaatattacatgtcttatacatagtcatatgcacgtcacatcctaatcaacatcagctttataaaattaacattgctttctaaaaaaaattatcaacgttgctttgtaaatttatcaacatcaatgataatataacatgtgacatttttgaaaaaaaaaattgggaactaaacaaaaggatgcatggaggattaaattaacatcccaaaaacgtcacatcgaatttttgggcacatgcatagagcattaaatatatataaaataaaaaactaattgcatagtttatatgaaattcgcgagacgaatcttttgagtctaattagtccatgattagccataagtgctacagtaacccacatgtgcttatgaaggattaattaggcttaataaattcgtcttgtggtttctaggcgagttatgaaactagttttttcattcgtgtctgaaaagctcttccaacatccagtcaaacgttcaatgtgacacctaattttttttttcgtgaactaaaccaggccggagtatgtatggaagacatcggaagcagtgctgtttttagtgttgagattatagacatataatgatttaatctattccataaataaatcatgacattacagatgaaaactagcatgaacgcatcattagatctacacatgtaaactacacagtataacatgaacagatcaaatatgcgcaacatattgaacacgtaccgaggtgacgaaaagaccggctgcttggtcgaaacttttcgcaggtgtctacgaaggcacgaaacacgcgagcgaagaggaaggcgagccgtcgcgcgaagcgcttcccaaaaaccttattgccgccttctcccggtgcaggatgtcaaaggcagaggttccggagacctgctctcccgatcgctggtgcacgccggcgagcgggatggagtagtctacgagcgacggcgcagtacagagtaggaggcaaaccctagattgattttgcgtatatactgcgtgaagacggcgggtcggtttatatagagaagggtcgcttgatcagggcgcccgcacgatctctattgcgcgtaaccgaaccggataagtcgcgcgtaacttatccggactccacgccatttgcacgcaccggatttttcggaacgtttccaaaacaaaaacgaatccgaatttgcagcaaaacaaaactgggtcggtttatatagagaagggtcgcttgatcagggcgcccgcacgatctctattgcgcgtaaccgaaccggataagtcgcgcgtaacttatccggactccacgccatttgcacgcaccggatttttcggaacgtttccaaaacaaaaacgaatccgaatttgcagcaaaacaaaactgcaaaaagaggctgcatctgcgcaagggtgaggagccaatttttcggaccattcgatgcgtacgtcgtgcacgcgcgccgcctgccaggcgaggcgagcgagcgcgcgcgtgtttcccctcttctctccaccacacatgcttcaagtggctaggaggacatcctcccttttaaggaggtccccctctcctagaataagcaaggtggtactaaactccacatgcatgccatcccatgaggtgggcttttgtgattttccaaagaattaatcttcgagtgggctaaggcccattcattaattccaacatttagcccatgaacttttgcatattacttctgttttcaaatattcacatgcatatttcaaaatcattatacattgatgttatttgtttacttatcgtgcttaattatgtgtgcgtgatgtgaatagtgcttggtaatgtaaaattgaagcatgtcagtcacaactcacaagaaaagaagcacgaagcgtaagtaaaatttgtgcatgggcatctacattgaaatccaactgcacactttggctggacctttcagcacctacaagaggaggacctagtaaaggttgtgtatttaaaatgtgacatttttttatagccaaataggtttttgacaagtgtaatattatatagtattgatggtacaatacatgacatatgtattatgtgttgaataagacctctttttcagttttgtactccctccttccctaaatgtttgacaccgttgacttttttaaacatgtttgaccatttgttttattcaaaaacttttgtgatatgtgtaaaactatatgtatacataaaagtatatttaacaataaatcaaatgatagaaaagaattaacaattacttaatttttttgaataagacaaacggtcaaacatttttaaaaaaatcaacggcgtcaaacattttgggatggaggtagtatatgcgtacgcatcatatactatttcgatctacctattctttttataaaaaaaatgttagatattcatcggaataattgtgctaagcacttgccagcttattccctgctcgcacattcggccgaaatgtttcaacagcagccatgctaaatttctgattaaccgcttccatactctgataaaaatggtaaacccgttaattgcaacactaggctatgcctgtacgacgtcaaaccggcaccaaaatcgtcactcagatgaactaagcgctgagattcagctacatggatacgtgaactagcaagaacagagcaaactacatctgagctgtacaaatcaatgccctgaaataagcaggtggcaatatatacagatcaaccataatatgcgactaggtaagcaatagtaataagaaatgattttataatttatttaattagtcagctcctagatcagcttgctagcacacaacttagtcaatgcctagctagcattggctcttttcagcaggtaagagaatttagtgcttcatcaatctcaaaatataactataatatagtactatgttaaaaattaagtattgggatgaaagaaccaaagtacacctcattaatccatggtgaggtgatggcgatcaaagatagtatgtgggaggtgtggattttgagggctaataggggtgatagggctcatggtggcatgagaggagtaatgtggtaaaagtcaccttctatgtacctatattcaagataaactttgaatttcaaggtagttatattttgggatggatggtttaagagactgagtattctttcctactaagaataatgtagatgtttcaacagctttgtctaggcttttcatctttggaccccccatattttggcttatctatggcacctcaattatagatttccatagtttgtcgtggatgagcaaagcttaggagatgattcttcatttaactaggtaagaccccgcgcgttgctgcgggagtttagtataataataataagtaaaaataatatgtaagatagctagacaacataagattatataagttaacgtggtttatgataatttaaatttacaaaatatatacaatgatgattcaaacgtaaaagtaaggtgatatgactttatgaaagaagaaaagtattgagatggtttggaccgtagattaatcatcttaaggctaaaaataattgagatggtatggattaataagagaagaaaataagagagataatttagaccatagattaattgtttgagcactaaaaacaattgatgtgatatggcttaatgagagaagataaaaataatattaattaagtgaggacgaactatataggtacatagcatattataaaaaataataaagatatatattgaaatattatgtgaattaggtgggatgatgatttaacatgcttgcatttttaaagctctaaaatttaataaattataaaattatagataatatagcatgtttgtattatgtttaaatttaatgattgttagtgaaagatgatgtagtatctttcaatgttaagctttaggagttaatgagttataactttatagtaagataggatttgatggtaagatcgatacagggaaccttaccaactttgcctacctcctgtttatactacgcggtcacatcacatgtggtaacatgtggtaatggtatctgcacaaatcttaccaagtgaaaagacaatctgatcatgaaagctggaagagccacagcatgtggtacataatgggcatctgattgaaaagcaaacaaaattaatgaaatggatcacaaccgcacgatcaaggatatgtggaaggaaccagaagctgatcaatgaaaatgtttgcataaaacccatatattctcacatatctacaataaacaactttcatagtttgatttctcagtacatttcattattgtctcccccatcatcatttgtgattgaaccatgtaattatgcaattaagaagaaaactcgcacaagtctattttcaagacaaaattctacgctatatcttaaaacaagtttaaatttaatttatagctttatttatcccattaagttttagcatacataactattatatatatgacacgttataacgtttcacgtaaagagctaggtaatagtcacaattatttttgtaacttattccgaaatgtatgtaagacaaatatgtttcttaaaacatataacttattttcaaacttattatcagtagcacactttaggatggttaaagtcgcgtgaatgtgcaacttcataagctagtagtgttggatttaatatgtaagtagagggggccttggccccctcaaaatttacatctcacgtataccagaattcacttgactttataatttaatatatacgagttataaatttatcctgtaagttagtataaatataatatatatgcatgccaccggtaaaaatttattgtgctttcacccctatgcacacatccaaccaagcatcatgatgaatgtggtcaatgcattcttgatttcttgtctagggatggaactgctcttcttgtagttgaccagaattgttagtgctttctaggtggatttttgccgccgacaacaactcgtagaagttggggaccccctccaataagagaacattagtcattgccaaaatcgagagcagacaactcagggatcacatgattcttgttcttgaatgcataacacaagacaactcagggatcaaatgattcttgttcttgaatgcataacacaatactattaaattcctacaaggtacatgttatctgcttaaatgtcatgcgtggatattccatggccgttaaaattcacgttcatatggattaaatagtgtggcacataattctgccgagcacacatctcttctagatagtttgtttatcgggccaactatcgttctatctcaaacatggttggtacaagtccaacttttatcacaaaagaaagagtaaattgcattagcggtacataaacttgttagttacgtgcaatgtagtgtataaacttgtaaaatgctcgttttggtgcatgaacttgtctggtacatgcaaactaagactaaaatggcacgacaagaccgatttttatatgttaaacattataaattacaaattagtagatgacttgcgtgtacatagtagaaaggttatgaattggggcctaaaattgctaggtatgacccttacaaatcagcatacatgtcaaaccaggggaaccatggactcttcacaggtatactgaccattatttctaccttactagttagtacacaatcacaagccaatgagcttgcaaacatagacttcagcacgacactaccaggccaaatctctgttgtctagctcaactctcaccggaagaatgtgcattcctcaagagccctccaggttgagtatctgaatcattgcagccgagatagaaaagcaactagctctttcagccatggtcgatgcagcaactcaagatcaatcgtacacgcaatagcagggaaaataaggaaatttaaagtgaagagatatgaattttatttttcagggaacaatctgtgtaccacaaatatcaaaagaatagacaagagtaattaatcttaaaatagtttggaacaagagcattctaatcttctagctgaacttacaaatttagtttttctgggagctcccccaaccagcagggagtgtatgggagagatgatcgtaccagtttgtcgttgtgcatgtatggagcatgatgaataaaaatttttgtaaaaacattgcccaaatccagaagctttgagctactccaattataggctagcactctgtcaaatttatcaccaaagaaaatcatagccctgtctagttcgcgaaaagaaaatttttaactgtcacatcagacgtttaaccagatattagaaggggttttcggacacaaatgaaaaaaaataatttcataactcgcttagaaaccgcgagacgaatttattaagcctaattaatccatcattagcacatatgggttactgtagcacttatggctaatcatggactaattaggcttaaaagattcgtctcgcaatttccatgtaaactgtgcaattaatttttctttttatctatgtttaatgctctatgcatatgtccaaatattcgatgtgatgtttttgggaaaaaaattgagaactaaacaaggcccatatctttgtaaggatgaaatgcaaggaaatagacatagcaatccttgcgcagttgcgcctacttccaggttcaagaacattatcactgtcagagtcccacccgaatttctcaaatttctcttccactattggctcgtcttccacatagtaatcatcatcatcataataaaaaggcttataattataagagtgaataataatgttgtaaggcccaaggtccatcacgttgttgttcatcatagttcagattcagtaggatgtgggaaatgtccatgtcatgcttcaacacccactcggtctgaccacaccgttcattcaggaaaccaaacctgaagttggggcctcagaaatgatggtaataatgcacagtatatccccttgcttgattttcctagataaaattgaccatctcctggatcttccgtgggcgttctaatcactcgatacgtattgtccgacaatgatattcttcaacaaaagaacagaataacatgatctgaatcacaatgcatgcttaattaattaaggggtggagagttagtacgtatctacctcatgacaaatcaataggagcagcatatataaagtgctcttcgccagtatccacactgatgatcacaaaatggatttgacctggtaacatccctgcagcctccccttccagagcaaatttcctctcctcccaagaaccagtcttggatgaaaacacaggtaggatcaatatatgtccacggcggccattcgcattcctcgcattcttcttcctcgcgcagcttgtaaggaacatgatcgggcactatgaacaactcatagttgggcgtaagtgtggggtcgaacaccaggtactcgttttccccatgcctggaggtaggagaggaggaggccgttgcagtggcccttgacgtattagatggggggcatggcggcggcggcggcggcacggtgtagtcgaggcggcaggagacggcggcgcccgtggtggggcgggagaggaactgggtgtgaaccgcgagtcgtggcagttgaggaggatgccgcccagcgagagcgggaggaggtccgcgcgcaggaggcggcgggagtcgacgacgagcgcggcgccactccttgcaggcgcagcgggacgctgcgcgaggccacgcggcgggaggcggcggaggacggccgcgagcacgtcgtcaggcagcgacgacgccacatccatcgcctcagcacgtcgtcgtcgcttgactatcgcggcaaattggggaattctttttcgccaatgcagttgatttgggctcaaccgctcaagccgcgggaggtggtcgtggctcgttgccaagtagtgtcgctgccagttaacgggccggcccattaggctttctttttttccattttaaaacgattttccaatcatatattgcgagatttcatcagaacatggatttgtattcagtttttaaacaagtttaaatgaagtatttgtggggtactccctcggtcccaaaaaaaccaatcttaggtacgaacctgaacgcacgtatgttcatattcatatctaggattgagttttttctgggacacaaagtgtacacggtaccccggatatctcatagcaagccttattctagcaaatactgggatactacatctcgatgattccgaatatcttcgggcttgttcactttgctactattttcaaccttaccaagttttggtattgtcaaattttggtaatgttgccaaaattttggcaaggttgttaaattttagcaagatttcatatgtacgtactaaaatttggcaacaaactaaatgcaaccacttttttttaactttgccaaaaaaaagataaggttgaaaatggtagcaaagtgaataagcccttctagatatagaataggagaatttagttgcaaccgactagataaccttctttttaatccttcctatcatcttacataagagggggcagagtcccgagattggggtgactccagacgatagatacaacacatcataatggcgccatgttcatcatacacaaacccttaggcacaagataatcccatatactgatacacaactagattagagtattacctcaaggtttatgtgtcgctatcgttatgtagatccaacacataacaatataaataatattgttgatccagataatcgacggtattgtactaaaatactgtaatgccacgagtttgctcggataggacatgaacccatgcggatgagagcttgcaggccgcgacaacacattctctctgaacgaagttgccacaacttcgtgccatccccctgtgaagtcgaggtgaggtccgggttcgctgtttacccacgagatgtggtgacgacatcacaaacacatcacgtgaattcaccttactaatatatcatggtgtccttttggtttattctatattatttacacttgaatattgtatatattagcattgctataattgtggtgtttacaatttattttagtcggaccacctatacactaaatcctagatataccattggatacaagtatttctactccctaaatagttagtcttactagcatacttttttaacctcttggttcaaactaagatgtgagatgttttctgccagacaacatggtgttaggaattttgatgtctcgatttggaaatcgggaggagatcgtgccaaagaccatttccatccgttgtctatgcgcaatcaccgcgattaaattcgtgttaaaatcttccttaactacacactacgatcggtggtgccatatcctttccttttggagctgcccccaattccctcgataccaaaataaaaggggaggccagacaaaaaacgaggtgaagatctctatcttgctgccacactaaaccctaatcccgatctgaacaagtgctagaggggggaacgtgtgtccaaccttggtcgatgcaagtggaggccgaaggaacgctgtcacgtcacatcccatcaccggcgaccccttcgggatcaagccggcgatttggtatgtgctgctactacgactactttgtctacaccgacaaacaccggagcggcttgaggggcttcaacctcttcttccacatcggtcatcaccgagcaaatcatgaacatcgtgctaatggcttctcaaggtacacataaagttttacctctatctttcgcatagggtgatcatgctaggctaaagaattagattagtagattagataatttacacaaggttcgacttatcaggtatcaattttctgattgactttcgtgctttggtgagtcatttgagattcctttgatgacctatgttatgttgaagggatttctggtgatatagttcgattgttgtctccaatgactatatttctatttcccacacgagatagcatgatatctaatatttgtaacacgtcatcgcttcatatatattaactattattctaccaaaatactctaaagtttagagtacttagtccaaaagaacacatgatgagcggggcatactcaccgcagccataaggcatcaaaaatacaaaacccaaccaaagctgacgcttgaacaagacataagtggaattatgttttgttgccaaccaatcatacccaaagtcacgcctagttggataactccaataaaaaaggaaaaaaaagcaacgctcaaatcagggataaacttaaaagcaattcccgaaatggaaatacatttttaccatttcggatgtaaaatgataacaaaatcctgctcatcaacccctttcaaaaaagatttataccaccaacacagaaaagttaggtgtagaactcagctttcacaagcactcctcttctatcatttttcccccaaacaccatagcttgacttatgtggttatagtacgattattgtctctaatatgtagatttataatcttcacaagagatggcctgatatcgatatagctaatattttgatataactaatatttacacttacagaacttcatatatattagtttttccactaaaaatactttaaacgcttggttcaaaagaacacacatgacacacaatggcgtgactcactacagctatgaggcaacaaaacccagccaaaagctgacgtttgaaccaagagaaaacctggaaacaagtgaccaacgcaatgcctagctggaaaaggccagcaaaaaaaggaaacgacaacgttcgaatttggaccaattttagaagcaattcgtcaaacggagcaaaacctgaccaatttggatgtaaacgaaaacaaaaccccgctcatcaaccccttccaaaaaaaaaaaaaactcctaccgtttttaaccaaaaatcctcccgagtcccgatttccaaatcccccgtgtgaaacggtcccgaaaatttttttgggcgacgcggctcccgccaaggaaccccgccctccgctccccgtttcccattcatccattccacgcgcgcgcggccgccaacacaaatcctccaaaaaacctgaaactgccgccgcgtgctccaccccacaccccccccccccctaaagcccctcccccgcgccgccacgctcctccgcttccgctcgccctgtcgcgccgcttgcttcgcctcgtgacaacctcgcctgcgccgccgccgccgccggcgagggggtggggggtgtggtggtgactgtgggaggcgcgtttccggtttgctccgcgggcggcgcgtcgacgcgtggcttggtaagcttgtgtggtgatgtaggatttgttaatttgttgtttttttttccttaccccgcgtgttgtagcggcgatgcttctcgatctgtgtctggttggcttcgtacgggtgattttgtggggtttgggcggagggttttggccggtgaaatcgtgctgctgctgctgctggttcgtcaggttgcgcgtccaggtttgggggatttgttcttcctggctgtggaaagcgttcacggagcggatttgagtcctacattgctggttgctgttcgtgctgtgccttaggaggagatttgataggaaacattttcgagatttcggtgttttgctgcggcggagcgttgcttcgagttggggaatgatggattaccccgcggattcgggggttttaggggaggatttgattttaggaggggttttgtttagcaaatccgttctgtttgtgctggttgatgtgtgatttaggggcaaattctaggcgtgagggatttgtcgctggattagccagcgaaatcctgtctactgttacggttcccctgttttttctcacttggtaggacgggacggggcgtgtcctggtggaggttgggattaatccatctgttgcctcggggaccgtgccttccactatccccggatattttggtcgtgtttttttaatttcgcttcacaaagtggggtttctgatgtgcgctctggagattcatcttggtgctggaatcgccgattcgaggctgcttcggcgtgcttagcttcgtctgagggctgaggccaacccagatttggggctgcttcgctatgcttcgccgcgccgccgccaacgctgcctatttgtagtcctactaatcttcgtatggtatgttatgtaagtatgttgtggggtttagaagattgttttgatgaagtgtggtttggtgctgtttggctgagttattaatcttgttgccatgaatctgtccgacgtcctctttaatagtagtgttgagtcgctttccccaaaatagtcaacttctaggttagttaactagatattttccccatctgataattattctggcgttaactgcaaagcaggggtagcgaatctgtgggtggattttttatcttcatcaacaattgttcgcggcccttggtacaccgccgccaacgattggccgcagctggtaaccttgttcatcaatctacaaggtatttctgtgatggattcactttctatttatagcaaatgagttttgagtgatttatgttgctatattgtgctgatgtggtgattttgggtttgcgattagtgggttgttgagatgctgggcgccttatttgctacctacagttgtgcaacagtagaaccaaacgttgtctacagcaattcgttttagagtttcttgttggtattaattggttgaatgtgatagcatggtttggaacattggactttttttgtggttgtttctgccactacctttctctgtgtgtttactgtattcagtagtgctcacttgttttccctgctttcctatcttatggtggaccaattttaatcaaactttggggttatcttaaggtcagtgatgttttaggaaaaatcactaccttaccgttggttggctcaatatgcgtacttatctatccattcttcattatcagtttttgtaatctgctggcttttgtgtttgtgaactaaattgtgaatgggaatatttttgtattagtgagtacatgattcattgatttggatgtgggttttcttgacatgggtgtgtcatgacctacttgctgtcatttctagatgattctacacaattattatctttactttccatgatttatgttaataatttgcttttgcgcaacgaatgctactactttttatcatagtgactaaatgaactgcaaactgcacaagagatacatgttatgcatcgtttccgtgctactccaaaatatagttaaacagacaaatagtatgtattgaaactaacaatttcacttctgttttggatgtttaatagcatagaattataccttgcaaatatttgcttttgataaattatgttgctcattcgatctttttccatagttaatttcaaatggtagcaagactactgcatttatgtgctaatatataatctacatgtctgactaattttaaatttacagggagatatggtgaaaagtccgtgttctcccgttaccacaggtcttgttcttaattacctcgtcttttacttgccctgtatgacaatgaagtgtcacctttcaatttatggcatgacattatgttcctttaccgttaccaggaataccttgtgatatacactaattttacctgtatagttttttacgcctttgctttgactttgagaatgtaaatctgtgatggcatttgactcttgtttgatagatgatatctgccacacgtcatgtattttaccagttcgatcaagcgtgctatgatttattttttggcagaagaccaggggtctgccctatcataacaaatatgcattttgtaaaatatattgtgaaaagggatggcatatatgcctatattgaccaggaatacacgctaaatctcccaccattctccctcttcctgatctgctattaaccaatattcattgaattatataagcacaagcattcttgttccacaacaacgatgcatttaagcaaagttggtgtctaatgctaaaacgtattaaccaaaattcactagtcaagttcagcatcacacattcacaatcgtgtaaacggagtaatgcacatgtttatcaagttgtcagttgtgtaattggttagaggtagatgtcttggggagccttaacttgaatagaatgcaaggcatgtcaagacatagataaacacttagccaccatcaccatcactgccgcagttatcgtctcttgccatcatatcaccaactggtggactgggcatgggcctaggcgtataatgcttgtggccttcccactttggttaagctgataattatgctgcatttcagcttaatctggtgttacattagcaaaccaattgcaactgctctgtgttgctcaaaaaggctgatccggaggcggcataggccattccaaagggaatcaaatatcgcatctcctcgtcactgctgctagcaaatcgctggtggcagcggcattgccttctgtatcaaccttattttttgtgttgctggtggcatacggctctccgtaggctagtggtctttgtggaactttcttgccactgatggggtagagatcttggcttggcagttcattggttggatctagcgatgagatcatgctgagacataatcttgaactccgatacctcttctcagggtgaaaacctttgttcttaccatcattagttggagctggcctaattgatattcccttctaaaggcatcgaaataggagaattggcccatgggagcagaggtgaaaaccttcgatctaattttcactgattagatctagcaacgatgatgcgagccgtgtcccttcttggaggtgttgtcatcaatactaaagccccaaggacctctttcaactgttgtcctcttgtggttggtcgcctaatggtggtgatggcgggtctacgtttcttttttcttgaccagtcttagcattgacaagtattgtgacgttatgtttttttctggtcttggttgtgtgcaatcctagttgatgtagatgttggaatttacactttcccttatctaaacaacaatgccttgggttgagtggcttattaacaatgggtagcatagtttaatcacatattggcttaagaaatcttttgttaggaaccttggacagccctctgaaaagcattcttattacatacttataaggtaaattaatctcaatgcatgttaccttgttcaaaggaaataaattaacaatagtttggccatcaaaagttccggatctatgcatcaacaaacgggatcgaggtaacactgaatgctattttgaaaggttttaacaaggcagggacaatgttgtccccgtggtcccaggttgttccatgtttccggtgactactttttgttagtttactcatcatctgtatgttaatgcataaatgcggcagccaacagattcggaaagagtttttgccatccttgacaattgcccaaatggccaattggcatgcttcgtgagcatgccatcgatcatgattcctaggatttgtttgacttgtacatgataccataacggtaggttatctatgcgttccaccagcaagtttcccacaaaacatggcattaaatgtgcattatatccaaaacagaataatgaagtcttgttaacttaagaaatgacaggtgttgctattattcacaatgagtgctggaatcgctctaaaagtggattgctaaatttctacttatttgaaaatggcttcttgtcacttgtgccattttgcatttggaaaatgcatatttcaccgttggatgtacatcaggaaagcagaatagtaatagtagatatatatgttatttgctgtgatgttgccgcatttaatttctaatgcctatgtttttcaagttactgatagaaagcatttgttatctgattgtggtttatttggtgaaagtttattctattatttattccagttggtgaaccaatactttcctgttttgtacactttatgcatcctcatctttgtttttccccctcaaaaatcttcatctttattttttgtctttcatgtttgagttttacatcctaaagtctttactatattccagcattcctgtttcttaattgttgattaacatgctgagttgtggggttttcaggaaagaaaaggtgcagagcaaagccacaaaagaaggacgaagatacaactgataaaggcaaactggatgagggacctctggatgctacaaaagagatgaatggagttggaaagggtgatagtcgtgctgcctgcaagaggccaaggagagcagcagcgtgctctgatttcaaagagaaatctgtacgcttatctgataaatcctctgtggtcgcgaccaatggaaataagatggaagaggaggaaatggatgccgtaaagctgacaaaattaggaccagaagttcagcgaccttgtcggaaattgattgatttcatcttgcatgatgctgatgggaaactacagccctttgaaatgtcagaaattgatgattttttcatcacagctcttatcatgcccatggatgatgatttggaaaaagatcgtcaaaaaggagtgcgctgtgaaggatttgggcgaattgaggactgggcaatatctggttatgatgaaggtactgcagtagtctgggtctcaacagaagttgctgactacgaatgtgtgaagccagcaggcaattacaaatcttactatgaccacttctatgagaaggcacaggtctgtgttgaagtttacagaaaacttgcaagatcagttggtgggaatcctaatctaggtctggaagaattgcttgctagtgttgttcgctctattaatgctatcaaaggttatagtggtacactgagcaaagactttgtgatctccaatggtgagtttgtatacaaccagcttattggattggatgagacagcaaacactgatgatgagaagtttgcgacactaccagttcttcttgctctaagagatgggtgcaaatctagagtggaagtaagcaagctgcagcctaacatttcaaatggaagcctgaagattaatgatgcagagtgtaaagaggtatctgaagatgatgatgagaagttagcaagattgttgcaacaagaagaggaatggaagatgatgaaacagagaggtaaacgtggaacaacttcccagaaaaatgtctacatcaaaattagtgaagctgagattgccaatgactatcctctgcctgcatactataaaccctctagtcaagaaatggatgagtacatatttgacagtgaagatagcttctattctgatgtgccagtaaggatcctcaacaactgggctttatacaatgcagactccaggcttattcctttggaactaatccccatgaaagcaggcgctgaaaatgatatagttgtctttggatctggttttatgagagaggatgatggaagttgctgttctactgctgaatctgcaaaattgtcttcatcaagtagttctaaccaccaggatgcaggcgtttcaatttatctgagccctatcaaggagtgggttatagaatttggtggatcaatgatttgcataaccattcgaactgatgtggcctggtaagtactccagccagatctgttcaatgtggatttttttctattacacaatctttttgttgggaaacaattttccttctgcatgctacattgatgcttacatttggctcgtgatttcaggtataagctacggcaacctacaaagcaatatgctccttggtgtgagcctgtcttgaaaacagccaggctctctgttagcatcataactctactaaaagagcaaagtcgtgcttcaaagctttcctttgctgatgtcatcaagaaagtggctgaatttgataaagggagtcctgcatttgtatcatctaatgttgcactggtcgagagatatattgtggtccatggacagattattcttcagcagttctcagattttccagatgagactatccggcggagtgcatttgctactggtcttttgatgaagatggagcaaagaaggcatacaaagttggtcatgaagaaaaaggttcaagtgatgagaggagagaatctgaacccaagtgcaactatggggccagcatcaagaagaaaagtgatgcgtgcaacaacaaccaggttgattaacaggatatggagtgattactatacacaccatttccctgaagattccaaggatgcagatgtgaatgaagctaaagaaattgatgatgaactggaagaaaatgaagatgaggatgctgaagaggaagcacagattgaggaggaaaatgtctcaaaaactccaccatcaacacggtctcgaaagttggtatcacaaacatgcaaagaaattagatgggaaggtgaagccattggtaaaacaccttctggagaagctctatacaaatgtgcttatgttcgagagctcagaataaatttgggacggacagttgcactagaagatgattcaggagaactggtcatgtgctttgttgagtacatgtttcagaaacttaatggagcaaaaatggttcatggaaggctacttcagaaaggttcagagactgttcttggcaatgctgcaaatgaaagggatcttttcttaaccaatgaatgtttagaatttgagttagaagatatcaaagaattgatgtctgtcaatctccaatcattgccctggggtcacaagtatagaaaagagaatgctgaagctgacaggattgagcgtgccaaagctgaagataggaagaagaaaggtttgccaatggaatatttatgcaaaagcttgtactggcctgagaagggtgcatttttctcccttcctcatgataagctgggccttggtaatggtttctgtagctcttgtcagcagaaagagccagattgtgatgaattgcaaatactatccaagaacagcttcatttacagaaacattacctacaatgtcaatgactatttgtatattagacctgactttttctctcaagaggaggatcgtgcaaccttcaagggagggcgaaatgtgggtctaaagccctatgtagtttgccatctattggatgtccatgaacctgctggatccagaaaaattcatccagcatcaacaaaaatcagtgttagaagattttacagaccagatgacatttcatcagccaaagcttatgtttctgacattagagaggttacattctttgtcctccttttctatgtttaaattctggtgtcatcattaattcattgctgtcattgtttgcaagatatttctccttacattggctttgatactttttctggatcaggtatactatagtgaaaatatagttaaagtgcctgtggatatgatagagggaaaatgtgaggtcaaaaagaagatcgacatctcaaactcagatgttccagtgatggttgaacatgaatttttctgtgaacatttctatgatcctgccactggagcattaaagcaggttagtcaatagctaatgtaccatttttattcagcaatgttagtttccatagttaactgaatgtgtgctgtatatatggaccagttgcctccaaatgttaagctcatgtctgtgcaacaaaaggcaactggcgctttgaaaaagaacaaaggaaagcagatctgtgaaagtgatcaggtggattcagataaatgtacaaaggtgtccaaagagaaccgtcttgcaactcttgacatttttgctggctgtggaggtttatcagaaggactgcagcaagctggtatgcactttccttcaataatggtgtttagctttatcatcaacatgtcggccatcagactgatattttattaccatttaaattctgtaggtgtatcgtttacaaagtgggcgattgaatatgaggaaccagctggtgaagcatttaccaaaaatcatccagaagctgcggtgtttgtggataactgcaatgtgattttgaagtaggtgcaccgtgcacttccttgattttttctgtggttttctttttacctatatagctcaatagggactgttatatgattttgcagggcaattatggacaaatgtggagatgctgatgattgcatttcaacttctgaggctgctgaacaagcagctaaattttctcaggacaatattatgaaccttcctgtccctggtgaagtagaattcataaatggtggtcctccatgtcaggtatattattttgctatacttgatggaattttctttgcacctaggcaagcaaattgtttgcacttcaatacttgtgataaatgacttcaattttgtaatttttttctcaactcagggcttttctgggatgaacagatttaaccaaagcccatggagtaaagttcaatgtgagatgattttagcattcctgtcttttgctgaatatttccgccccagattctttcttttagaaaatgttaggaactttgtttcattcaacaaaggacagacatttcgactgacagttgcatcccttctggagatgggataccaggtaattattcttctggttatacatacttaaaatgcctatgtacagcatttgttttgaatcttataataaccagaagctgtttacttgttgcttaggtccggtttggaattttagaggcagggacttttggtgttgctcagtccaggaaaagagcattcatttgggctgctgcacctggagagactctgcctgattggccagaaccaatgcatgtgtttgctagccctgagctgaaaataaatttgcctgatggtaaatactatgcagctgcaaaaagcactgctggtggtgctcctttccgtgcaataacagttagagatacaataggcgatttaccaaaggtggagaatggcgccagtaaactcctacttgaggtaaaattgcttctcctatatggctatccgctccattttatcctgtttcttctcttgatttatatgctgaatgaatcccctcttttgtaatgcagtacggtggcgaacccatctcctggttccagaagaagattagagggaacacgatcgcgctgaatgatcacatatctaaggagatgaatgaactgaacctcatcagatgccaacgcattccaaagcggcctggttgtgattggcatgacctaccagatgagaaggtaaatgccatctaccttgcggttgcattcacttccttttgtgctcttccatacattccttgcatcagcggaatgttaaccattatgagcgtgtgcaggtgaaactatcatctggccaactggtggacctgatcccttggtgcctgcctaacacagctaaaaggcacaaccagtggaaagggctttatggtaggctggattgggagggcaatttccctacttctgtgacagacccccagccaatgggcaaggttggcatgtgcttccaccctgaccaggataggatcatcacagtccgtgaatgtgcgcgatctcaggtaagctgctattgctatccatccattcaacattctcttcctgtcttctaagatattgtgaatttggaggggagtcagtactgaccgtttaactaacctattcttgtctgcagggctttcctgacaactaccagttcgcgggcaacatccagagcaagcacaggcagattggcaatgcggtgcctccacctcttgccttcgccctcgggaggaaactgaaggaagctgttgatgcaaagcgtcagtaggtgctcagagtccttctccgatgatcgagggagatgattctcccctgaaaagaaacaaacaaccaaacatatgagtgtacttattttaattgtgcgctgcatttaactttgtgtgttgattaagattttagtcatatagatccttggtaaccttgtacattttagaggttgtgttgtgattgatacccttgattcaggggtatgatttagtggctgtattcagatatttaaacaaaataatactagttagtgatggttgaattgttaccgtgggttatctggaaattcttgttttggtttgttcaggtctctaaaattttatttcagtttagtttggattttaagaattgaggtatattctcatttggctggatgcagtggaatctagggatttccatgggtcatggggtgaaggttttacttttgcatgaaactagaaagctagcccgcgcgaatacgcgggcatgcattttatttagttttgaaaatagttctaacaaaataagttgaaactaaagtaaggtatttttttaattgaattttcattgtttacatttttcttaagaagtctcgagaaatttttattgcttgtaaatttattcttttaccatccctgttagccctctttttaattgatgaaatatacatatcttatatagcgcttctcagtaatatgttagaccttatggtattttaaagaaaatgtctagtcaacatgaatcttaaaataataatttattatggaaaaatataacttttaatcatattataataagaaaggatactaatttgtattaccaccttagaggcttatacatgtaggttgtggagaaacccttggagctacttaaaggataggaatttactgaatttgaatttgttgatttatcattgactttcatctcttggtgtgtttaatatgactcatatgaagagaaatataaaattttggaaagaataaaatatcattatgttgtaaaataagctatgtttttctgtaacgaaagtagtagatttattcaatactatcttacgggttaagtgctcaactaaaatagttgtatacgttacataacaggttaagcacttcactaaaatagttctttgtaaatggattgcaaaagttattttcaaagatgacccatgagtctgaggcaaaaggctcgccacatagcaagctacacatttgagccacatgtgaaaagaatgctcacaaacaatcatttgtgcagtagtgtgattaaaataattatttatacaattaaaatgtttaaattcactatgtaaattaatggtacttgtgcccatattattgtttgccaacaatcgatagaacttgatagttcttttcggtatatagcaaaattagctagatattttacaactaattattgtatttcgttgctgagatgcacatgctattttttttctttatgttgcagtttcttattgttgatgaactgatgcctgggtgcatttgacactatacatattccaaataaaaaagtctagcggaatctaaattgatttcggattgtttcttgcatagtgcatgagacttcacataccccacgaatataatttcataactaaaaataactcggcaagcgtgattattattgtagtttggacttttcatgattgccgtcatgatttaaatatttttactctaaaatttataattaaacattaggaatttatatgctccaaacaatcactctttgtaactttcttttagctaacgtgcattaggaatttagtattacaattatgggtaaagtgttacccttaaattcattatattttagccacaacaaaaaggttaaaaatcctgacggccttaagagtataaatgtattagaattttgttttttcttcctcccaatatgtaatgaatttgaatataagaccttacatatagatataatactactaaaagtacaaacaaaaaaaattccataatttttgggatatataactaaaacattatatgttctcaaataactgatagtaaaaaaattgttgttagacttgatactgagatttgtgacaaatgaagtgattattaagaatatggttacatgtggcagttttttttgtaattaatatataggtaatatcgatgctatatatattatttatagaatagatacatcatatgttttataaagttttaaatagtgaataactgaagaaaataaggggggtaaggatagatcgctttgtaggtgattttttttctttggcaaatagtgggtaggtaattttccttacgtacatatataactgctggatatatgccgatggggataggaaagggaggtggaaaaaacaattctaatagtaatgaaaatagtgggtccagctgtttattaaagtgcaacgtgatggtttagcggtgtttgtaggactctcatatgacgacttaatagcgtttataggaagtttcatgaattttcagtatataatagaagacagacatatagatagataaaacagtccatatggttttaaattatttatttaattgtcaggaatataaagaatcaaactaatcagaaaatcaacatatatttttcaaaagttaatacatgcagatccactcatgcatgtagccctccatgaggaggacactgacgtataaccatggaagtctatattcaactgaagatataaatttaatgttgtttagattttattatgctttagatctcaacaacttacagagaaaagagagagcagatagcacatatacgtgcttgagccgtgagttggaattaatcttggctggtcgttcaggttcgtggttttttacaattaatcttggctgtgagttcttttccaatcatacgtaattttttgtgtttttttcttctttatttagatctttggctttttttttgttcggatggattaattgtacgtaaatattttctctcgtacgtgaacaggatattaggagtgagagactattttctttatagatctaataatttattggtctaaaataatgggtccaccactttaaatgaaaatcaaggttacatgttttacttttttttaagaatttctatgattattttctaatttattatagcgccacgtggtggcatagaagcgattgtagattgccacatggtgacttgagagcgtttataggaagttttatggacttttagtatataatagatagatgaatggctgataaataacagtttttaattggtttgccctcgtatgagggttgcttttactctggtgagaaagatcaaccaaatttcaaactcacgacatctaacttagatgccgtattgagttggagtactcagtatagtgtgtttgggatttcttcaaaatctgaatatctgattttttttttaaaaaaatgttgttctccgcatgtagtataactttgtttgttccatggtgaaaagttttggcgtgtcacatcggatacgcggacacacatttgaagtattaaacgtagattaataacaaaacaaattacaaaatttgcacgtaaagtgcgagatgaatctattaagtctaattaatctgccattagcaaatatttaccgtagcaccaccttgtcaaatcatggagcaattatgcttaaaagattcatctcgtaaattagtcgtaatctgtgcgattagttattttttaacatatatttaatatttcatacatttgttcaaacgttcaatgtgacagggtgtaaaatttttgggtgaaaactaaacagagcctcgatatgcctcaacaaaatgtaatgcattcccgtatcccacacataacaactgggtttttattttacctattcatataagcttcatgacaatgattttcttttcagcggttacaaaacaatcttgccaggtaatgctaatgccatctcttcaccaaatgtgaaacgatatgttgcctagtaattgcagtgacttgagtagcacaccaaggtcttgagttcaaatctccatagaagtgaatttcagattgagttatttgagggctagttccttgttcgataggctaagttcctattaaaaaaatgctgcatatatccgattggatatagagaccgggtaaaaaataccattctctaaaaaaaaatctcttcactaaatgagtgcagtgccttgctttgtgtttgccaattgaagttagcaacgctaccccattgcacaaaacgaggcgacggtttaacgtataattaattaagtatttaagtagtagtgaaaaacttaaaaaaatggaataataataatatggtttttaaaacaattttattaaaaaaatatagcgtttaacaatttaagaagcggcgaaaaatataagaggtgaagtgaggaaaacagagtaaagaacacagtcaaaccaagaaaattctatcaagcctagcatatatccagacacatgcgcagcgtgttcgtgtctaccaagtcgatatctgcggagccacacgaaccactctctgtacacagttacacagcctacccgcctagaactacaagtaaagtatctctatataaggcaatgaacgcgccgccgtcaacaacattccatttccagaacctccctgctcccgtgcgccgcgcgttccaccaaccccgctcacctccatctccaatggcggccgagccggccgatctgtacgtggaggtggaggagtccgcccgcgacgacgacgtcgacgtcgacggccgctcccgcgtccccgtccccgtcccctccccctccggctgggagctcccgccgtgccccgtcctgcgcaacgtcttccgccgcctcccccgcaacccggacttcgacggcgccaccttcctctccaagccatggctcgagctcccctgcgacgggcccatggtgatcgccgagccgcagcggctcatgccggcgctgctgctcccggaggggatggcgctcgacccggcctcccgcgccttcctcagcctcgccgacgggcgccgccatgacatcgcgttcccccacgcccgcggcgcgcgctgcgtcgggagcacccgtggctggctcgtcatggtcaggaagggccccgagggagtcgccggcgccgccggcaccgccaccatccacgtcgtccacccgctgctcccgcacctcgagttccgcctccccgacgagttctccctcttcgagatccaggtcaccgcgcccgaggagcgcttcctcctgcgtctgacgccgtccgagaaggcgcgcattcgtgcgggcctccccgtggaggagacgggcgcggagttactgcagcgcgtgttcaagacggcagaggggttgcgcccccccgagccctacatcaccgatgtcacgctctcgtgcagccccgccagctccgacgacgactgcgtcgcgctctgtgtctaccgccacggccgttgcctcgccatcgcgcgtcccggggacgcgtcgtggacgcgcgtcgaggtgggctgggaatacatggagccgcacgagtacaggcgcgagttcctgagcgtggtgcaccacaagggcagcttctacgcggcgtgctacgacggcatggtgctgcgcgtgtccatcccgccgcccggcagcgcgtcgccccctcgggtcgacaagttcgcggacgcgccacgcagggagagcatccggtgggcgcggtggtggctcgccgtggacaccgcatcctcctccgccggcggcggcgcgctggtgctcgtcgcgaccgaacggcgctggtggaagcagaagatgtacatgtgcgcgttccggtgggacgacgagctgcggttctggcgccgccccaaggacttgggcgggcgggcggtgttcgtcgggcgcggcacggcgttcgtcgccgacgcgcggcacctgccgtggtgcgccggcaactgcatctacttcacccgcgacgagcgggtgcgcaccggcgacgacgtgccggtgcggtgctgcgacgtgcgccgccagaagctctactccgtccacaatgcggggcccaaggtggcgatggccccacctgtctgggtcatgccgttccatgaatagcgcagagattttgcatcagagagatcataggtactatgtggattgtggtgatgcttgatgtaaattctctctttgagacttttggctgaatttcgtacgaactacgtgtatgtttgtcataggaattgcagattttagatcgcatttctggagtaaatttcctgcaaactgtaggcaagttgttatagcaattgaggaattctggatattgagaacttcgtgtgcctgtgcaacttgatagtactatgcattgagctgacacatttaagccggttctgaatcttctgtgaattttgctctgttttctcaccttttatacatgctagtttttcatatttgaagatgtgtaacattgtgttgtgtggcaaaaatatgtggcagttttcattgatacggtggtgatattcactagcctaggtcatattatgcatcttttggtgatgtaaatagtataccacccagttaggtctatgtcaacaaaatgcaatcaaaattattgtggaatactccataatttagtgtgtcgttcatgcgtttctaaaagttgagacaacaaataaccgatttgtctagtttagacaaaaaaaaaaagactccaaaaatgtttgatagccaacagtataaattttaccctcaatagagttacctcgactgctaggatgatttcaatacgtatttcatggccctccagttatggtggaccgtcctctcgagtctcggcctcccacattgctttccctctgatgctgtttccttccatgagtggcactactcctgccgactcaaagtttggagggagcgtcgtcgtgggttcaacatggtcgtgacccttggcgcgtggtctatttggaaggaacggaacaaccgcgcgttcaacaactgttctcggccctggttcgaggtggtcgtaggcatgtcacaagaggccgccctttggcatcttgcccatcccctgttgccaacgctttcttcgtagcgtgctaggttgtttggtcatctcattgtaatcgcaagaataggtttaagtcctccttttcttccaacccccctccccctcatttttttgttttgcctaccgtgtaaattttattcctcttaaaaggtgcgcaatctttttgcatattccaaaaaaaatacgtatttcatggggaaaaaaacatggacactaaggaggaacttagagtcgacaatttcgactagagttgagcgtggcatggagattttatttaagaagaaataaatgtggctttgtctatagagttttgtttaaaaaatatgtggcaatatatatgactttaggggaacattccaaagtcatgtgccgatgtatttagcttcttccaacatagtttcatggcaactgctaaatcaaatactacctactcttctccatagccgtatctccttgctctaattgtgcatggttaccaaccaaccgaacatataatatttcttcggattttggagtgggattgcagaactttcaccggaaatggtacaatttgtagacaagacagaaaacattcctgggcttcaacgagaaattgaccacgcctaaatgacttagcgcaaaaatgacgcagcgtaaatcaggtgtacccgtgggacccacacgcagtgacacggttttttctcgaaactgtgcgcctgtgccacaacgccgcgcgacgcactctacacagcgtccgcctatataatgcctggcgcgcaggcgcagctagcccaccaacccatcgtcacccacacaatcgcgcacatccgcaacaacgttaatccgcacccttcattctccgccgcgggcgctgcctcgccaccgcgtgccgaacatacaccaccgcacccacatgttcatctcgcggaccacgtaccgccacaggatgtacccgtaccgcagcctccctccgccaccgcggccagcgtggcccctcgcctgttgccccatttaccaaggaaccaaaaaatacttccaactcagcagtagcctagtatttcctaactcttactcatgtttttcttgtattttaacatacaatccatgtttgtactacgtttaataccacaataattcaaacataaatatttctaatgcatataatttaaccacacttaaattcacaatttcacacaccacaattcaaatccaaaatcaaaattttcaaacatgtaaatgcggtgtgagcataatgccatatacaacaacatgcaactaagattcataattcaccaatgaaaatgaaaattgctcaccaacatgtaatttttttttgtctccatatcaccacaataagctatgtgaatccggtgatgtattatataatttaaaaataacacattctacaaccatgaatggttcgatcgtaaaaataacacatcttacaagaatgaatggtttaggggctgtgtttaggtcctgctagagatgctcttaaccataactccataaacaagtatgaattgcagtaatgcaaattggacccaatagagtgacagtgtgtcagtgtgactggcaaccaatcttgtggcatcgataagtggatcaattagcctattcaagtttgtttctcaatcttcattgcaagcaaagacatgaatgtcaatgagacagtagccgtggaaaagttcagtgaatataccttgggaagtttatcaaaatttcacataaatgtatgtgtgatttcactacttcagggtcctcgcctacaaccattttggttgtggccaccgaccagcaattcgaagtgtgatttgaagcatcggccgcaccatgaaaccaccactacgactactgatggcttgctgagttgttagccctgtgatccatctcgaggatttacaatgcgaaacgcggagccacgactcgggataattggtgcggatgaagaagaagaggatgccattgtctgaagttgcagcgccaacgatggagcagacgtggtggcatctccggcgtgcgcagtcgatgtggttgctgctgccgcctcctcatcagaaccctgtggtggaagagcgagctgaacgggttggacttgccaagaattaactcgtctgttcatcgtgggagcgagcggggagtcacgatcccagtcaacctgcagatcgatcgagatatacatgcaatcagattgatcgatcgatcgatcaaacagcaacccagcagcatgtcgaatcctggaaaatggtgatcaaagaactgaagaacaattgattttgtcaggcaattatacctcgagcatgcgccactcgctccggcaatggacgtccctgacggtgccgtacaccggtggctggctgcggcggcgcgcgtcgtcggggttcatcagtaagcgcaccctcgtccccggagcgagcggcggcgagccttccacctcctcgcggcgcaccacgaactccgccgtgccctgccatgggcagtaggtcaccctgaacggttgggcggacgacgcgtcgagccaggcgtccgccacgtgcttgtcggggatcccgaccggcatgccgccgtgcggcttgcggcgcaccccgacgagcggctcgccgccggggcggcggcgcatgaagatcacggtgtccccgacgcagaggcgcttggccttgacgaacgcgctccagccggcggcgagcgtgtgggaggaggagcggcggtccgtgtcggcgtcgctccaggtgtggccgaactcccagcggccgccttgcaggttcgtcacgcggaggtccgggatccgcggaaggacgtgctcggcggcgctgggcttggggatcacgaagagggcgccgctgccgccgccgttcgccgcggcgtcgctcggcgacagcttcttgtcgaagaagcagaactcccgctggcctccgacggggtcgcgcgcggcgggaagcgggcggtgcgtgacgtagcagtcgcccggaaagagggaaatcatggcgtaggaatcatcggactgggcgtcgacagcgaatcgatgccggtgacggtgcagcgtaagcgatggcggttgtccgggatcaggcacgtcgtgcaggtgtggcattgctcggcgtggccttgggggaagtagtagaccgccgagccgacgacggggaggcggccggagtacggcgtggcgcaggcgagccagatgtcgtggtcgatgaccggcaccattcccgtcgtcgtcgtcggcggcggcggcctcggcagcgccattatctgaacttgcggggtggcaacaatggcatcccgaattcgcacagccgaagtagttgctgctggctgaggctgacgcaggacttgccaagaattaacttgtctgtgtatcctgtaggagatcggggaggccgcttgatcccaatcaacctgcacacatgcaccgatcgagcaatttcagatcaacgatcgatcaatcatctcaacatgcaacgatcgaattgatcgatgaacaaatcagattgggtaggaaggggatgatgagatgatgaaattaatacctcgagcatgcgccatgggcgtagatggtcgaaggtcctgacggtgcccgaaatcgattgggcgatctgcagcgggttcatccgcaagtgcaccgtcgtcccgggaacgaaagggtagaacggcgagaaggagaagccgatgtactcgtcgcgcgacaccacgaactcgaatgtgccctcccgtgggtagtaggtcacctcgaacggcgtcacgccctgcatcgccagccacacctcggacaccaccttgttgtcttcgaccccgggcctcgggtggtggccgccgcgcgcgcggggcgcgcgccgcaccccgacaagcagctcgccgtcgccgtcgccgtcgccgccgccgcggcgcatgaagaccacggtgtccctggtggcgaggcgcttggctttgacgaaccctctccagccgtcgttgtcgttgacgccgaggtcgccgagcatgtagcggcagcgcttcttgtcccagatgtgcacgaactcgaagcgcttgcctcgcaggtccctcacgtcgaagagccgggcggtctggtaggcggcgatgtcgagcggcggaaggacgtgctcggcgccggcggggaggacgagggcgttgctggtgacgtcggccggcgacagctgcttctcgaagaagcggaaccccggctcgccgtgggcggggacctggcgccgcgcggtcgtgtcgtcgtggctgcctggaaggagggagatggtggcgtacgcctcgccgctctcggcgtcgacgtcgaggacgaggtcggcaacggtgcagggcacggggtggatggggtccgggaggcgggagagcagcagcgcgggatcctcggcgcactgttcgatgtggccatgggggatgtagtagaccagtgtgccgacgccggggaggacgccggagtacgggacggcgcaggcgtgccagacatcccggtcgatgactaccggcggcgggacggcggcggcggcggcggcgtcaggcggctgcgccattgttcgatctcctccacgggaggtagtggaagtggtggaaatgtgttgaattcgaaattcgaattgacgccagcagatggggtttatatatacacgccacgccgccacctccacttcgttaacccttctcctttcgtcttgctaattacagtgattaatccgttattacatgtttctttcttgtcggctacgttttaaatgaccagttagttacaggcttacagctagccagcgtccacttgcacggttttttactgttatttcttttcgttttttctttttttttgcttgggttacctctctgcaaggaaaaatatcagtaaaaaaaatcgtctacattgttctggacggaggaggccagggttcaaaattttagaaatatcgaaccccgatatgatatttatttcggcagaaaattttaatgtttttaattttttcatgaattttaacaatatttgttcaaatgtgactaaatttcgttcaaaatatcggaccgaaattttgaacatatcgtcatatcagcgtcccgatacaaatacccacttgatataggaaacagtaaccgtcacctcgcctcgcctcaaacctcaattcgacaaatccatctcccgctccacccaaaacccctcgtcctctctcccggcgacaatggcggcggcggcggcgccgctcgccgacgacggcgacgggatcgtagaccgtgacatgtggctcgcatgcgccgccccgaactccggccgcctccccgccgtcggctcggtggtcttctacttcgtcgacggccacgccgctcagttttgccagttccccgcccctctcctggagcagctcgccgtccccggcccccgcgtcttcctctgtacggtggccgccgtccgcctccgcgccgacgccctcaccaatgaggcctacgccgagatcaccctcgacccggtcgccgaccacgacgtcccgcgcctggcccccgctcccgctcccgcacccgccgccgccgccggtggccagcagttgcgttacttcgtcaagacgctgatgatttccgacttcgacttccgcatccgcttctccgcccccatggctgacgccaaaggcgtcttcccgccgctggtcgacgccaaagcggtccagcccctcctcgtcaaggacctccatggatctccgatgacgttcgactacggcaggaagggcaagagagtcacgctcgccaaggtctggaagaaatttcgggacgacatggacttcgtcgacggagacagcgtcatcttcatgcgtcgccgcgacgacgacgacgacgacggcgagctgtacgtcggggtgcggcgccagcgcacgctcgaaaggccactcaggaatacgatgcgccggtacaggcctccgaccccgccccaggcggccgtgcaggaggcggtactagccgcggcgggtcacgcggcggccggcgagcggttcacggtggcgtaccggtcgcggaaggacggcgacgagttcgtcgtgccacgcgaggcggtggaggaggggctccgcgccagactcacctcgctggcggaggtggagtttgtgtgggccgtcgaggacggcgcgccgcccatcgtcgggccacggggcaaggtcaccgccattgccaccggacagctgtggcgaaatctcgaggtaatccattcttgacagcttcctgacatccatgccaatgaattttcattttgtttgtttgattgttttttgtccctcatcagcacagcatcatcatcgatttcgttcttgcatgcccagtgttactgttttgttcatgcaagattgatcactaccgcgtgattgattattactcaataattgcattgatatggattctactctgctcgttgtgcacatcttcagattgtatgggatggaaactcggagatggacatgagtgccaacttttggcaagttcgacctgttgaggaagttgatatttctccttctactcctcctccgaagaggctcaagaattgtgagattgatgataccgcctctacttctgtttccgtcgacaatggagatgagcaagttccaacgatgaggcaacggctagaggcgctgattcctgataacatctgaggccaagtacacctgcttgtgactaactcaagtaaaaattagttctgtcacttgcgagttgtgactttgtgagattgggtccgtcatgaatcagctttggtctgcatttagtttgaaggttattccgaatagtttcaaaattcggggaacaagtttgcagtgttaaatgtccattctaaatctgacggaattggaaaatggtgtacctgaaatctgatatctgaagaacacgaacagttcagatcgagatgacataacgacaattttatctgttagttacgactaatatctcaaggctgcttcctgcactgaacttaaaattcatagaatgcagtcaaatcctgtcaggtttttggacgccgacaattctgatgatcatagatcagctaatggttcaattcacgttgctagtgaaaacaaccaaattgcgtaaagccttggctaatgctgtagtttagcagatggtttgggacttgggacagtcactgctcaaggactaggttcagagttgagacttgagaccaataatctatgttccgttgttacaaaaaaccgttgcaaggacggcaatctgaaacttgttgccggttgagattgagtggagctgtttgacaatacgtttaactgggcatcagcttcagacacagacgcagttacaagcctctgtctgaatggatgctactggtggttccgactgacattttacattggtgaaattattgtttgatccattgtgcattactgctggaaaatgacttatctttgctaaaaatccagtgaaatagaacaaatcaactcaaacctgaactttctgaaaattcagactcgatatctgaattctgaactgtttttagataaaaaaacaaatttaactatggttatacgttaactagttgttgtttaatttgttttttcttgcgagatgtacaaattgaatttaaacttgtatatttataaagtgatatatcacatgttaatatatcttctcaatttcttttaaacttttttttttgactatttcaatggcatgcaagcaacgaagatacatccgtgcagggatcgaaatagttccccaacgccgccgcctccacttcgttaatccttttctcctttcgtcttagtaattacagtgattaatccgttcttacatgtttctttcttgtcggcttacgttttactagttgggctagttagttacagctagctagggtccacttgcacagtttattactgatagtatttctttccttttttttttttttgctttggttaactctgcaacgaaacgtctacaaattctggacggacgaggcggcggccggcggcgacagtataaaaccccaccgcccccacccacttgcaagcgagaacaaacagtaaccaacgcctcgcctcgcctcaaacctcaattcgacaaatccatctcccgctgcccccccccccccccagttcctcggcctctcccggcgacaatggcggcggcggcggcggcgctcgccgacgacggcgacgggatcgtagaccgtgccatgtggctcgcatgcgccgccccgaactccggccgcctccccgccgtcggctcgatggtcttctacttcgtcgacggccacgcagagcagttttgccagttccccgcacctctcctggagcagctcgccgtccccggcccccgcgtcttcctctgtacggtggccgccgtccgcctccgcgccgacgccctcaccaatgaggcctacgccgacatcaccctcgacccggtcgccgaccacgacgtcccgcgcctgctccccgctcccgctcccgccgccgccgccggtggccagcagcagcagttgcgttacttcgtcaagacgctgatgtcttccgatgccgagtaccgagaccgcttcgccgtccccatggatgttgccaaggacgtcttcccgccgctggtcgacgccaaagcggtccagcccctcatcgtcaaggaccttcaaggatctccgatgacgttcgactacggcaggaacggcaacagggtcacgctcgccaaggtctggaagaaatttcgggacgacatggacttcgtcgacggagacagcgtcatcttcatgcgtcgccgcgacgacgacgagctgtacgtcggggtgcggcgccagcgcacgctcgacaagccactcaggacgcgccgatccaggcctccgacaccgcttccggtggccgtgcaggaggtgatagctgcagcgggtcgcgcggcggccggcgagcagttcactgcgacgtaccgctcgcggcaggacggcgacgagttcgtcgtgccacgcgaggtggtggaggaggggctccgcctccgctccagattcactcccgagatggaggtggagtttgtttgggcccttgaggatggcgcgccgcccagcgtcgggccacatggcaagatcaccgccatccacgacactacatggatgtggcgatcagtcgaggtatcctgacatcgattaattcccctgattctcatccgccatgccaatgtttttgaagttttcttgtctgatttcgttcatactgcagattggatggacgggaggttcagagatgaacaagtacgccaacttctggcaagttcgattggttggttcggacgattttgcttctgctgctcctccccctcctctttctccaaagaggctgaagagttcagaggtagctacggcatctacttcttcatctccctgcaatggatgtctcacacattgatcgacttgtaaacgcacgcacacgttgatcgatgcaacaatgttcactatttggtgaattgatcgatgcaatgttcaatcgcttttcaggatcatctgcctccaccaaaggcgtcagcgtcagcggcagcggcaaaggcttctccctcttcctccgcgcaggcgcagcagttcagtatcacacgcgagatgtggcgggcatgcgccgcccccaagtctggccgcctccccgctgttggctcatttgtctactacttccctgacggccacgcctagcagtgcccgtcgcgtccaccagagccccttccaggcagggtgtttctatgtaaagtcacagctgtccgcttggatgcaacaagaaatgagctctttgcgaccatgtccctcatcccagtcgccagagaccaagccatccagcctcaggcgcccgctgatccaggtccaagctcccctcaagtgcagactactcttgtttcatttgtgaagcctctcacgtgcaccgatgctgtcaagaatcggtatcggttcatagtgcccaagagagagaccgccatgggtgttctaccccagctccaattgaacgaacacgtgccgctctatatcaaggacatgcacggaaaggagtgggtgattaattatacatggaaagagtacacccacatgctttccagtggctggataaaattcgcgaatgccaaccgccttgtcacaggtgacaacgtagtgtttatgcgcagcatggacagtggcgagagatacatggggctgcgtcgcaccctcaagccggagccagtgtcagttgacgaagtgattgaggccgtatggagggcggcgcgtctcgagccgttcgaggtgacctacctctcgcgccaggacggcgacgagtttgttgtaccgtgtgggattgtacataatgctctacgagcgaagtttaccccaggaatggtggtaaacttcgtatgggctgttgaggaggacaggctgccgaatgttgggccacagggaaaggtcattgccatagagaactatgcaacctcaatctggaggatgattcaggtattactgtattactctgaattttgctgcttgtttaattgcaaatgctttcctaaattgtgccttggatattaggcatcatgagtagttgtaactttgtaccagatctagtgctagcattttgtgtctccactgaaattgttgcattgtccatttttatctgacactgtgctgctcgccaggttgagtggccatcctgtgcaggaatgaacagatatgttaatttttggcaaattcgtgaagttcttggagagagttcctttgaggcatccacttgcattgtgagaagtcaagattactcgccggcaccacagaggaatttagttaatgcgcttcagcttcctgacggaacaaaacagcttcagcaaaacaagaagtctgtttcctcgtcatccaccttccgactctttggcaaaaaaatgacacctggcgtgccaccaagaagagacaccagtggtctttctggacaggtgagctcaacattgcagtaacaaaagtttgcattctcctattgatgatcatggaatttgtaggtatcattattcagccattatcttccccatgatgaggacgatggacaagttccaacgatgaggcaacggctagagacgctgtttcctgataacatctgaggccaaggacacctacctaactaaagatttgctctgtcacttgtgactttgcgagactgggtccgtcatgaatcatctatgccagctttggtctgaatttagtttgaaggttattctgaatagtttcaaaattcggggaacaagtttgcagtgttaaatgtccattctaaatctgacggaattggaaaatggtgtatctgcaatctgatatctgaagaacgcgaacagttcagatcgagatgacataaccgacaatttcatctattagttacaacttacaactaatatctgaaggctgctgcctgcactgaacttaaaatttttacagaatgcagccaaagacctgtcaggttttcggacgacgacaattctgataatcacaaatcaactaatggttgaattcctgttgctagtccaaacgaccaaattgcataaaagccttggctaattctgtagtttagcaaatggtttgggagcagtccctgctcaaggaacttggtgttttgccaggttcagagttgagaccaatatcctctgttccttggaccagtttttcagacatttttacaaaaaccgttgcaaggacgcaatctggaacttgtcgttgccggttgagattgagtggagatgttaaataactgatgacggcatcagcttcaggcacaaacgcagttacaagcctctttgtctgaatgaatgatactggtgtttccgactgacatttttacattggtgaaatggttgatccattgcgctggaaaatgacttatctttgctaaaaaaaacccagtgaaatagaacaaatcaactcaaacatgaacattctgaaaattcagacttgatatctgaattctgaactcaatccaactcatctcggtgtcgacctatataatgccccacgcaacccccagtccgatcgcacatacttttcagcccaccagcccgcacgctggtttctcattatgggcccatcagcccacatgtttgtttctttcttcattatttttggcccaccagtcctttctttttctttttcgcgggtttcggcccactatgtgtacgtgcttcctttccttttttttattttccgaaattttcaactcaaatttgattcaaattgtaaaactttcaaaacagactttgagaacttccaactccaatttcaaaacttttaactcagatcttaaatactttcaactcaaattttaaaaactttcatctcaaatataaaaaaatttcatctcaaaattgaaaactttcatacctaaatccaaaattttcatctcaaattttaaaaacttccaattcaaaattgaaaactttcaactcaaaattcaaaaacttttaactcagatttaaaaactttcatgtcaatattttgaaaactttcaaattgtattttgaaaattttcaagtcaatatttaaaaaattttaactcaaaatttcaaaagcaattatttttatttttattgagagattactgtagcattcgctaatagctatgattagcactaatcgttgggattagcgacgtcgcgtcatttcgctaagcggaggccgcgtgcgcgcgacttaagatactcgcgcgtgcgcgcgagctatctatcccccgcgcagtcacgcaggcgcagcgccgcaacaacattccacgctcttccttcaactcatttcgctgcgccgctcgtggtggaatgtgggcgaaggcgtcggatctgtattgtgaggaggccgaccgcgacgacgacgacggactcgccgccatcctccacgacgcctgggagctccccacgcgccccgtcctgcgcaacgtcttccgccgcctcccgcgcaacacggacttcgacggcgccaccttcctctccaagccatggcttgcgctcgccgtggacgggcacaacgtcgtcgccgacgggcgcttccacgacatcgccttcccccacgaccgcggcgcgcgctgcgtcgggagctcccgtggatggctcgtgagggggcaagggagtcgccggcgccgcgggcaccgccaccatccatgattccatgtcgtccacccgctgcttccgcacctcaagttccgcctccccgacgagttctccctcttcgagatccatgccgccgcggacgagaggagcactgcgattgccactctcgaaggaggcgcgcctccgtgccggcctccccctggaggagacggacgccgagatgctgcagtgcgtgtacaagcccgacaaggagaactgcccctacatcaccatggtcacgctctcgtgcagccccgccggctccaacgacgacgactgcgtcgcgctctgcgtctaccgccgcggccgctgcctcgccatcgcgcgccccggggacgcgttgtggacgcgcgtcgaggtgggctgggagtacatggtctcaacggcaagtacgtcagcatggtccacctcaacggcggcttctacgcggcgtgctacgacggcacggtgctgtgcgtctccatcccaccggcgggcagcagctgttgagattatagacatataatgatttaatctattccataaataaatcatgacattacagatgaaaactagcatgaacgcatcattagatctacacatgtaaactacacagtataacatgaacagatcaaatatgcgcaacatattgaacacgtatcgaggtgacgaaaagaccggctgcttggtcgaaacttttcgcaggtgtctacgaaggcacgaaacacgcgagcgaagaggaaggcgagccgtcgcgaacgaacagggagcagtcgcgcgaagcgcttcccaaaaactttattgccgccttctcccggtgcaggacgtcaaatgcagaggttccggagacctgctctcccgatcgctggtgcacgccggcgagcgggatggagtagtctacgagcgacggcgcagtacagagtaggaggcaaaccctagattgattttgcgtatatactgcgtgaagacggcgggtcggtttatatagagaagggtcgcttgatcagggcgcccgcacgatctctactgcgcgtaaccgaaccggataagtcgcgcgtaacttatccggactccacgccgtttgcacgcaccagatttttcggaacgtttccaaaacaaaaacgaatccgaatttgcagcaaaacaaaactgcaaaaggaggctgcatctgcgcaagggtgagaagccaattttttggaccattcgacgcgtacgtcgtgcacgcgcgccgcttgccctgccctgccaggcgaggcgaggcgagcgagcgcgcgcgtgtgtttcccctcttctctccaccacacatgcttcaagtggctaggaggacatcctcccttttaaggaggtccccctctcctagaataagcaaggtggtactaaactccacatgcatgccatcccatgaggtgggcttttgtgattttccaaagaattaatcttcgagtgggctaaggcccattcattaattccaacaatcccccaccaaatctcaaaatcccactgagatttgccttttccaatgtactgtttatataccagcggttcgatggagaccaattaaggttgaacatccacctagaactccaagctacacttactcacaacttgaacaatggactacgccttgaattgcaagtcttgtgcaagcaagtttcactcaaagtcttatctggtactagaccgtctgtagactacccatcgggtggagcgtataagtcatactcctaggtctttagtaagcttcctagaagattcacccaaaatcttcataaactgcgaccaacagtcaagctcacaaaggtgagttctttcaagaatgctctgcaggacaacatcttcgctaattaaagccaacagaactcattaaggcatagccaacctgccttgcagctcacgagagtacatgcatcttcacttggagagggtatatatattgatactctcctctagtttactaatggtttgttcttcccaggatctaattcacgggatctccgatcacatagactgggttaccaccatagtataattcacatgggtctcaaacccatctccttcgatgcattgtttatcacatttcgtgatagtcccttcgtgaagggatctgccaggtttctcgctgtttggatgtaatccaacgttataactccggagtttcttaatttcctgacagacttcaatcgtcttttcacatgtctagacgatttcatattatccttagaactattcactttgacaattaccgtttgattgtcacagttcataaggatagccggcaccggtttttcaacaacaggcagatccattaatagatcacgcagccattctgcctcaacagtagcagtatccagtgccgttagctctgcttccatggttgacctcgtcaaaatggtctgtttgcaagacctccatgaaacagcaccaccacccagtgtgaaaacatatccactagtggctttgatctcatccacatcagagatccagttagaatcactataaccctccagtaccgcaggatacccagtatagtgaagccccaattccacagtacctttcagatagcgcattactcgctcaagcgcacgccagtgatcatctcccggattagaggtaaatcggctcaacttgctcacagcaaaggagatatcaggcctagttgcactagccaggtacatcaacgagccaatgatttgggagtattccagttgattcctagcaattctcttgttcttgcgaagcaacaagctaggatcataaggtgttggagaaggcttactatcaatgtagccaaagcgattcaagatcttctccacataatgggaccgcaagagtgtaatcccattctcacctctaattagcttaatgtttaagataacatcagctactcccaaatctttcatatcaaaattttgagacaagaatgatttaacctcatttatcacctcaaggtttgtcccaaatatcagtatgtcgtcaacatacaagcacaaaataactccctcacccccaccatggcgatagtacacacatttatctgtctcattgactgcaaagcctgcagatgtcaatgttttgtcaaatttctcatgccattgcttaggagcttgtttcagaccatacaaagacttcaacaatttgcacactttgccttcttgaccttcaactacaaacccatcaggttgatccatatagatctcctcatccagctctccattaagaaaagttgtcttaacgtccatttgatgaacgagaagaccatgtgaggctgctagggaaagtagcacacgaattgtggtcaatctagcaacaggtgagtaagtgtcaaagaaatcttcgccttctttctgagtatagcccttagcaacaagccgagccttgtacttttcaataataccgtcaggcctaagcttcttcttgaacacccacttgcaccccacaggtttacacccatagggtcgctctgtcacctcccaagtcccgttagcgataatggaatccatttcactacggacagcctccttccagtagtctgcatcaggagatgcatatgcttctgaaattgacttaggagtgtcatccacgaggtacacagtgaaatcatcaccaaaagacttagccgtcctttgtctcttactccttcgaggagcttcactgacatcctcctcagagacaagttcatgtgtatgttcagtttgttctggtggtgtgattgaactgggaattatttcagagggttggttcgaaccactatgtgtatcctttattgggaaaaagctctcaaagaaggtagcatcacgagactccataattgtaccaacatgcatgtccggtacctcggatttaactattaaaaatctataggcaatgctatgatgagcatatcccagaaaaacacagtccacagtcttaggtccaagtttgcgcttcttcgttattggtacattgactttcgccaagcacccccatgtgcgcaaataagaaagtgatggttttctaccaatccatatctcatatggtgttttgtccttatttctgttaggaactctgtttaacacatgatttgaggtcaacaatgcctccccccaccatgccttaggcagtcccgcagtgtccaacatggcattcaccaagtcagtcagtgtgcggttcttcctttcagcaatcccattagactcgggagaatagggaggcgtcctctcatgtatgatgccatgttcctcacagaataagtcaaactcgttcgagaaaaactctccaccacgatcagacctaagcctttttatctttctgtcaagttgattttcaacttctgccttataaattttaaaatagtctagagcctcgtctttcgttttcaacaagtacacatagcaaaatctagtagcatcatcaatcaatgtcatgaaatatcgttttccacccttcgtcaacaccccattcatttcacaaagatctgaatgtaggagttctagtggtgccaagtttctctcctcggcagccttgtgaggcttgcgaggttgcttcgattgcacacaactatggcacttagaacctttgacaatggaaaacttaggaattaaacacatgctggaaagccgagacatcaagccaaaattaatatgacataaacgtgaatgccaaacattagcctcatcatccacactgccacaaatatggtacacagacttattgcagaaatcagaaagggaaaagcggaacaggcctccgcactcataacctttaccaataaaatatccatgtttagacacgactactttattagactcaaaaaccaacttaaatccgtctctagtcagacgggagccactaacaagattcctgtcgatagaagggacatgctgcacgttcttcagctgcacgatctttcccgaagtaaacttcagatctaccgtgccaacaccatgaacataagcatgtgacccattctccattaggacggtggaaccccgtgcgacctgataagaagaaaacaatgagatgtcagcacaaacatgtacattggccccagtatcaacccaccaattagtagattgattaactgaaaaaacagtaggtaaattaccatacccgcttccatctccagtgttgccaatggtcacattagcagacttagaagtctgccctgcaggtgccttcatccccttgcgctgtggacacttcctagccagatgaccaacttggccacacacaaagcaagtcctctcatcctgattaggattgttgttgttcttcttctgcttcttgaagttggtggtctgctgagctttgtatttccccttgctcttgttctgggccttgtgcacaacattggcactggactgcccaccatcgcccttagacgcgacatctttttcccgagctttctcctcaacatcaagagacgcaatcaacccctcaacggagtattcctgtctcttgtgtttgagtgcagtaccgaaactcctccaagatggaggtagttttgcaataatgcacccggccacaaatttgtcgggtaagacacacttaaggagttcgagttccttagccatggtttgtatctcatgagcctgttcgactacagaacggttgtcagctattttgtagtcatgaaactgctccatgatatacagatcattgctagcatcagtagcactgaatttagtattcagtgcatcccacaactccttagcgtcggtcatatgcatatacacctcgaccagacgatcgccaagaacgctaagaatgcatcccacaaagagagtagtggcttcctcgaattgcttctgctgttcagcagtaagaactccttcaggtttgccagtactcacccagaagcatttcatagctgtcagccacagagtgaccctgatctgccatctcttaaaatgcacaccggtgaatttatccggcctcagtgcatcggcaaaaccagccatagtaaaatcacagtgcctataataaggttgttggattgttgagattatagacatataatgatttaatctattccataaataaatcatgacattacagatgaaaactagcatgaacgcatcattagatctacacatgtaaactacacagtataacatgaacagatcaaatatgcgcaacatattgaacacgtaccgaggtgacgaaaagaccggctgcttggtcgaaacttttcgcaggtgtctacgaaggcacgaaacacgcgagcgaagaggaaggcgagccgtcgcgaacgaacagggagcagtcgcgcgaagcgcttcccaaaaaccttattgccgccttctcccggtgcaggacgtcaaaggcagaggttccggagacctgctctcccgatcgctggtgcacgccggcgagcgggatggagtagtctacgagcgacggcgcagtacagagtaggaggcaaaccctagattgattttgcgtatatactgcgtgaagacggcgggtcggtttatatagagaagggtcgcttgatcagggcgcccgcacgatctctactgcgcgtaaccgaaccggataagtcgcgcgtaacttatccggactccacgccgtttgcacgcaccggatttttcggaacgtttccaaaacaaaaacgaatccgaatttgcagcaaaacaaaactgcaaaaggaggctgcatctgcgcaagggtgaagagccaatttttcggaccattcgacgcgtacgtcgtgcacgcgcgccgcctgccctgccaggccaggccaggccaggcgagcgagcacgcgcgtgtttcccctcttctctccaccacacatgcttcaagtggctaggaggacatcctcccttttaaggaggtccccctctcctagaataagcaaggtggtactaaactccacatgcatgccatcccatgaggtgggcttttgtgattttccaaagaattaatcttcgagtgggctaagacccattcattaattccaacagcagcaacagtgcgtcgtcgtccccgccgcggggggagaagtttgcggacaggccgtacagggaatactgatccttgtggagatcgcggtggtggctcgccgccgacgactggtgttcgtcgggacggagagctgcctgagcccctgggacgacgacagatacctctgcgcgttccggtgggaccacgagctgcggttctggcgccggccgccgggacaggagcttcggcggccgcgcgctattcctcagcgccggcacggcgttcttcgcgcgacgcgaggatcctgccgtggtgcgccggcgactgcatctaccctattgacgacgagagcgtgctcgccgggaagaacatgaccgtgcgctgctacaacatgcgcagccggaagtatagatggccatctgggcggcacggcccaggcacggccgtgctccggccagaatctatcgggcccacacggcccgaccaacgccagaagcatcggcccaggcacggcctaatatgactcgggccgggccaggccggcccgatggcacgacagcccatcgtgcttctttaaaaaaaaaataatttcagtccctcatttctttggaccatgtctgaaggaaaaagtacaccaaaggtccctcaacttgtcatcgggttacaaaatggtccctaaacaggtatatcacatcccttagcttacaaaaccgttcactcaaggtccttaggtggttttgaacccggttttatctgacgcggtggctgagtcagcgtgggacccacatggaccccacgtgtcagggtgtccacgtcaccacacacacactctctctctcccctcttctctccattcctctctctcatttttcccctgggcatggatggcggcggcgtctttgacgcggcggggaggagacccggcgtggccggcggctggaggggaaggagcgtggcggagaggagggccgatgcgacgggcggctccgccgatggatgtcgtcgcgcggatggccgcggcggccgtccccctcaaccgtcggcctcgacgcggcaaagcaatccaaaccaaatcaaataccgagccgatcgagtctagctagctagctcgctccggcgattgaccaccaccaccgcttgcagcggtagtgatatactgatatggcggagaagaggctactgctgccggtggcgctgacgatggcgcagaagcatggaggaggggagagggtgtgggagcggccgtggaggtcgtcatcacgcgcaggggacgcggcgttcgtggaggacgtcgtcgcgcaggcgcaggtgtccaacttccggtcgtcctcatcgtatccgccacgcgcgcttctgatactctatgagcaatcgacgcccgcccctctgttcgctctctctctctctctctctctctctctctctctctctctctctcacgtggctgagctgacctcgacgggcgatgtggcggcggcggcgacgatgtgggagcaagagggccgccccccacgccgccggcttcggtcgcctctccaccagcttccatggatgacgacggcggcctcctcgctctccccgtcggctcctcatcctccgtgctctgcgaggacggcgcctcgggcgccgccgaccgctccacgctgctcgccgctgctgctcgatctgaacctgtcggcctcgtccccgtcggctgttgccgccgccgaagccgacgagatggattggtggtgcgacacgctgctccacctctagcctgcacaacaccaaacaatggcagcaatcgccagtgaactctagcctacgacgacgacgacgacgaccaaccagcaagcagcaagaatcggcaaactggtactgcgttgctacgctccaatccaaccatcaccattgctgctgctgctactgcgaagaagctctaccatctccttcatagacacggatatttttttttattttcgttttcctccatcactttttcaccactcaggatttcgtttccgccgcctctcttttgcatctctgtatccaaaggggatgctgctgctttcagctgtaccaatagctagaaaatggtagagaagatgagaaaatttggttcaaaatttgtaatgttcagatcgagcagcagtggcgagcagcgtggggcggtcggcggcgcccgaggcgccgtcctcgcagagcacggaggatgaggagccgacggggagcgcaacagggagagcgaggaggccgccgtcgtaatccatgggagctggtggagaggcgacggaggccggcggcatgggggcggccctcctgctcccacgtcgtcgtcaccgccggtcgccggccgcctgacctcctctcccacctcgccccgccggccggcttgcccagacgaaggacaaatttgagagagagaaggaagggatagaagaggggaaagagaaatagtgatgacgtggtacctgacacataggtcccacgctgactcagccgccacgtcaaataaaaccgggttcaaaaccacctaagcaacaaaagtaaacagttttataagttgaggatgtgatatatctgttttgcggttgaggtacgactttgtaactcgatgacaagttgagggaccttcggtgtactttttcccatgtctgaatgattgtagtaagtctatttacatcccttatttcttgggccgtgaattatatggctgcaataagtctaacttagtccctaaagtattttcttccctcctcattgaatcaggccgtgccgggccggcccaccgtgccaaggcatcggcccaggcacggcctagctgtcgggtcggcccggcccggacacgaccccaatcgggtcgcgccgtgcctgggcctatggccatctatagctggaagcttctgcgatgctggggccaaggtggcgctggccccacctgtctgggtcatgccgttccatgaatagtactgtacagagacatccatccaatgatccaagcaggtaaatcattgatgtgtaggagtttgatcaccatttgttcatttgttgctaggtgttttttcatgtgaattctatctttgagtaaatttcatacgaactgcatgtaagtttccatagctaccgaggaattccggatttatgattttgctttgtataattatgcacttcaaggcattttcttatagctgagagagctacacaatttgcatgtgctaccaaccttccatttctgattgttttgtgaaattgctagctgtctagttttactcccagagttccagtgctagtgtttgttgaagatttttgtactggagtagtattttgttgtgttgcaaaaatgtatagtggcttatttgattttaggatgtttaattttttaacttgattctaagtgtctttactttgaaatcagtattagtagctgcaatactgttccaattttgcaaagctctctgtctttcatgttctcgaataaagatttgcctgttcaagagtttgatcgtccatatgtattaagcagattagtgaaaatatttttggattagattttagtgaggactacatgtatgctatatggatatagaataatactagaaaaacgtcccgcgcgttgccacaggatgtgtgaaattgaacgataataaataaatataaaatatcaaaatattataaaatcattttcttacttatatataaaatgagaatgacgatttgaggattttagaaaaaaaataaattgaacaaatgacttttttctaacttcgatgatttattttttagaaactaattatgaacatcacttcatatatgactaagtattcaattctctatgattttgtaggagtttaacattgacacaattaatacttcctcctatttgtgtacaatggacataatatataatacaattaatattgtgtttttcattgtacgtttaattttcacttgagatgtggtgttccaacctctgttcaaaccgatcatgttaaatttaggatcctactctataaaatcaagttttccaagttctcccataatatcacatcttttctcagattttttttatacctatacgatttatctgcttaatttccttccataaggttattgtacatgattaatatggttcatctagaagtttttttccatagcaatgaatgggcgtagttagtctcataattgtgatagattttattgtgcttgtttttgttactcttgtcgtacaaatcgatatagcaaaaccggttgatcataaattgttatgtttcagttatgagatacaattatttgaagctcttaagatacaattaaaatcttaattgcaatttgtcagaaataactgcacattgcggtagtttggtgtggcatcatcaatgctatcaaagctatagtaagacatttcttcagtggctatgtggttaataatttgtgtatttatagcagcagcgatctcatctgttggtgctaaaattgcacgctcacataagtaggttggtagctgtgatacatgtggtattgaaccatacacaaaagaaatcaaacctgctaggttcctttcttcaaccggtagtaagagatatgatggaattttcacccaggtggtgtccggtcgatcagcgggtgcactatcatggacaacaccatcacccaaaaatagaagccatgttgcaaacagctcaagctcaaacctgtcttaatgagaaaaggttggataattgagcctcatgttttcagttaattcaagcaccacacaattttgccataagtgggagcgagtgatcaaggcattcaggatttgttgctgtcttgcattaggaataaccggtagagtttgcctaaagtctccacccaagacaattgttataccaccaaattgcatgttcactgaattaatcatggttgatcgatggcatgatatctctaacggtgcgatcaaatgcttcaaagcaatgtttatggttaacaggtgctttatcccatataatgggagatgtttgtcgaataaattcatcaagatgggtgttctacaatagagagtggattttaaactctcaagtggatgatccctcattatttacatgccactcaaatagttatgaaaaaaattataaaaaatgagaagatgtattattatgtgatatatcgctctacaaacatgcaagttaaaatttaacttttacaagttaaaaaaataaattaaactatagctagttaatgtatgttcccagttaaatttgttttttcattgcgacatatagaagttgtttgtgaagtgatctatcacatgttatatatcttgttgatttttcttttaaaaaaaattcttaactatttgagtgacattcaaaccttaacttagaatagtttctttatataatggagtttcaagccaatttatagataaaaaaaaatgtgaagatgtcagcttatggtagtgtgtaccggcggatgagtattgggccagttgtcgctgtcggcggcggcgaggtgcatatgctgctatgggcttcaatgggctggtttcatcagaagttaagtatatgtgcatgcgtcaggaataatttcactttgattcccttaactagtggaagaatctggttagtatccctaaaccgtaatattggttatcttgactccccaactattaaaacatattcgatttgcctcccaccacggttttggagggctgtttgcagatgtagcgtctacacggggtgttgatctggtcttcgttccacgtgatgttgacgtgacgcttatgtggtatttgaatttaaaaaaaaactaggtgattcccttcactttgttgcgggaattacttagaaattcttaatatttttttgacaatcaagctaagagtaaaaaagaaaaaagaaatgaaacatccgggttgatacccgtgctttagtgtgaacatattgataagtatatgttaaatattgtaaaagtgatagatagatttgttaaaatattatgcaaatgatacgaggggtgatgattgatatgcttgtattttgatttgtataattaaataaattgtagatcatgtttatgtttgcatgagattaaatatgtaattattgctagtggatgatgatgtggcatggttgcatgttgagctatagacttagtgtgctttaacttatatagaaagcatagatatgagggacccatgtcatcctccttcacattctttcacaccttctttcgtcgaggaattcttccacatgtcatcctcattcaccttcttccgtcgagggagtcaaattgagccagtcaagatatctggtatagtgattcagggatatgaatgagattctgccgctacttaaggccttgttcggtttggaaggattgaagaggattgaagggagaataattccacaccacaataggtgtggaataaatcccctccaatcctttcatcatggggattaaccgaacaaggcctaagggagtttttacttttatagatattgttggtcaaagtagcatttcgaagacgatgttagggtccaaaaatacttatattttgtgacggaggaagtagatcaaaatcgtattacaactcaatgactagtgcactgtacccttgttttaatatccagtagtcctcggttgcgttctctttgagcttaaggctgaaatccgctctacatttaataagattcacaaaaggttggatattatttacattgacaatgaaaaaaaattaactatcatgcaaactattaagatgaggaccaggagattgcatctttggcgatgcgttgtaataggatggatcacgcttcccacataccatagaattttcgtcagtcattctgcctgatgcataacaccacatagaacaatgtttccagtgcatggtttaaaagagtgaagcaattctgcagtcggggtgaactaagcgagactgaaagctaaggttgcccagaccacacgagccaacacaacaagaagacccgttgcaacgtatgaatatttttctagtaatataaccaaacaaccacgtgaatacaaattatatgatgatatgaaaccaaacttttcattgtcacacaccctctagacataacggacttccagtgtacacacctactccagcatagatgcttgtttccgttatatccaaggaaatcttagttaccgggttataaatctgcacgatcgcttttgtccctgcttgcaaccaaaacactacctctccctcgtccgtcacaaccaaagggtgcactttcacataaactccagttccaaagaaaacaaaatcaacattaatcctatattctttcgaccacgtccccttgtcaaaatcagtcagaaaccacagatccacgatagaaacgtgatctttccaatgcgctgcagacagagtgcccttaagttgagctaacatgagatggccggcgaggccagtgtagtttactgtgccattagcatcatgaagaatcgtctttgttggcccttggagagtcatgctccattgctccgtttcaaggtcgaaggaaggcatgcagcctgtccgtatgagggaggaggcggcaacgcggttgaagtaggacaggaggaagtaagccgcgcctctgtacacgactccattggtgaagctccaatcgaggtagtccggtgggttgtccgccttcctccactgaggtttcgtgtcgctggtggtgatgatctccgacacgtgggagtagtccctggactccacgatgcggagtagcttgtgctcgcctgtgtgagatgtgcggccaaacgcgagccaaacacggtctccgcctctggtgcgacggcgaggtaagtgcagccgcaggggatgtgcttgacgacgttgccggaaaggtcgacgaggttgatacgtggggtaggagaggtctccacgccaacggcgaagaggagggcggtgtgagggtggcgggcggcgtgcgcggcggctaaaagcgggtcggaggtgaaagaccgccacgagtggcagacggcgcggaggcggcagatgggcttggcggggaggcgaaacaagacctcgtgcagcatctccggtggcaacacgccgtccactgttcctccgtacccactgcaaggcgccgccgacgaggacttgttaccgacgcgagcacgagtagtaggaccgccacgacggcgagaggcagcgcgcttgggcatcacggcggcgacggtcctcttccggcggggtctagaggacggcaaggaccggacgggcttccccatgtgttcctgcggttccgaattccgacggtggactgagggcggcagcgatcgaggctagggctcaagataatagccgatcgaagaggaggaggaattcgaacccggaacgacgctcacccggtgaccggcggcgtcgggttttacgagggaaactgttttaacagctcgagtggacgtccacccgtttattgcatgtcatctaaatggttatgaaaaaaattgaaaaaatatgaacaatatatatatatatatatatatatatatatatatatatatatatatatgtaatatatcactccacaaacatgcaagttaaaattcaacttgtacaaattgtagcaaaaataacaaacaagactcaaattaatatgtatatttacagttaaatttgttatttttgttacaacttatagaagttgaatttgaacttgcatgtttgtggaatgatatattacatattgatctatcttgttaatttttttgaaaatttttcataactatttagttgacatgcaataaacgggtggacatccactcgagttattagaatccatctccggttttacaagggctctctcggctgggctggggccctcttggctgggccgaatgggaattaaaagagtggcccgtgacgagggggaaggatggaagcccggacgggacaactgtgctggtgcagtgggaagaataagtctattttatctcctcacaaaaaaaagagtctattttggcctccctaacctcttatgctttgatccaatcacatcccccaaccataaaaccgactgtaatgcatctcccaacttcaaaaactgatgcaaatatactccttcggtgatttaagaagtggtttttgctgacgtgacaggttgaccgactgagtcaacatatggcccccagatgtcagtgaaatgtgaaaaaacatatagggggacccacatgtaagatatattcattttctccttcctccacctctccctatttcctctctttctctgtctccatacctatcggggtcaccgtcgggagtggcgcggtgaaagggagctggtggccgatggagggatgcagaagtcaacgatgatagggaaggagctaaaggtcggtggtgaggccgggaggttgatacagtcaattagccggagaaaccaagggcggtggcggccttagatccagaagaggagccaagagagaggcgataggtagtcgagatagagagcccggtgctagcaagcttgcgttaatgcaaacggagcttgagctctcgctacagagacagaggggatccaggaagagggcggagcttggggtcccactggtcgcaggctcctctctcaaacctcagtggcaggggagcttgggttcccgctgccccatcaaacctcagtggtgggtggcaggggagctttgggtcctgctggtcgcagtctcctctctctcgagcagtggccacaacagcctaatggtcgacgagatcacggtggcgtagatggaacttgggatcccgtgacagatatggaggggagccgcgcgagcaacatgtcatctcctctctcccgagtgacgcgggcggcagcgcactggcgtcaccaagcatgatgatgcggcaactgttgtggatcttcagctcgaggtcacgaaggtggcggtagtgccatggaggtggtcgtcagggaggaggagcagttgcgtggaggtatcaggggtggaggctagcgggtgcgtcatggggaaagagattggacacctcttcatcccctcctcctagcaaaaagcagctccattgtagtaatttctgttgaacttgccgacgaagactagagagacttggcaaagaaatccttgaattcttaggaaccaagaaaaggaggggaatatatgaccccatcaaaatcattcattagcatccatgaaatggaatgtagtaagcaaaggatcggtgcttttcgtattctcttgggaggagggtttgatgttgtacaaccactagattggtgaatttattattaaattgtggtgaacttgttcaacgtatatttacccgtgataactcttttttgagatacaataaataatattttcttacatatatttgtatataatctctcatatttctcaaactgggggtaaaaaggtcatttcaagttccttttggtgacataacactctaattaggaaaaatctctcactcatatagtgtttgtgtaaaaaaaatggaagaggggcatctcaatagagtcactccgtaggagtggtggcaaatacttaaaaaccctgttatagtaacaacaggaatagaaataggagtaaaagtggcatttatagtactactctttccgtcctaaaatataacaatttagagggtttaaaatttgctaaaaaaatataataatttctccactaacattctcttccaaaccaatcacaaacctccattattcaattttttcgtctaccttcacttctcaaccaatcacaatattcccttattcaattttaccaatttttttaataactgtattcaatctttaaaaaaattatatatgggaaggggtagtattataatagtggcaaatagttaaatttccacaagaattgaatggaggagaagagttgtctcccctgagttgatttaacacctctccacgaggtaggcaacgcgagttggcagctaatcctgtcaagtatatttttaagatggacataggtattaagaaaataggtagaaataattagagaaatattgtgattaattgagaagataaattatttaagaaattaaatagagaatgattgtgattgattgagaggagttggtaaatgaagaaatagttttatttcacaaaatgttaaagatagatttattttgagataaagaaagtaggatggagccactgggagagcagaagtgcgggttccaaaaatcagattttttttatttgccctcaaattggcttagatcatttaatgaagcagacgacaagcttttcatggagactctccattatatgcccattcattttttttccttttccaatcatttccgttgtttgattaaggtgcagaaattaattgaactttcaattttttttctgatcgaatcgccatgtaagtatcatatggaatgaagacctagtcaaatgggctttgtatgagccacgtcagttaaaatcaggttcaatactactcggcgggggactatatttgtaccggttttaaagttgagggtacaacgattctgattttgcggtttgaggatgtcttaatttgaaactcaaaaaaaaatgaggaatgtaaagtggacttttaccagtgaaaaaaaggtcagtttgtgagggttggcaaggaggaggggcgagggcgtattgaacaggtcaacaggaacaccctcaccctcgctgcccttcgggttcacccggccccggccctaaagtgaaaaacgggcgtaaaacaacctctgcacccgacacctccggggccctgtcacccgaccgaggccctgctgcacccgcatccgcatggcaacgaccgaggaagagacgatgaggcgtgatgcagtgggacgacgatgaagaggcggagcagcgacgagcaggcgtggggactgtggatggatgaggcggcctgacgacaatgatggtgtgtcgcaccggcagccggagatgaaccggcgcggagtagcagtaggcggcgtcgacagcccggctgcgtgggggcatagaggagaagcaggcggcccggttgcatagggacgcagtagcgtggaggaggagtagggtgacgctagcggtgccggcgacgtgggtgagtgagcttggcaatgacatcgcgttggggaacgcccgcgcgtgcacatgcagtaggcggtatagcgctagcttgggccggtggtagctagggactagaaaagggatagggagagaagaacttatataatacatacttaatttaacccggtttcataagtgggaagtgtttacacctaaatttggtacctatgaatgaaatagaggaaaattgtcaaagtttgaaaagtgttggatttcctccacagggccggtcataccataggtatatgggcggtctgactggctaatagagccggtctgaccgcaggtatgtggccagtcagactgtcagagtccgagtccaagtctgtcttcatcgggtctcaggtttccttactcgggaaggctatgtttcgtatttcctttgatttctatcccgagttagacgtggagaagggcctgtagagggcaagaccaacccctatttaagggacaaggccggttcatttgtaatcccccgaatacaatctcttttaccatgttttctattttacccaagttttagtccatttttttcaatttgcgctgtaaatcatctgccgctgctgcgagagtgcgacacctctttgtaggtttgtcctgaaaaccttccgttttgcccacgagacgggtagttatcttcatattgatctaagtcggtctagaggctgattttgatctctaaatcgccttcgctaaccggtttagctgtttttctacaaaacccatcttgatttggtcgtttggctagatcgaggtggtcgattctatatcacctcaaggcgtttaggtgttgcgatcatgcttgtcgacttgtcacaaaaagttaccaacaggagggttaagattttcggtatgggatcacctatacatttgtcaacaaattttgttttcaaaacttgacaaatgtaattgtagtacaatcgtgatgtaattacgttgtaacttgtatgtaactttcaaaaatctctccgtaatcggtgaaacggatgtcctgggaacgaatcctctcacatgtgtgctgctatgcgcgctgtgatttttttctttcctcacttgcacaattacggagaaacaaatctaccggttcaaaactatgtgaaagttacatacaaattatattgtagttacatctctcaaatttttaggagaaaatttgtccacaaatatgtagctaaattgttatgtagtacagtttcgaaaccgctaaaaagcggctagtcgcgcgtctcccctccctcgtggcgcggccacgtggcgcgaagagaggatggccacggtggaacggcgcgggagcgccacgtgcggcacgtttctccggtttttctggtttttccctgatttctttcggcggcagataaaaacgtggcggcggcggaatcagggaagacgaggaaacagctgccaccggcgggcgcaacgctgccggccgtgacgccgctggctgcgacactgctagccgtgacgccaccgggcaaggggctgcaggtacaggcaccggcgggcgaggcgccgctgccgggagaggcgctggcgggcgacgcgacgccgccgggagaggcgcaggcgagcgcggagaatcgccgggcgggagcatttcgtcttcgcacgggaacgagaggagagagaggcaggagtgtgagattgggagcgatattcgcgagaatactcgcccgtatataagccgagcaaggaatggggagaagggagttccaaaacttatgcaggagggtaggggatttgttggagctgttttctagactaaaatccctcaaaattagttttgggaatcagataggttgactgttggtgatgctcttagcgcgctcgtgcagtttaggatatgaattagactatccctttggcctgaaatatttatttgcgttccgcaagtgaaatactccattttgttaggcccatcaaactaacaagcaccagagcccacccacgatcgaggccaggcaccatccatgccgttgccaagttgccgtcgacgagagcagaggccaaggcaaagctgcttccagaatccagagtgccacctccgtctccgagcacggcagcaacggccacaggaatctgccgtgcagagcacgctatcctcatctatatatttctctgaccacttcgtcctcacccctcccccatttcaaatcacgcccacctcaattcagaactccacatggctgccgatcccaacctccccggccgtggcggcgccacctcttccccgatggtctccagcctcggtggcgtcgacggcgagggcgcgccgcccccctctcccatccttgctgccctcgctttgtcgactgtctccgcggcgtcgagcgcgcccgctaccggcgccaccgtttcccccctggtctccaacctcggtggcgtcgacggcgagagcgcgccatgagcgccgcctccctcccccactgtccctgcttcgtcgacggtgtccgcggcgtcgagcgcgcccgctaccggctccacctcttccctctccagcctcggtggcgtcgacggcgagggcgcgccatgcgcgccgcccccctcccccatccctgctggccccgcttcgtcgacggtctccgcggcgtcgagcgcgcccgctacccgcgactacctcggcgggatcactggccaccgcctcggccaggaggacgactccggcggccacgagtacacatccgtctccggcatccacgtccccagcagcagcggcgtcgccttcgtgtcgttcggccagtgtcctcaggaggtgatctccaccgacctctgcctcggcttggggcccatcgccgccaccgcaccgctgcaacctcctccacctccagcggcggcagcggcagcggggtctccgtctgctacgacgccggagccaggacatggggaagcgacaccgacgacaagttcctccgcgcagtttcagacgcaggcgcagcaggttacgcgcgacatgtggatggcctgcgctgcacccaagtccggccgtctccccaccgttggatcattggtctactacttcccggacgggcacgccgagcagtgcctgtcacgtccgcaggagccgcttccaggcagaattttcctatgcaaagtcacggacgtccgcctcggcgcagcagcaacaaacgaagccttggcaaccatctctctcgtcccgatcgccgccgacgaccatgccttccagcttcaggctcccgctgatccagaccctgctccagcccagtcccagagtctcgtttcattcgtcaagcctctcacctataccgatgtcaccaagaatcggttcatggtgcccaaggacgatgccgctgcgggagttcttcctcacatacagttgaacgatgatgtgcctctccgaatcaaggacttgagcggaaaggagtgggcgtttaactacacctggaaagctcacacccgcatgtttcgcaatggttggatggagttttctaatgccaacggcctcgtcactggcgacaatgccgtgttcatgcgtcgcggcaacggcgagatgttcatggcggtgcggcgcacgcgcaacaggccggcgcccttctcagtggaggaggtcatcgaggccgtgtggcgggcagcgcgccgcgagccgtttgaggtcagctattgcttgcgccaggatggggacgagttcgttgtaccacgtgacatcgtcgatgatggcttacgcgccaggtttgctccaggcatggctgtgaacttcgtatgggctgttgaggatggcaagctgccaaccatcgggccacagggggaggtgatttccatagagaactatgctacgtccattggcgcataattcaggttctgaatttttcttgttttgattgaagtgactgcatgtattgtgttgatagtatgattgatcttaatttcttctgctcattgtttttttttttttgacgcaaaaggtagagagactctaccttgttaccattgtattaatggtggtcatgaaagtaacaaagccagtggctggcaagagattatacagggggaacaaagaggaaggataaagaaaaagaaagataaaaaagaaggaagggagaagaaaaagaagaagaaagaacaaaacacaaaaaaaaacaaaaataaaaaggaaacctagctaagcttgtctgcccaagtgttgatatgttcgcgaaggcttggctttaggcgatgaacccataattggagactttctctgatttgatgaaagatgtatgcaacgcttgtttcagtgagcttgaagaccagctggttgcgtgctttccagagaccgtgcgaacaagcagcaaagcatgcagggcatcccggtttctggtgttctggtaaggtgtccaggattgattccacaaaatcttgtatgttagagctgcgcacggctgtctcatataggttgagtttcttccagacttcccctgctaatttgcaacgaagaatgatgtgatttgctgtttcaatagctgggcaggacatacagtgcgggttggaatcccattttttattaaccctgtttgcattggtgttgagcctgtcccggaatgctaaccacaaaaagatcctgcaagtgttggggatagccttgttccagataagtgttgccggctgccaaaggatgccatgataagtcaacaagttgtagtttgctgatgttgtgatatctgtggaaccaagcagcagtgttcttttgtcggggacattctgttgtatgtgttggtccaacaatatatccatgagggactgtaactcggtttgagcccgggaagagagaaccgggtgtagatcaattgtccaggtgccgttagtgtgttgggaggagactgtacagttgatatttgttgcgtaggaagctagtgtcggatatatgaggttgaatcgtcctgctgctgtccagtggtctcgccaaaactgcactagctggccgttcccaatcgttaccttagtggaggcaataattggctcgataacggaacaaactgtcttccaaatcggtgtttctgttggttttgctttaatagggatctcatttgccatgtgttgcgtgcgcaaccattgaaaacatggttctgatgagtctgataacaacctgcatcctatcctcataagtagagccaggttgtgagctctcaagtcaccgattcccaatcctccttgttccttgttgagagtgacagttggccaggccactaaacattgacctccttttactttcttatcccctttccaaaggaatgccctccttaggcgatcaactgcttcgatggttttgtctggccacttgatgcaggacatgaaataatttggtattgccgacataactgagttgatcatgatgagtctttcaccccaactgagaaggcctgggatccatcctgctatagccttcgatctattttgtcaatgactggtgcaagcaacttgtgtgagatcttggctgttgtcacgctcagaaattcacgaaccagaatttctaagctgaatgtgcattaaatccctgtccaggaccagctagggtacacaaacgacaattgttgacatacaaatccacgtcttacaaaaatataaagattacaaatgcagcggaaaagataaaagcgagctaaaccgggaagcttgacttcagcagcggggcgactccactccacaggcaatccttgacggcagtgacgaaatcaacttcgacaagacagctcccactaggaagatcttcagctctggtgtgggggaaaagagagcaagactgagtactacccactgtactcagcaagtcataccggaagaggaggtatgatgcaggatataaccgaaggaggctaaaggttcttttgcacaaagcaggcatttaaaaacagtagttgaaagcagtaaaacagttgtagtaataaatcaatattaaccaaacactgtccaacgctacaccacgttgcaacaggcccaaccaaccgcctgaactacaccagttcattaagctaaactaggggtgagactaatcacggtgaatctggttgatcgcccataaccgcgggcacggctattcgaatagttttactctggccagaggtgtacaactgtacccacaagacacgattccacacatgtcgccatgccccgaagtatcaccatgatactacaaagggggaaatcgtgacctccacataactctcccctaaccatccacaccacgctaaggtttcacccccacccctcaaaaggcagtgggcggtcccctcttgcgccgcggtgaatccggcaactggacaaccggacaccccggccgacccaactccatcacgcccaccctcgccaccggtgcctaggaaagggttgagctatacttcagatcaagcagttacccactcccgcttgtggtaagcacggtaagtctcccagggtttcccgtgaaccggtccttaactgccatgggtgcgaccagctaaaccatgcacccacagcccaccattcagtgtattttaattaactaacaccactgcggtggcaccaatccaaaactatgctaatagacaaagtctatgtaataatgtgatccctttttgtgtactagttaagctaagcatggctaagcatttcctaaaccaacatctaatcattttgataccccagttatcaatggcatatggtaaacaatatatagcagagtattaggacccatcccacatgacattgtaaaagaatgcgacatttaatagaaatgcgggacatttgtaaattgggtacaatatgatcaattgtaatgcatgacttgccttgctctcgcactgatgagaccacagcaacgtcttcgagaaaccgcggatcgacaaaacagccgaaatctacgcgacaaacaaagcacacaagcaaaacatgctataagactactgaaacaggaaacaaaaccatttttaatggattctttgcatttttatgaatttactgagacttgaatggacttaaacgaagctcggatgaattacttatgaattttagaagataaactgtgtttttactaataaagaaaaaatccttaatcaatttattgtgcaataaatcccagggctgacgtcatccaagggggggctgcgctgacaggtgggccccgcttgtcagcgcacaaggggaggagagggggctcgggcaagtgggccccactggcagcggcacaaggtggccggtctaccgtggaccgggaccacgcgggtggtccaccgccggtccacgggaccgacagtccggatcggcccgaggctgatcggacggcgcgggcggcggttaggcacggctcggctcggcacaaagccgaccgaccggccatggcgagcggcagcggcgcgtgcagcgcaggccatccacatgtcgtgcggagcggcggcggacggcgcgaaaggctgcggcggacgtccggagcggcggcacggccaaaggcggcggcacggccaaaggtggcggcgcacgcgggaaggggagaaaagggagggggagggagtcctcaccggaggggcggcgaccggagcgggaggggatgagcggcggcagcgcttcggaaaacggcggacgggagcggcgcgtcctgggaaaaggcggtgaaggggttagggagaagagaggagccgcggcacggcgaggagaaatggccggagatggaaacaatggcgagctcaccggcgtgtagcgcccgttccgtcgtggcgcctagcgggaaaattatctcttaaaaaccctaattgcgaaatttgtttctttgcttgttgtctagtgtccgtgccatctcaagatctcaatccgcgatcgatcgtcgagatcaattccgaatccaattccttccaaatcgaatccctccgcaaaagtctagtttgcctcccccgggttcgatgggccgaattccgctcggcccatctcttccccggccccctccctctctctctctctctctctctctctctctctctctctctctctctcgctccccccccccggcgcgtttcccccccctggctgctcgcgcgagcgtgagccgcgccgagcgcctctctctccgctcccctccgctccgcccgcgcgccgcgcgcgcgtgcgcgggagtcgcccgcgccgagcgccccctcctctcgcgcgagctccccgctcgcaaagccggccccgcgcgccgttgctcgcgcgcgcgccgcgtggtttcccgcccgagccgcgtcgtctgcgccgtccgcgtcgcccggtcccgctgcccagccgcgccgcccgttgcttcccgcgcgcgcgtgccgagtggccgaccgcctggtcgccgccgccgtcaccctctgccgcgccagcccgcgcctgtcgcccgtgtcgtcgcgccgctccaaaccatcccaccgtcatcgccatcgtcatcccccagcccccgccactccgcgcgcaagccgccaagaggcggaggccgagctctcccttccctctgccgcgtcgccccgctccctcctccttttcccgattcggcaaaggggcaagccccctttctctccctccttttcccctttccttcctttttcccctctcgccggcgtcacctcctgtcgccgctttggacgctagccggagcgccagctcgccggcttgaccgttcaatgtcggtttccctcgcccaaaccgacaataccgcccatttaagcccaagccctccccctccaaactctctcattttcgcctccgcgccattgccgccctctgtttcgccgtcgccgatcgtcgttgcgcgtgtcggaggagccggcacgagcaaggacgcggaagaggacttcggccgcgccctcttcttcctcttccccggcccgaggccggagagattactcccgcgccgtcggcctctcgtcacagcgcccctcctcatctcggtgatgcctccctccgttcttccccctcgccccatctcctccccctagctttcggtagtagctcgagtagactccccgtagctagccggcgccgccccgaccgatgccgtcgctcgccgtgtgctcgccgccgtcgccgcccgagctccgtagcaaccgcacgtcgccagcctcgctcggcgtagctccgtccaatccgacgctagcatcagattcccgtggtcacatggatgctctcaccgctgggaatcgacccctcgtggcctcgtcgccgtttccctcttccctcgccgccggttgccgccgccgcaatccgccgccgtcgagcaacctccggcgaatccgagccgttggctcgtctcccctcgtcccgtgcaatcgcccggtgtgctcgcttttgcctgtatcgccgtggctcgctccgccgctcgccgctgtcgcccgccgtccattcgcggccgagtcgtcgtctacctcccgccggcccgcgtggctgccacgtaggcgccacgtcggggccaacttgggcggcgaccggataagccgacccggccagccgctccctccgtttctccccgtgcgtgtggtccgcggtgagccgtgaggctgcgcgtgggcccgccgcatccgttcctccgcgaaccgcgcgcgtgcaccgcgtcccagccccgcccgcgcgcgtacgccgcatactccctccgcacggtgagccgagccgctgacaagcgggtcccacccgggaccacgcgtggtgagcccggtccaccggctccctctctctcctccctcccgcgcgcgcgcgcttgggccgtcttgggccggccggtccgttaagcttggccgagccgccccaaatctcttgggccgcaccctagccacccgagaaaagtatatattccctccctcctttcttttcttttccttttccaaaaaggatttaattaaatcctttttcctttagaccaaaaatccaataatcttagaaattcaatatattcccaaccgtaattccgtttgaccccgttcaacttctaaaatttcccaaatctcgagatctatctagtggcacgcttagaggtctttaatagggctttattttcgccgtttgttgagttgtcccgtttcgcgtgtagtttcggagcccgaagacccgcagtgcgaggatttcgaggatcaagctccggatcgcgagcaaggcaagccccctttgaacatcttgagcctatatttgaaatttaattatattgcttgcgaaatattatgcattgatacgatcacacttaatctgttgtcccgtctgcaaggcagattggtagacctacctaatttgttgcatttgatccttcctttgttaattgttataccatgtccccttgtaaccacctagttacacctcgatattcgtgcactctgtgcgagtatcgacggtcgccttcaaacttaaaatctgagaaacaacttgggtaaaactggagttttacaaaagacttggaaaacccgacacctaggtcggtgcttgcgaactaaatgaatttccaaaaccgcggaccggggaacgtaccgggtgtacggtttcccgctctcgcacttaaggacagattccttggaatttcatccaaacataagacaagtacgaccacatgggtggaatgggacacccctggctgagtaactagcttatcaggggagccttgatgccgagagacatgtggattcgccggggtggtgtcggggaggacccctgggcttcctggcacagtatggtctgggacctaacctgttgttggtctgggacccctctcgtcggcatatggtaaacctgtatcggctttcgaaatgccttgtcatgaaagcttggaggtctcccgacgtggctgatccccacgggctgggtgatccgggttagtaatgtcgtgtgggtaaagtgtaccccctctgcagaggttaacaaactgttcgaacagccgtgcccacggtcatgggcggatgtgaggtgattcctagcgtagttttgtttgactactgcttgtgaaatgctgttgtgaaaagggaattcggtgtttgaaaaatcagcagctgacgggatcagctaggcccgggtggccgtttgaaaagttgttggcccgggtggccgttgaaaagctgttggccggaagccaatcttggttcaaatctaaagattgatgcattgcacatactccggccggacgagacgcactgtctcatccgagtcgtttgagaagcactcacctagtcattctagaaaagagttcaaacaaaatcaattacgaaaacaacaacctttccttgaagcctgcattaaacacttatttcccctggcttgctgagtactcccgtactcacccttgctctatataaataattccctcccccagttgctgaagaagatgaagtggatcctgccgacgaggagttcttccaggagcaagtcggctacgatgagttttagggtttcggcctagttcccaagtcgcgcctgtgatgattggtccaagtcctggcttccgctttccttttgtaatgcagttgtgagctcgggatctgtccgcagcccaacatgactgtacttctactctataataaagagacctctgttgctgtgatactctgtctccctgtgataccagcactgtttcctgggactggtatcgattaacaggttattttggagcgtcacgggctagttccggtcgggactagttcggggcgtgacacggcggcgcgagggaatcggagctccggcggtgattcgcggcaacgaagcggcggccgaggtgcggacgggctcggtgagcgcgacggcggcgactgcgcggcgcggcggtggctatagtggcggcggcgcgtggccggagacggcggtaggcggcggcgcaaggggcgagcagcgcggcgacgataggaagcacgggagggcacggcgagtgcgaaaaacgagagagggggacgcggggagcgatttatagatgcgggagggggcggacgtggccggggaggtggccgatttggccggcgacgtgggggagtggggaggaagagagagaggggggattcaaattgaaccccgaccactctcgggcgcgcgggcggaaaagccgccggagtggggcaccgacgtgggcgcgcggcacggccggagtggggcacggagaacggcggaaaacggcggcggcagcgtggccggtttcgacagcagcggcggttgccggaggtaggagacaaccgacaggtggggcccacctgtcggcgtcccagagagaggaggaaggggcgcatgggccggcccaacaaaggggaggccgagcgcgggagggagtgggccgacggcccaacaaagaaaaaggagggaaaagaaaagaaaaggagaaaaaggattttcctgggattaaaaatattgcacttgctcaattttaattggttaaaattatttccaaggctctgaaaattccactaaaaatcatgttaatgtattggagcatggggaactcaaagaaaaattccaccacgccgaattcgattattaaatgcatttattaattagggatttagctctaggttaattaagataatttcttcgggcaatttatttaactaatttttaaagcaagaaaaggggggaaacttcagggtgtgacagctgtcgagagcggaagacctagacctagatagttacaaggaagcgggctgatggggcattgcaaaagctcagcgatggccgttgcctcgggttcattcatgtgtatgggtacgaaggtactcttgctgaaattgatctgtagccctgagaatgcagcaaattcctcaagaatgctcttaattatttcagcctgctcaagcgatccttttaaaatgagtagggtgtcatcagcgtattgcagcgtgggaggaggagagtgagaatccagtgggtggagtaactgctcggagtggaaggcttgctgtatcatttgctgtaggacgtcagcgactagaatgaagagatatggggagagagagggtcaccctgacggactcctctcctatacttaaatgactcgcctgttgatccattgatcaagacgtgtgcttgtccagtttccaaaatctgtttgatccaattgatccatgtgtcgtcgaatcctctgcggtgtaggaccaagtataagcaatcccagttaactgtgtcaaaagctttttggaagtcaagctttagaataatcgttggttttttccttttgatcgcacattgaacaatgtcagaagctagtataaaattctccgtgattgatcttcctttgatgaatgcagactgcattggatcaattaactcaggaatttccccttgaacccggtttgctagcactttgctgataagctttggcagactgtgtagcaaggatattggcctgaaatctgttatgccgagaggggtttcttttttcggaattaaagtgatgtaagagatgttaacccctgaaagatcggctgcattggcatggaaggaattgaacagcgcgatcaggtcaggcttaagagtagagatgaagcatttgtagaactcatttgtgtagccatcaggacccgggcttttatttggaggcgagtgcaggatggcgcttgagatttcttcccaggaaaaagaggtggagagagctgacaagttgcgcattgaggggtagaggggcgacagaggaatggagtgggaagtgagttcagtgctgaagatgttccggaagtgtgcggtcgcaatttgcaatttttttggagtgtcgtagtgttctatcccatcctccaacaggagtttgattttattttttctgtggctaattgtggctgcaacatggaagaaatgactattctcatcgcctagcgtgcaccaagtgattttggatcggcgtttccattttagcgcccaaaaccagtttaactctttgaagtgctcgtggcagtgtttacgaagtgagaattccaggtctgtaagaggccgccactcttcacagcgatcaaagaaatcaatgacatatttgttagtgtggaggagagattttaaaccagctttgcgtcgtttccaggctctgattttggctctcagccttctgagtttaaagttcaaaatggagaccggagagataggtctagcggccttaagcaggtcgttttacactaaatttttgaactccggcatttgcagccaaaaattttccaccctaaaaattgcggagcgaggcgctgaatcggaaatgtgaactaggattggtgtatggtcagaagttgttgcagtcacagcttttgcttcagtaagagggaaggattggctccagagtggattaatgaaaaccctatcaagtttaacaagggtggggtggcgtcttttattagaccaggtgaaggtcctgtttgggatgtcaatgtcaaggaggctctcggagttaatccagtcgttgaatgtttccatctccgaccaattgatattatcgttatttttttcgtgggggtatctataaatgttgaagtcaccgaggatcatgacagaaccagttagattgagagtggtggtggagagctcatcaaagaagaggatcctgtgctggtcgtcacagggggcatagacattgatgatagagaaggaggtgttgtcggaagagctacagaaggaggtggtcagatgagacggtgagctggagaggacagtggcagagaaaaggttgctccaagcagtgagcaagcctccggctgaaccaagggagggttgaaaggagaaattacgaagattgcgtggtaagaaggaagcagcgaggagagggcagatagtatcaagcttggtttcttggaaacaaactatatctggtttattctcagctagggattggaagataagagctttctttttatcgcagccaaggccgcgcacattccaggtggcaatcttcatagaaaaaacagagaagcaacttggtggaggaatcccacccaaaaccaaggcaaaatcgcatgtttaaaagtctgccgcggaaaaaaggaagaacagataagcaagaaagctgaaacggtaaaaggagttttgcaagctgaagcaagagtctgctcattgtgcatactgcagattggatggacagaaagttcaaagatgaacaagtacgccaacttctggcaagttcgatcagtttgttacgatcttgcttctgctgctcctccccctcctctttctccaaagaggctgaagatttgtaaggttgctacggcatctacttcttcatctgtctgcaatgaagatgagcaagttcagacgatgcgggagcgagtagaggcgctacttcctgataacatcaaagctatcatcgatcaaaaaggaaatccaaagggaaaggacacctgacgttgtcggcaatgatcacactcaagattgggtctgtttgtcatgtggggattgcaatacaaacgtcgcagcaacaggcgggcgacggtaaggcgtgacgaggaatagtttttacttctattttgattcggttcggagtttgttagatagtttgttagtttcttattccgtaagctgttaggagtctatcctttagaattgctatgtaatctgtaagacagtttggttttggaatcaatcaattacgtgagattaatctgcagacctattcctgcctcgccggtgcggtgccgaacacggctcctccgcgccaacgaggtccaggaccacgtcctgttacagccttcaaatactccctccgtcgtaatcctccttccaatctcctcgcccgtgacaacttggtatcagattcttctggttccgtgtccatgggttccactcagacgcaactcgacgagatcgcgaagaacctcacttccatggctgcgcagatttctgatttagccaggaagatgagcaccctggaaccattggtgcccatcgcaccaaaacttagcgacctgccggaacgcgtcacccaggtgcaagcctctgcgttcgagtactccgagcaggtgcgctccctcaacctggcgatccagcgcgtggaggcgtcctagcgcgcgtcggccacggcggcatctggcgcctcctctcagccgccgccaggcgaccctcccccatccggcgacaacgacagaaccctgcgccgcgatcgccgtggcgacgactcgacggtcgacaacagctttctaccccgcgccaagctcgagttcccgacgtacgacggcaaaggcgacccgttgccatggctgaatcgctgcgagaccttctttcgtggccaacagacaccggaaaatcgcaaggtgtggtacgcatccttacatttagttggtgatgcacagttgtggtactacaggatcgagctcaatgctggtgaaccattgtggcggcgctcgtccagttggtccacaccaggttcgggccgccgatgaccgacagcccccttggcgagctcacggcgttgcgccgtacgggcacggtggaggattacatcaacaatttcctcgccttggcctgccgcgacgtcgaactctccgagcgccagcaagtccaactcttcaccgccggtctcgtcaatcccctcaagaccgatgtggctctttgccgcccacaatcgctggacgacgccatcatgcttgcgcgggcatatgaacagcgggtccaagttggcgcaacggacccagtcccggcccgctccggccgcgcaccacgccccgcactccccgcgctgccggcatccgcgtccaccgcgccgggcacgtccgcggcacccgacaccttgtcctcggcatcaaccggcaaacagcccctggtgtcggctcttcctcgcaagcgtttgtcgccggcggagatggcacagcgtcgatctgaaggactctactacaactgcgacgagaagtacgtcgccgggcatcgctgcaagaaatcattcgtcatcgaggtcattagctttccggatgatcccgaggaggaggcagaagacgcaccgactgctcatgcgctctcgctggacgagcccagcatctcgctgcacgctctcgccggtgttcgctcgccgaaatacaacacaatcaaggtgtaggctcgcattggcacaatagacctcatcgccctcctcgactccggctcgacgcacaacttcatcagcgatgtcgccgcccgtcgtgcccgtgttcccctagaaccgcgacacggcctcagcgtcgcggtggtgaacggcgatcgcatcaagtcgccaggccgtttcccaccgcagcttgttaccatcggcaatcacgacttcgtcatcaacttctacgctcttcctcttggcggctacgacattgtcctgggcgcccaatggctcggctcccttggaccgactctctgggacttcgccaaccagtcgctcgcgttcgggccgccgactgaccgtgtggtttggactagcattgacgcgccggcatcaccttcccaggcggctacaatcgacggcacgccaggcgagctcatgacggagttggttgatacctttcaggacctcttcgttgagccacacggcatgccaccggggcgccacctctgccatcggattcgcctagagcacggcatctcggcagtcgcggtgcgcccgtatcgctatgcccacgtccagaaggatgagctggagcgccagtgtgacgagatgctgcagcagggcgtcatccggccgagctcgtcggcgttctcctcgccggctctattgatcaagaaaaaggacggcgcatggcgattctgcatcgactaccgcgccctcaacgacaagaccatcaaggacaagttcccgatcccggtggccgaggagctgttcgatgagctgcgcggcgtcaagttcttcaccaagctcgacatgcgttccggctaccaccaagtacgaatgcaccccgacgacatccacaagactgcgttccgcacgcatcaaggcctgttcgagttcttggtcatgccattcggattgacgaatgcaccggcaacgttccaggcgctcatgaacgacgtgctcctcccgtttctgcaccggttcgtgttggttttctttgacgatattcttatttacagatcatcgtggtcggaacatctccgccacgtccgtaccgtgttgcaaacactgcaggaccataagcttcgactcaagcgatccaagtgcgagtttgggctctccgccatctcgtacttgggccacgtcatttcggccgccggcgtcgccatggacaggagcaaagttcaggccgttcttgactggcctcagcctaagaacgcgcgtgcagtccggggcttcctcggcttggcggggtactaccgccgcctcatccgtgacttcggcaccatcgccgtgcccctcacggcactattgcgaaaggagggctttcgctggtcggacgatgcgacagcggcatttcggcagctccaacaagcgctcacggcggcaccggtgctttaactgccggacttcaacaaggagttcgtcgtggaatgcgacgcgtcgggctctggcttcggcgccgttcttcatcaaggcttcggaccggtggcgttcttcagcaagccgatagcgccacgccacgccaagctcgccgcctatgagcgtgaactgattggacttgtccaagcagttcgccattggcggccgtacttatgggggcgtcggttcctcatccgcaccgaccattacagtctgcgcttccttctagaccaacgtctatccaccgttccacagcaccaatgggcaagcaagctactcggcttcgactttgcagttgagtacaagccgggaacagcaaacgtggtggcatacgccctctccagaagggacgaacacctggctgaaactctcgccttatcagcccctcagttctccctgtttgatgagctgcggcgcgaggtgctcacgtcacccgagctgactgccattcgggatgacattgccaaggggtcaaaaccgccggcctgggcgttcacggacggcctcatcacgttcaaaggccgtatctttgtgtctgcatcatcaccatccttgccggccatcctcgaactggcacacggcctggggcacgagggcacgcagaagacgctctctcgcctccgagctgacttccacctcgcacgggacagggcggtggtacaagagcatgtccgagcctgtttcacgtgtcagtgaaacaagacggagcacctacaaccggccggtctcttgcaatccttgccggtgccatcggcggtgtgggccgacatcgccatggatttcgtcgagggtctgccacgcgtccatggcaagacggtcatcttaacggtggtggaccgtttctccaagtttgcccactttataccactggctcattgtagcgcccattccgtcgtggcgccaagcgggaaaactatctcttaaaaaccctatttgcgaaatctgtttcattgtttattgtctagtgtccgtgccatctcagatctcaaatccccgatctatcgtcaaagttcaatcccgaatccaaatccttcccaaatcaaatccctccgcaaaagtctattttgcctccctcgggttcgatgggccgaattcctcgcggcccatctccccctccct

SEQ ID NO: 7484 - DNA, 53684 bp, Oryza sativa
tgaacgtcgcgcgcgtcaacatgtgccacggggaccgggagtggcaccggggcgtcatccgcgcggtgcggaggctcaacgaggagaaggggttcgccgtcgccgtcatgatggacaccgaggggagcgagatccacatgggggacctcggcggcgccgccgccgccaaggcggaggtgagcttagctgccgctggattctgcctttggcattgccgccttgctaatttgctttcatgcgttcgatggaattcggcgagtaccgcgtgcgtggtgctagcaagtacgtgaattcatactactagtgagtaggaatgcgtgctttattcgacttggaattcggataaagaagatgtcctgacaccgtgactcggtagatctagatttgagctcaggttcatgtttgcacagtgaaggggaacactagtattgttatggaatattcttccatgaaatgctactagcacccaacattccctggagtggggataccagtttggattttgcgcaactttatcgcaagttgggtgataacatgaatccagattctactgcagagaatataagagatgctcaggtagatgcaaaagagagagccacatcataatctcacttgagcaagtgctccagccccttctgggactaccatgttatagacctgtcaacaagctaaattaaccacctatttaagcgtgtaaccattccaagtgctggcctccttgttaactattgaatactctgcaacttttcatgctattgtccacgctggtagagaaacacagttagtttggcctaattgtcagctatgtatgtgttttgtacatggcccaacaggctcttgttcctgtaatgtcagcctatagtgtaaatcttgctttccagctgaaaaaggaacaccgcatctgaattttgtttattagattcagcagaagcatgcaggcatctgtagtttgagttttattgacttggtttggcagtcataagctctgttcttgctctagtaaagaattgaagtttcacattaaaaaaagggtaaagaaattgaagttaacaatatctgatgctccaaagtttctgtatcacctatgtcaatgaaccatgacataatcttagagattaatgaattctctcatatgactggctcaccactctcaaaaataagattcttgcataatttttttcatttgaaacatattacaagtggcttgaccgctatctagcactccctcctagtcatatccaatgataactactttactttttctagccatgccttttattggttctttttgggttttcctagtggcaatatgcccctctaatagttatttattttaatcctttttttttcttttgttggatttcacaggatggagaaatatggacatttagcgtaagatcctttgaggcacctcccccagaacgaactattcatgtgaactacgaaggcttcgctgaaggttattttcaagcagatctcttctgttggtcttatttatatttctattcccctctgtaatgtgttttttgaacactacacagatgtgagagttggtgatgagcttcttgttgatggtggcatggctcggtttgaggtggttgagaaattaggaccagatgtcaagtgccgttgcacagatcctggtttgttgctgccacgtgccaatcttacattttggcgggatggtagtattgtccgtgagaggaacgctatgctacctaccatttcatcaaaggtaaattcactagcatggcaaatttgttgctgcaagcctgtaatcaaaaagtaggctgaatggttatgtcattttgttgcacaaacagttcatgttttacatgttactactgaggtcagcccaaatgaattacctggtttactcaaaccattgtgttgtaatagtgaataatatctgcatatattcgaaaaagtccaccatccatttcttagaaagctttatgtggactgttaccaagagttattgttgttgagaaatgatgattcttatttctgtgcaacttctgcaggattggcttgacatagactttggaatttctgaaggcgtagattttattgcagtttcgtttgtcaaatctgcagaagtaattaaccatctgaaaagctatatagctgcaaggagccgtggcaggtaagatgagtataaatactctcttcttgattgagctcatacctccatgaagctaagtacatggtttgatggttgaactgatggcaccatatgtatgactaatactgtaactatccaactcttgtgcatttgctgcttttggttcttgtccaattctgtggtaccagttgggtaagcttttcagtcagctacccctcagatgatcagcttagtatgaacgcactgtttttaactagttattacttaaatgttgagttagccataacttgctatagtgtcaactcttttgcaccaacaatcttggtttttattaggacatggtctctttgttgttagtttctccaatcaattttttcgatttgtagtagagccaagtggactatggcagtaagttctgatgtgttgaagattgtcttggttgctccatacctgttcaaacaaaaaaactgatcaatatattattttgtactgtttctagtttagatttgcagtagtgtagtaattcacttttaggttgctttacgtgtattcttttatttctagaagagtgaacatgattaataaaatgcatgaatttagatggcttaagaaaatggaccatacaaatatatcggtatagtgtatagtgtttatatgtcccaaagaaccaagaaatattacatatatttctattaaaaaagctaggcattgcattcccgaaatattagtttcctttttgctaacctttatggttattgtatattgtcactcatcagcgatatagcagtcattgccaagatcgagagcattgactctttgaagaacttggaggagataatccgtgcttcagatggtgccatggtagcccgaggggatatgggtgcacaaattcccttggagcaagtcccctcagtacaacaaaagatagttaaactgtgcaggcagctcaacaagccagtcattgttgcgtcgcagcttcttgaatcgatgattgagtatcctacgcccaccagggccgaggttgctgatgtttctgaagcagttcgtcagcgtgcagatgcgcttatgctttcaggtgagtcagcaatggggagatatccagagaaagctcttagtgtcctccggagtgttagcctaaggattgagaagtggtggagagaggagaagcgccatgaggaactggaacttaaagatgtttcatcttccttctctgacaaaatatcagaagaaatctgcatttcggccgctaaaatgggtaaccactgccaactctacttctattgttggactgctgctgtatatatgaatcgttttttcgctgttacttctttttgttattgtgcattgccatggttattatcaactcagactactgaattttgccatttgcatatctgggcaaggcctaaccacagctaatttgagttgcagccaacaaattggaggtagatgccgttttcgtctacacaaacactggccacatggcctcactgctctcgcggtgccgtcctgactgcccgatcttcgccttcacgacctcgacatctgtgaggagacgattgaacctccaatggggcctcatccccttccgcctcagcttctcggacgacatggagagcaacctgaaccgtaccttctcgctgctcaaggccaggggcatgatccagtccggcgaccttgtcatcgcgctctccgacatgctgcagtccatccaggtcatgaacgtaccttgagaatcatcatgctcccctctcgtgtttgtttgttctgcccaaaacggaacacggctttagttgacatcatcttaagggcggttttctggtttgaaatttattcgtttgttctccattgtgttagacgacagaaccagagaatgttacaacaataatgctgcaacttccagcgcgttgtaaactctatgctatttagcctgatgtataaggccatgaactgttttgtcgcttactatgataggctatgtatttaccaataaacccttctatttaagctatgtaagaattttcctcatcagaaattactccttgctagagcccagtaaagattctttaaaaactccttgcacatcaaattagaactgagtagttttactttcatatggactttggccaaactagtcactaaccttttgagtgaaatttttaccttttttttttggacatgtatgtatgcagggtattagttgacctgatgtagccatgaatagtttttgcattggtacgtttgtttgaatagtttttgcattggtacgtttgtttggcatctgtcacaacccacaagtaggacgctagcaacgacataaaaatattttattggggcgtgaaaaatgggagaattatgttcgcaagagggtttgaccaggtagtcatgacattcttatgctaatctcaagtctcagccatatatcaaacatcttaatgcacactgcaacgtgttacgtgagtctcctgctaccgctagtctcccaagtctaccaaatacttgacccgtttttaaatacactcagtttgaaaccctccgttctaaattaagatgtttttgtttttttaccaagtcaagctttttttagtttgaccatatttatagaaaacataactgcgtttttagcacaaaaacaagtgtactataaatatagccagtaatggatttaatgaatttggtgtgttactacgtatttctatgagcttgctgaagaaatctgacttagaacaaaagactaaaacatcttacaacctagaaagtagaaagagtacttattagcatattctttccaaaatcaaaatttaacaccgccgcaaattttgaacatgatattctgtcaaaatattgtatttccaatttttttttcatggccaaattcaaaataacattgaaggtactaacaagtaaatgagaacgagatagtaaatatattattaggggcgtgaataaaaaagttgaacacagggttaccctactgttgtttgggggttaccgctaccccgtggttggcggttaccgtagtaaccacaaaaaaccgtgtaaaatttacctcaaaaaatttgaattaaaaaatcggttgttttggcacagttactgcatggtttctagcgataaccacaatattcacatggttattgccggttgtatagcagaacacatcttaactagtgaaaactaaatcacacgatgcatcaaggaatgtgccacgccttcaaaatagtggctctgttcggttgcaatttttattactatactgcagtcaataggaacagtgtttgtactgcagtcaataggaacaatgttttgtattggcagctgcagcagtgcagccgctgcatataacagccgaacagactcaatattaattgtcagatatgctaatagtgaaacgacatatgtcgttggataaacatagattacaaaactacaggtgctggtaaatcttcatgaggcttccagagtctccaaatccaaactgagataaatcggtgaggagagagatgtgcaatactgtaagctgaggacatatgtcaatgcaattttgtaatttgatccttccataaaattcattatatatataagctcttaatttaatatatctttgatttcttgaaatggtcgcattgtactaccttctcaacatataagaagtttaggattcaatacggatatttaaaaaataggtaaaattcaatgatagtagattacgattgattgaaatgaggaaaactggtggaatgttgtaattggttatttactcaattttttatggattttttttacaatttttgaccatgtataataggcgggtttgagtcacgcgaatgcgtgacttcgtagcctagtgaaattgaaatttcactagaaaaaattcgaaaaaaacacttaaatgtgtgcataaattggggataattggaataatatatctaacttttggggtgtaaaatacaaaaattcggcattaatttttctatattatggacttcaaagcaattcaacattttatagcataatagcattacttgcatattgctaccatatttcacacgagcaacaaatgacccattattattacaataaatatccatccctaaacatgagcatatctactcacccaacaaataacatatcacctctacaaaaccattttccgcatcactagcaaaccatttttcacctattcacaaaatttcaaatctcaacaaacatcaatctttcacaatgtatttgacctaaacccaatacattttttctttttctaatttctaaactatttttgattttgccctcaaatttcaatttatattactctatttccaaaaacttcttcaccatctgccactaaaaatcaagaactacatccatgaattcttttgattttttttggaattttcaatttgctcgaatttcattcaaaccatatcgcggaaaaccgttactgtgccccgacggtaaccgcaattattgcgcgataaggtaaactctgattgaacgatgtagtatgaaatctgatactccatccatcataaaaatataacacatatataaggtagagtctctctacctttttgcttaaaaaatataacacatatatctctataagtgaatggtgaatcccaagaattaactaggatgagccacataatcaacaaaataatagccactggatccacatgaagacaaaatagaaagaagaaatctgagccattggattcactttatctagaaacttccttaacctactaaaaaactagtaaggttatggatatgattttacaatgtacacttttatttaaaaaactattttgcaaatataccctattactctatctatgcaactttcctttgaggaaaaaaatacaaatagatcattgacctatatttagaaatattcaacaaatgttgtgcatataattttacaactctcacggtttacaaataaacctcattttttaataaagattaatatgatccaactaagctttatatcattcaaagttatatatattagtgatgagcatatatatgtgtgtgtgatatgctgatgtaactattagttatgcacccattaaagatgttatgattaatcatcattacaaatttaagcttattattgctaccacaatctatagacatatttaatagagagggagtttatagttgcacaatgcacaacttaatataggatgaaccacataatcaacaaaataatagccactggatccacatgaagacaaaatagcaagaagaaatccgagccattgtattcactttatctagaaacttccttaacctactaagaaaaaacagtaaggttatggatataattttacaatgtacacttttaattaaaaaactattttacaaatataccctcttattctatctatgcaactttcctttgaggaaaaaaaatttacaaatagatcattgacctatatttagaaagatccaacaaatgctgtgtatataattttacaactcacacggtttacaaataaacctcatcttttaataaagattaatatgatccgactaagctttatatcattcaaagttatatatattagtgatgagcatatatatatgtgtgtgtgtgtgtgtgtgtgtgtgtgttgtgtgtgtgtgtgttgtgtgtgtgtgtgatatgctgatgtaactatcagctatgcacctattaaaaatgttatgattaatcatcattacaaatttaagcttattattgctaccacaatatatagacagtatttaaaagagaggtagcttatagttacgtgatgcacaacttaatatactagtatacttgagtagatacaacctaataaaagatttggtactatatttttttatagtactatatggtatatatcactatattttattttatgttggaggaagtattcataggaggatatttcatctcgaacctatattaatgaattgacctgcagccggtctgagtcgaaggaggtattcgtcatggactatgactccttctacgagtctcctgcaaatctcgagtctcagccgtctaaccaaacatattaatgcacactgcaattgacttctgttgctagtcccctctagtcgtctcgcccgtccaccatattagtgcacacgctcatcatgagtaatgacaattgatccattgaaccaggggttagctagacgtgtttttttttctcaaaacggattaggaatcatgcttctcatcttaatttgttcatcggcatttcttaaaaaaatattttctaaatcgacttttcaaaatttaaaatatatttcttttgtttgttccttcaaattaatttctacaacagaaaattataaaactttatagttattttgggttggtaatcatcctatataataaagaacgatccaacggctatggtattcttgatgatgtgtctacatgtaattgcagataaatgaggctaacttgtataggaatagtatatttggtcaagctaaaagaagtgacacgtgaaaatataaaatttagatatggaacaaaaggattggaagattattcagagctgagaaaaaactacaataacccgatggtgaaatttttaattaatattttaacatcttgaaaagtttgcttatagattcagatggtggtaactcgaagctaataaacacaggagtgagtgcaattcactggtttaacatataaaatgttacatacacgtggtttatttgcctattaaagaaagttgaaaaaatacctaaaagtttcaaagcaatttaaatttacagaagagttgagatttgctaaaaccacatacatgtagaattggaggaactattaactttgcatggaagtgcatgcatgtgggctggggatacattaatgcctacaccctctattttgcaagttataaacattcatggaaattttagcagaaattaagactaaagtgagaaataattgtgattgcttgaaatgagaatgtaaattaattaatttaacaagaaataattataattggatgagacaaacgagtagatggagaaatgtgaaatcctataacacttatatttaaaaatggaggaaataaatttatcaatggtgtacatgtcctttgtacgtggaagccagaacagaagtagagccacaagcagacaagctaacagcaatttgcaccagtccagaactgagaatgcgttgaataagccaagacttgggccgagtttagttccaaactttttcttcaaacttttaactttttcatcacattaaaacttttctacacacacaaactttcaactttttcatcacatcatttcaatttcaatcaaacttctaattttaacgtgaaataaacacacccttctcgagcgggttctaggtctttgggtcatagattaatttgagaatgtgtcggcttctaatttcgtccaaggcatgagtcaagtcgtctcctatcataatccatgaaaaatcagtatataattaagtgtcagtgtcaaacactggactaaatttaatttcaataggtgtcaatgtaatgagttgactaaatacgagataaatccaataacacataagtatatactaagtatatatgaaagatcaggaaaaaaaactaattatattgtaatcatttagctcttttctatatagcaaacatgaacatatgtcgaactgaaacatgcatgtgccctaactgttgggtgtgtgtgtgtgctgctgggatcgccactgatcggtgttcaatgtttcttaattatgctttccattaatacattatgacaatataatgatcagaactccagaagagtacttggctagcttgccacttgaattgttgtaatgtgaaagatcatctgtgctatatttatcatcaccaggattcaaaatgttggcctgtaactatatagaaccagagacccattacgtaaatttaaattaattgttcaaattttgaatttatatttaaagcttatttttccacacccggttataggttggtaattaacctcctagttgctgataattttctttttcaaaatttcagtttgcaatttcgtcctgtaaatttccggtaaccagcactccagcagtaattaattagccagttaccggtctgtgttttcttttttgttaattaaagactgtcatggtcgggattacgtacaagcgatgaagccagagaatagtgacaatgatcgattccatttgttttgattcagtttgtcacttgtcagcttgttatccttgagaagaccagtagcagggccgtcccgtcaaattcggaggtcctgtgcaaagttgaaggataacaacttaattgatgatataatatgaaaataatttatactctgtaatatatttcatagcaatctagaatgacctaaaatgataatccaaaattagggattaccggattagaaattatcagaaagaattagataggggcgcggcaggcgtcaggtggcacgaccgcacgagagaaagaggtgaggcgtcgtttactcctctcgttcgttgtgattggcaattggcgaggttcacagtgggaggcgattcaagattgtgaaccggtgcaactgtgcgaaccggcaaaggcgtaatcgaagccgaaacgacgagaaaaataacagattttcggaactagctgggctaccaatttacttattgagttgtatatctagtgttgaagttttgggcctaggggccttaaaaattgggggccctctgcgggcgagctggccgcacacccctacggcttgtttggcaacttgaaggaaggggattgtgagtttacacgagggaattgatggttagattaagatgggaatttgatttttaatcccagtatcttatttggtagatgttgtggaaattgatagggagtttagttggagattaggtcattaatgaaaacggatggctgagatttgtttagacaaaataaatgaggaattccctcctaattaccatcccctacccaggtattgaaaaggagggagttcctccctcaattccccatctccatcccaccaaaaatcctatgtatcccattcaaacaaagcagttaatagcctaatccctctaaactcccaattccttctaaaaactccctccaaccaaacggacggggacggccctgaccagtagcaaaacaaatggaattggttgttgctaacaaatcctgtaattgaagtacaaatgcgaatacacctagatgtacccaccttttatatgaacacatacatatacattaccaatgaatacacatctaaaagactaagccggtatattgaaaatatattgaaagtaacgaagtaataagagctttgttgtagtttggcacatatctacattagtgaaaagtaaatttcaagatttcatcacaatgagccacgtcacatattgattcagggccattggatcagaagcaaagaaaaggtgaaatgaatattaaccgtccgatgtacagagagaaaggcaatcaaaaagtgggattctagacaattccacgataccttacccagcgggagaacaaaataatctactactacttaaaaaataagaggtgcttccatcgtccgtcaaaaaaaccgggtaaaaaaaaccgggcagaaaaaaccaagtttgtccgataaaaaaaccggacgaaaaaaagtccgatccaaaaaaaaagtgaaaaaaaaaccgggcgaaaaaaacacccgtccctggtaaaaaaacacccgatcccttaaaaagggaaaaaaaaagtccgagagacaaaccgtttaatgaataaaaaaagcgaaaaaaaagagtccgattccctggagaaaaaaaatctgatttccctgaaagagatccgatctgtattggattggagaaaagaaaaaaaacacttctctaggtgcttctgtcgtccgtcaaaaaacgggagaaaaaaaccgagcgaaaaaaaaagaaaagtccgataaaaaaacctggcgaaaaaaaaccgggcggaaaaaaaacaaatatgtccgacaaaaaaaaaaaggaaaaaaaaggaaaaaataccgaaacgaatccgactacatcgacgcggtaaaaagagtttaaaaaaataaaaagaaaactgtcctattccaaagaaaaatgaattatatgtatcatggagcaaaaaaaaaaagaaaagtccgataaaaaaacctgggcggaaaaaaaccgggtggaaaaaaaacaaatctgtccgacaaaaaagaaagcaaaaaaaggaaaaaaatcgaaacgaatccgactacatcgacgcggtaaaaagagtttaaaaaaataaaaagaaaactgtcctattccaaagaaaaaggaattatatatatcgtggtaaaaaaatcgaccgggcgaaaaaagaaaaaaatagtccgatccgaaaaaaacaggagaaaaaaaaatgggcgaaaaaaaaatttgtccgataaaagaaaaggaaaaagctgaaaagaatctgactccatcgacgcggtaaaaaaaggcgaaaaaaaactttccgataaagaaaaaggaattatatgtgacgcggtaaaaaaaataaaaaaaccaggcgaaaaaaaagataaaagtccgataaaaaaacggggcgaaaaaaaaacaaatctgtcctatccaaaaaaagccaaaaaggggaaaaatcaaaacgaatccgactccgtcgacgtggtgaaaacagggcgaaaaaattccaaagtaaagggagaaaaaaaatcaaaacgaatccgactccgtcgacgcggtaaaaaaagggcgaaaaaaatccaaagtaaaaggaattatatgtgacgcggtaaaaaaaatcgatcgggcgaaataaaccaggcaaaaaaaaatctgtccgatccaaaaaaagggaaaaaatcaaaacgattccgactccgttgacgcgataaaaaagggcgaaaaaattgtctgtttctaaagaaaaaggaattatacgtgatgcggtaaaaaaatcgaatcctattatatcttgaaaggtttgacactatgtgaaagtggtgaaaaaaacccttcgtaaaagaaatgcacgagaaaaaaaattaaaaggacggaaaaaagcgcggaggaaaaaagtcaaatttatattcgtcgttttttagtccatttatatatcttctttatctctaatctaatctaatctaactataaaaagagaagtttctacagtatattaaaaaaggaaaaaatgtgcgagaaaataaaaacggtttaaaaaaacacgtgagggaaaaatgtcagaaaaaagcacaaaagaaaacgcgctagaaaataaagtttcgtagttctaattttctgattgttatcgacatggttatgcatgaaaaacgtatattatcattacgttttttcacccgttgcaacgcacgggcatatttgctagtaataataaaaaaaagagagagaaaaaaacagctacaacaacgaagcgaaaaggcggaatacggaagcgtggagggcggaggggtgatgggctgatggcagatgtaactaccttattacaatttagtcctacgataaaaaggattttaaaaactagcctcataagtacaaaatgtatatccatgttaattaaataattagccctatgctagggatataaatttatagctaacaactttagtacctctacatatgtgaaacaacaagcgttttaaaaggaggatgagctacatcatctacaatgatatggaccgttcgatgaactggtaaatgaaaatacaccattggatcatcatgctcatctatgactgtggaaacacgttgaaccaatccggatgattccagatcatcatgctcatctcaaaaagcagagaactcatgtgcttagtctatttaacaataccgttcaaaaatagtctttttaacactatacatatgtttaattaatctcctgactaaataaaggaaaaaacatatgacgtcttagctgtaaatttatattgaatttatatgcaaatttatatctataatgtacgagagtgtacacacaaatgctatgttatactactttttgcttggcattggaacaacacacaacaactaagtagcatccactacgtaccaattttattttaaaatagtccatacgaatgcacacacgcacaccctacagttaggagcacttagtgttattactgtctccactctaaaatataggtgcctttaacattcaaaatttatcctaacattcaaaatttatcctaaaatatagctatttcttcttctactccctcatcttaaccaacatagtcatatcctatttaatttcttcgcctattttctaatgtcaatcaattacaacgttcctccatttacatctctagctactgcatcattcccaaaataagtatttctataattcaaattttatatacaaatataaacatttctaagacactaatttcaatacatattggagtagctcgtgttcggaaaaagccaattggagtagctcaaattaaatttgatagtaagtgaaaaaagagatcattcctccttaatcttactctttactaaacaaactagaaatacttatatatagaaattaatgaagtatattagagaacaaagaaaataacgtacttacgaaaccagtcccttcaattaatatcaggatcaatggtctaattatataggtaggttatgctaacactcagagtcgcgcaaaacgcgactaagtagctagtctataattgaaaactaaatctagaactcaaactttcaaacttaattagataaaattatttcaccattaaaaaaaaatctaaccttcgatttgtactacgtacgtacataatccggatcatgagacaaaggtggtgttcttttcttctaaagatgaagatgaagattaagttttttatgcaaaacgatttggtattaacgtatgattaattgagttttaattattacaaacttgaaaaatagattaatatgatattttagagcaactttcatatataaagttttcgcacgaaacacaccgtttagcagtttgaaaagcgtaccacagaaattttaatcttcatccaagtcttgttggagaaaagaacgaggccaaagcctgttttctaaacattaatcatcaaaccatgtttttttttttgctaaaaccagtttcaaaaaccttgatcatcacaccgtccaacatgcttttccaagtttccagcgtctagtcaactttccgggttacacaaatcaaacaagcttttattattattttttgtcaccagtttatacagctcagtaatttacacaaatcaaacaagctttgaaaggatcaaagctcacagttaagcatttacactcgtctaatttggtccatttcttcaatccccgccattaatacctttgacttttttttaaaaaaaaatagacttcatccttgatagtactttttaataaatcactggagggatgagattcctcacaataattttccattacaaaggattgaagagaaacaggattctttgaaacaatataatttttttaaacaccaccataattgattggccgcgttataataagaagagtgcttcattttagagaaaaaacaataccaaaccttacaataaatagttgataacaggaaaactgtgctaaaaccccagacacgacctagctttcctaaccaccaagataggactagcaccatccaattggacgactccgacttccccagaaaaatcaagggaacaagatgtcaatagcccgaccgataccaacttctaactccctggacttaggaactgctccctccatccataaatatttgacgccgttgactttcttaaacatgtttaactgttcgtcttattaaaaacttttgtgaaatatgtaaaactatatatatacataaaaatatatttaacaatgaatcaaatgataggaaaagaattaataattacttaaattttttaaataagacgaacggtcaaacatgtttaaaaaagtcaacggcgttaaatatttagggacggagggagtacatccctatgtctatcagggtttaactgaacatgacaggtcgtgtacaaattcaagatgagaaatgaggacccaagtaaatgttggactagttcaagagatgtacattcctcttttaatgcctacactatcgcagcaagagcacatcgtaccaagttgaacaaaaaacaagtggcagagctctataagttcttaagtactccttgtcatgatgcatgcccccttcaatctcgatctgttaattaaatccatagaagagtgaagcctttatttttctcctttttcgaggagaagagtgaagcctttcaatctcccgttggtacgcttctccgaactctagctacgtcgaaaaagtaatgcttatcatttgattgatctcttattttgtacttgttgtgtatcacctcatgcaaaacgatatatcttggcctcaaaaatagttctttcgcatagaaaggctttatttgccaaggcaaatacctgattcttttacatttacagttataaaactgtcacgatagcggcattagtagacggcataacgctattgaagattcaaacttgacaatactgagacaatttgttaacaagatttagccaaaatctacaacccgaacttgataattataatatataaggaatcaacgagccttaggcctcccagtcgttctcttgtctagccatgcaatcatctcagatggtgcatctcttgtttaaaatagtctaaaataagagtttagctacaaatccaatcactaactgacaatgtaaacatatttaatacaaactctaccttggcgagtatgctacaccaatttgaattagttccgtgtacatttgaatctccgtgcacctgggcttaagctcattcattgctcatgcggagctatctgataagccttcaccaggtcgttcataactagacaaattattttgtggatttgctctaaattggttttttccaattttcctagcaaaactatagttaaaatttgtttgtgttcgtatattgtgaattgtccattttttctcatgtaattcaataaggtatgagagttagatgttttaagttcaagtcctaggtagcacaattaaataaaatcgtataactcatgtatattatattcgacgtttgagatataagggaccattgactaaggaagccttgagcgaggggaagttttccaatatagtgtggggggagtgttggaatataagtattcgctcgtcaatttaattaagcttttagattgaattgattggtgtccgcaactcaatattctcaatatatgccgcagatcacacctagacaatggaggttagcatcggcaagccagatgacgggcaatcgcttcttgctaatgttgaggcctccgatgaccatgccgcctttgatgccatggccacaagctcgcgccgtccacctagcttgcgccctctgcggcaccccaatgtgacatcccttgcaccagtaagtcacctcatactcaaacttattgatccattaattctgccatagcagacatgaacatgaaagggtgggtgagaccgtgtttagatgggactaatcttttaagtccctatcacatcggatgtttgacactaattataaatattaaacgtagactattaataaaacccatccataatcttggactaatttgcgagacgaatctattgagcctaattaatccatgattagcctatgtgatgttacagtaaacattctctaattatggattacttaggcttaaaaaatttgtctcgcgaatcagctttcatttatgtaattagttttgtaactagtctatatttaatactctaaattagtatctaaatacagaaactaaagttaaagtccctggatgcaaacaccacccgagtcattgtcgtttgtcttctttacagttgccaccactccatcgctgtgtaccacgacaaaccgaggtgatattcccgccacttgactcaccggactcctccgagctgaagaaggttatgtccatcagcctgccagcaacaccaaccggctttgccgcacctgttgccggtgccagcgactcgtcgggcatagatctccggaggcaagccatggcgtcgaacatgacacaaaggctacagcagcgctcgccaacgtcgcagagcaacaacggccggcggctcacagacgagacaacagcgttccagtcacccccgcctacccccggtggcggccggtcgtcgatgagccgggacaaacgctatgattcattcaagacgtggtcggggagactcgagaggcagatcagccacctggcgggcatcgggccggacatcccttcacctgcagggcaagtcgtggatgccgccatggatagtcaccaccattctcacactgtgtccacgcccgaggttggccgcttctttgccgcactggaaggccccgaactagaccaactcagggtaagctatagaaaaataaatgaaacaaccaaaaaataattcatatatatattagcggtttaaaagccaatgctgaaaaataagctacaactcgtatagtcggaggaggagctggtgctgccggtggataggacatggccattcctgctgcggttcccggtgtcggcgttcgggatctgccttgggatgggcagccaggcgatcctgtggaagaggatcgcggagtcgccgccgacgacgaggtacctgcacgtcgccgccgacgtgaacctcgtgctgtggtggctctccgtcgcgctcacctgcgccgtctccgccgtctacgcctgcaaggtggtcttcttcttcgaggccgtccgccgcgagtacctccacccggtcagggtgaacttcttcttcgcgccgctgatcgcctgcctcttcctcgccatcggcgtgccgcggtccgtcgcgccgtcgacggcggcgctcccggcgtggctctggtacgcgctcatggcgccgatgctgtgcctggagctcaagatctatgggcagtggatgtcgagcgggcagaggcggctgtccatggtggcgaacccgtcgaaccacctgtccgtcgtgggcaacttcgtcggcgcgctgctgggcgcgtccatggggatcagggagggcgccgtgttcttcttcgccgtcggcgtggcgcactacgtcgtgctgttcgtgacgctgtaccagcggctgccgacgaacgaggcgctgccgcgggagctgcacccggtgttcttcctcttcgtggcgacgccgagcgtggcgtccgtggcgtgggcggccatcgccggcgagttcgcgctcggcgcgaggctcgcctacttcgtcgccatgttcctgtacgcgtcgctcgccgcgcgcgccgtcagcctcttcggcggggtcaggttctcgctggcgtggtgggcgtacacgttcccgatgaccagcgccgccgccgccaccatccgctacgcggcggaggtggaggacacccgcctcgccagggcgctctgcgtcgcgctcgccgccgccgccacgctcaccgtcggctgcctcttcgccaccaccgtcgtgcacgccgtcgtgctccgcagcctcttccccaacgacgtcgccattgccatcaccgaccaccgcaaggtgaagcccaagcccaagcccaagaccaccatggaggtgcactacaagatggatggcaatggcgacatcgagggcggtgctcctgccatgacgccatcgccatgcatgccgatggcgacggcagcttagaggatttcttttcttttctttttgacctgccaagccaacgcgtccacatgcacatgcatggttttagcggtttgaatttgataagatgaatatttgaaatacaaagtgcctatgaaaatttatattgttaatattttttgagtaagttgaactttatgtatctactagaagatggtatgtgctttactgttaaatactccatccgtttcaaaatatttgacgccgttaactttttctcacatgtttgaccgttcgtcttattcagaaaaaattatgaaatatgtaaaactatatgtgtacatgaaagtatatttaacaataaatcaaatgatatgaaaataataaataattacttaatttttttaataagacgaatggtcaaacatatactaaaaagttaacggtgtcaaacattttaaaacggagggagtatatggattagatgactatatattaaatgttatagaaatgataggtaaaatttagtttaatatatcgtgaaaataatgtaagtaatgatgatttagcatgtttttatgttgaactttaaaagataataaatcataaatataatattatagttttaggtgtttaatgggtaggaactttagagtaggtataagtttggttacatactttgagcctgtgacgccctagaataatcggggaaaaaaaaagatggagcaggcagcagcagctagctagctgtagctggcggcccattttgctggtggccttgggcccatttgcaataagcataaataaagcggaaaaagttcacttcagttccttcatctgtcatcaagcttcaaaccgttcctaaaccggaatactaaatataatacatccattatctttcaaaaccgagtcacactaaaggtgtgtttagttctaaagttttttttttccaaactttcaacttttcatcacatcaaaccttacttttcagtcacatcgtctccaacttcaaccaaattccaatctaaacacagcctaggtagtaaggcaatgttgcttccggttttaacagacgtagcactcttaaagcaaaaattaaaaaaaacataaaaaaccacgtgggatccgcatgtcagtgaagctttagacggttgacttaagtgaacgagctcctgctcgcgcatcggcctggcgcgcctctcctgctctgttggaccgccgcgcccagagcgctcgaccagtcggcgggcgatggtcgccgaggtgggcgaggaggcgggcaccgcggcggaatcgcatcgggagcggaacgccatcgccagccgcatccgccgcgccgacgccaccgcagcgcgtcgcccctacatcaagtgcaacaactgcggtgatgtccgcatcgtcaagtgtgaccgcgccctctcgacgactggctccgcgacgacttccccaaccaccaactctgcaaggtgcttggccccgatcgatcgagctctttttctcgccgctcctctacgtctaggtacagtacaggcctccatccatcgatcaacagtttattcagcgcatatgtttttgacccaaactcatctacgtgtgaaaattgaaaatcgaactactgattagctgatagttggagagcctatggggattcttggtgaaaatctatgcaagcttgtgtggtacgtcgcaggtgctcaacgtcgcctgaggcggccacccggggcgcgtcctaccgagcacaccgctgcacgagtggttctcgcggagtcgctcgacggcgaggataaccagctgatggtgaacagctaccactgcaccaccagggagggcgtgcaggcggcggctggcggagcggttcgtgccgatggcgttcgatctgcgctccggatgcgattctgccgccgcggcgccggcctcccgccacctccgcgcccatcgccgcggcggtcgagcggctgctgccgtagtcctcagcggtgcgctaggccgatgcgtggccaggagtgagttcgttgaagccaaccggctaaagctccactggcatgtgggttctatgtagttttaattttttttaatttttgtttttagtgccacatcagttaaaaccaggagcttaaccacttaaccactcggatgctatactaagatgaaataattggcctcactctcctttttttttttactatggtttagctaaagggccatgcattgcaatggatactataagagataaaagaaagtaaaattacaagtttatagtattggtatatttttagaggggttgtataggtagttaattagtcatataatgtcatatccaaaataaaattattcacgtgtgagaattttatgctgttagcttataatgtcagagacagatccgaacatcatcactaacattatttaagatagtatagctaccgagagtctgtgagtcttgactagcttgtgagtaatttttagagaaagtaaatcaatttactaggctgtgaaaaaaaaacgagcaagttaacagaaagtacacgcacgaggcgtcgacatacacggacgtatatacgtagacgtcgcggtcgtatggccgtacgtctctctgtattgcttctagaagcatcctcaagattggtcagctgctcgtctcaaccgctgctaaacgccgccaagctcttgactttcgaatagccgtactccctccgtccttaaaaaaagcaaaccctggttttcgtgtccaactttgactgtccgtcttatatgaaatttttttataattcgtattttcattgttgttagatgataaaacatgattaatattttatgcatgacttgtctttttaatttttttcataattttttcaaataagacggacggtcaaacgttggatacgaaaaccagggtttgtcttttttttgggacggaaggagtatagtatatgatcattggtcttttctatcaatcgattcagattttttttattgtacttaattattgtttttgtgattgtacgacgtcgtcctagccattattttaaacagttttttaatcctactgcctctacttaaaaacaaacttcattcgtggctataaatctaaataagcacttgtccaaattcctatccatattcacgtaagtacaagaatcgatctaagtattgaagagaagagcggaaaacctgagtaggtcttatatgtagacaaatgacattagtacattataagaagttctgagtatcatgacagagtcaaaattgtgaagataatttaaggctcctttgaaatgtgggattgaaaaaaaaacggagaaataaaaaaaacactgagttttgactgaaatgcatgcaagtataagatagagattgtaaacacacgtgaaaaatataaaagtagttgtccgattaagccacatgaaaatattaggaattggatgaaagagttaaaagaagttagagctcttcctaactctccttcaaaatcttgagatgattgtgcattccacaagaattttaaacaaaaggttagggttcaaatctttgtttttaatagggattttattttcgattatggttaaaatacaccaaatttcctttttcttttacaaatcaaaggtggcctaagtgccgggacaattgaatttggatagtggtatatacatatactgtaaactaggaaatcataatgttttagcacttcctgaagattgatcagattttttttatggtctctgttcatctctcgaccattaattattcgttggtcgtcccaatctaaaagagacgtcaatattgaagttctcgagccccttaaaatgtccctaaacaataaatagtgtttcttataaatgtagtatattattccttggaaaatatgactaacttagttagaaatttttttaaaaggagagatatcattataaacgaggtaaattgaacgttaccaatcattagaggtataaaataagccaaaatagtttggggttgcttcgagggaataaaatgaatttttcttacaaaaacaaatcaaaacagaaatcctttagaaaacttaattatttcaggtcggcagtgacaatgcaaagcatacaacaaacagctgtctgcagcgacagtcaaaattttggcttttttagaaaaaaaaaaacgtgttcctttaattttgagtggtaagagtcatgggccctgtttggttccatgggctaaacattagcccccaccttttagccatgaattggccctcaagtatccaaacatgtgggctaatttttggttaaagtgaattagcctccctccaaacattagcccctccaaggggtgctaatggggctaattttgcatggggaccataaaaaggcagccctctctctccttctctctcctctctttttactctctctccaccttttagtcttgaattagcccatggatccaaacataccactctgggctaatgtttagcctaccaattcatgactaaacattagctctcaaaattagccatgggctaatcttccaaacaagcccatggaatagaagcttctttgccggcaaattaaatggtcgttttcgcacacgtgcaaacgatgaatcacgtatagtttataagttaattactttcttggaggtatgaattaattattgcataggatcgatggcgtggtcgttgttcatgagaactgagaaagtatgtgggagcttaagatgtgtctagcgtgttacacaggcacaaaaggtatcgtttttggcattgtaaagtaagtaagtcataatttatattatgacacctaatgtttgtaccaacatccaaaaactattgcataaggacaagggttagcctctaccaaaatttaaattttaaaagtaatatattttatggtattttcaacgtagattatttttactttggatttttaagttgctaagtactcctacctatagaaaagtttaactcataaattattatttaagtcattaataagtcgtttatttataatcggctcatggacaaccaataggctctaagaaagaaaactccattttacttcctcaatctattcaattaaattatttaaccctttcaactaattaccccctaaacagttgaaaacacaattcactttactcttaataacatttctctttctcttacttttcctctttatactagtcatatataagctgaaattttgagagccgtagatgacaccatattatcaaagctcaaaagtatttcaatttttcatgactgattgctttttaaaaaatatcattgtttgaattagtctttggttctttcaacctatataaacagtgataataaatttataaaatgttgtgatgcgagttataatgcacctatgatcgtaccaaatttcagtgcaaactatgatttatatagaaagagaaaaaaatggaaaatacaactatggagtaaaatgaattgttttgaatggtttgggtgtaaaatgagccaaaaatagttttggggttaagaatattttgagagagtaaaatatactttttttccaaggacaatacctttttcatatgaatctttttgttataacaaacttggctactttctatattaaggatagactctgcaataaataggggcaaacaaggaaaaccatatataaattggtatgcatgctttatatttgaaacaagatgagaaaaactatatgccttatagaaagaaacagatggggtacatacatttgataatgttttttttatgacttggacgagtagtggctaagctattttgttatttagttgctaacctttcaataaagcatgcaaaaagggtagttgcttgagatagcgtaccatgattaatttatgtatatgttttttagcatatttaaaggcaaaaaattttcatgcatttgtgtacgtaaaaatcgcaatgttatccatgtcatttcacaatgtttatccctaggcaatgtcggaagtatagcaatattactaatactccctccgtttcatattataagactttctagcattgcccacatttatatagatgtcaatgaatctaaacacatatatatagctagattcattaacatctatatgaatataggtaatgctagaaagtcttataatatgaaacggatgaagtagttgtaatatgcatatgctgaggaaaactacaaattgtactgtgagatttatgttccttgatggcatatcaattaattaaacttagctatcctttgtttatttgcatatttgtggagtgattgatggctccatagtatatgttgtcaaattttccatgtttatttagatggcatgcatgcaagaaattaacaataatatatgatcaattttaaggtctaaaaagacttctccatagtgataatagagctgtaatgtgtgtgagtttttgtccaaatgcatatggaggcatgtagacattcatagaaaaagttgatgacacaaccaatttagcattttagccacaaaaccaaaattctcaagtcagaaccaaacagccgacctaggaaactaagcccacatctaatggcgccatgcatgaagataagatcagaaattaagccatatacatcaaacccacacacactgacacagacacatttgcaagaagacatgaattgcaacatacactttaacttgacacaaagctatccataatctctctcccccatctgtaattaatcaaaccaaaaacctctcattatatatccccgataagatatcatcatcacctctatccctatcaagggcttagcgtgggagcagatggctttgtggcaatcaaacaaaggctccaaaaaggcattgctttcatgagggagaaggttaaaaaaatgaattttacattttgtggagtgaaagtggtgtgtggacatgtggctggtgaggccactgttctcccattcatctagaatgttgaattcccagcatcctatttatgttgaaaaatagataggtcgcaatcgcttatacgtgtatgcataatattatgtgtttgcaaaacctatgctccatcaagatcaacctcaaaaagaaatggagacattgttatcctctttcttttgtacactctctctggatttattgattatccacttgaaaattttgtaactggtagcatatatccaccattgtaaacatactttctactttgatagatcaaagttgtggcaccatacaagtttgcactccattattgacccactgaaatgtgcaataatgcaaattcatttatgtattcatggatacactactctattattgacttatgtgttcatacctgaggtaattgttatttgtgcaaaattataagacaattaattaaatggaaataaaggacaaaagaaaggtgacaaaggctggaagaaagtagaagcattctttagagctaaggctagcagtatcatctgcctgctggtggagctcacaatctatacatgatgcattcaataagccctttcttgtcctgcatgctacactgcatgtgggcccaggacatgttatggtcatagtgaccccactattaagtgcaaatgaaagtgacctttcatgacttttgtagtactgctatttcatttgagaaaaggctcttggggcaaatcatgcatgcatccttcatgatttccctaccaaatcactacactgcatttatttgagaggaaaatcactctacatgtctagtgttgcctttgtatatgtgtatggttagtgtaataatttatctgccaatcatcacaatgcacttacttgtactgtagttttctagggcttgaccatatgaaaggcattcttcaaccactcaagtattcaatatatacatcctgaataataattacttgggttaccaactggtacatactggattcatattaaccaaagtttaccttaattttctttgtttttttttgaacgaactggtacaaggtggtgcaaatgtaatttaatagatatctaggaaaaaaactttctatgcaagtatgaaaaggaaaggtataaaaaggaaaaagttctatacttaatttttattaatgcaacattaccttctgaaactagatcatttatactactcactctgtcccaaaataagcgcaaccagtttatgtgtccaattttgatcatccgttttatttgatttttttataattagtagttttattgttattagattataaaacatgaatagtactttatacgtgacttatgtttttatttaaaaaaacaaataaaacggacgattaaagttggacacggaaacttatggctgcacttattttgggacggagggactatatatcaaattgaacaacaaaaaaaaatgttcattgttgtgatttttcatattaactaaactgatctaaatcttgcaaaatcttaatgagagcaacattgctgctgactgatgagagaggtagcagtatagcactgtcttctttttccttggaagtcagctgtagctgatgtgatcttcccttttcaagctgttcaatttgtagggcctgatcttccctttgattgctatgcacattgcaatgttctgaaaaacaaaattatggtttcagaatgtctatccatagatcctaatactgctaggccttagaacacttgaagaactacactcatgcttataaggctgtgtttagttcagctcaaagtttggattttggttgaaattggagatgatgtgactgaaaagttgtgtgtgtatgacaggttgatgtgatggaaaaggactgaagtcagcctaagttacaatgatctttacagtgatcgatctgcctttcttgctggtgcaacctatgatcctctacctactcactacaagtagttcctttcaatattttttggagtataataatctaagagcctcgatgtttgccaatcatccaccaccaaaaatttattttggagttaattttaagttatttttaacgtagttacttttttagcgttagttttaagttgctaaaaatctggtttttaaatcttcggctatagtagcggttatctccagctatagctatttgagaagggtctaactgtttggtctcatgcacaatttacctactatagtttcatttagtccgctataactgtttgagaaagccaatcaaaacactgctacaaacatatatatgcataaattttactcagaaattattttttattgctaataagctgttttggcatataatcagcttttggccgattgatggggctgtaactatgatgcattgatctaatgtatgaaacgcattatacttcacagtaagttaaacaaaccaatattgttgagtttattcatcgacattttttttaataatgtattttataaaacctagcctctacaccaatccaacatgagtgtatacagccacttgtgcatagacattactattaattagttagttcatatccagaaaccagtcaatcaagcagaagcagatcatttcagataagggcttattttaccagggcatgacgccaatgacggcaggatcacactaaaagttctgaatttcttaagacagattagcaaaccagttgtcgacaacgtctttactcagaacctgacaaggcaaaccatgtgtagagaactagagatgacacctctatcaaaccagagttaaattaattaccataaagttaaactatagttatggatgcgtcacgcatgctcaaactaaaatatcctatgtgaaattgccaaaaaaaagtatattaaattaattataaatattattgctacacgaatggatgtgataacatctctatataaataacaatcaattaattaccattatcaatggacgtacttgtgtaagacaaactccccaaatatatgatttggtgtaaattattaacaagatgagatcgtcatagaatatgccaaacttgtactacattaattaattaaactgtctacaaattaatggtgacacattggtccacaagaattgaactagatagtcaacttaatcgcgcgcaattcctttccatggacaggaaattggaataggtatagtactataattttaagttacaaattaagatgagtactgaataatatttgcaaggcacgaatggaaagcgacacatatacatgcaaaactgattttggaattatcttttcggaggatttggatacgctaattatattagggagttacctttcgtgttatcgggtaattaagttccatgaagtacctaacatatattttaacatgatgcggaggccagcttggcgcgtgaggcgcgtccggtggaggaggccggcttggcgcgagagacgcggccggcggtggaggaggcgacctaggtgtgaggaggagcagccggtgggtgtggtgcggtcttcggcgcacgaaggctggccggcgggggacgccggtgcaagggtcccacatgtcggcagagcttgcgtggtggtggagcatcggtgcgtcagccgtggattcgcaggtggtgagcggcgggtgaaaacccagtctggccttggccggaccgacaacgatggttcattccccctcctgagggcgttgtcgtgctgtctcacccctcaagggtgattgccgggtgaaagcccagtcttggctcctttgagtcccgacggacggcggcggtagttttttcgtcgcttctcttcttgaagacgccgttttggcatcccctagggggcgatctcgtctgtgtccctttgttagtctagtggcagtcggtcatgcttagcggcggccggtccggtgttagtcttctcctggacttgtgtgttggcaatgtcggtgtgtgggtggtggcatatttttttcctggttacgaccctccaaggttgtaatcttgtattttttttctgctctatcaatagaactttgcaccatctcgtgcaagtcgttcaaaaaaaagactagtttacagtgatgggggatatatactctctacatgcagacttcctcaaactattttttaagataataaaaatgttttacatctacatctccaacctctgtagttgcgcacacaactgatgagtttgaatacttcaaaaaaaatgaaaaatatataagaaacaaattggtgggacaaacactcaacttcctcaaaactgaatagaatatatagtgaatattttgataggactatagttgggatttagattcaagtaaaaaaatatgtatatttttctagctttttattgttactagagattccctgttttcctctttgttttatgggggcaaacttggacagtgtcaatgacttacacctaaccagcagttgatgggagactactacatttttttgcagttggtctgtcaaatcattttaggttgtgatcgcctaaccaatgcagcatatacccatcaaacaataattaagcacacatcatcaagggaaaagccagtagttacacaactaaatcattatcccttttgcttatccattaataatgatgagaaaaagaagtgtgagtggggtgttgtctctataatttgtgacttttagtgagtttagaatgcatactagtgtccttgctagtaaaaaagaaaaggacagattagtgtttaacatgtttgattatatatggttcaaattaaatcactcatactactgtggactgtggcgtgtgctttgtacgcttattttaaaaataaagtctatgaatctcaattaaagcaagccattgctgtgcatgttttgtgagtgcaaatctctgctttagctttaaaaataaatcaatatctatatataaccttcaatctaaaattttatcatatgcttcatccagatttgcgctcacctaatattaactaccttgacgcgaaagggcctgtagcctagtggttacaagagtctcagtagcacctgaggtcctgggttcgactccccatgggagcgaatttttcaggatttaacggcgttgtgctttcagtgataggcgacgtacccgtcgacagcgaggcgcctgtggtgacttcgtcaatctctccagaatttgccggccaagtcttcgaagatgctcataggggtaaggtttgcgtgcgtgtgttcataggggtgagtgcgcgtgcgttgtgagtgtctgcgttgtactgtgtaattctcaaaaaaaaaatattaactaccttgacatgaaattagtagacttttgaaaagaggtgtaccgaagcaacgccctacctgcacaaaataagcaatgtagtatatggagagatcatggcaggatgaacctagctaccagtcaagtatctttagggcatcaattaattcttgccttctattatgtactttactctttgagaaaatcataatatagttctgttttggactaaggatttttttaattagtttagttatgcaaaatttaacattgtgccaaaaacatcttctcaaccttataaacacaaaaagtccagatatgaaggccaaatggtgcaaaatatccagataaggaaaatatatgacttacgtgtgatccaagaattaggcccaattggaatatcgtgcagttccttcgagctgttcacaaattagaagacagagcagatcatttacgcataattaattacgtattaactataataaatttgaaaattattttttaaagaaacttccatatagctttcttgaaaaaacaaaatattgtttaccaatttagaaagtatgctaacgaaaaatgaaatattgtttcggttgttcaaaaaacttagtcttacttcggaaagggtacacaaaactagctaacttggttagttgggtatacaacgtaatactagcatatcaaaccaaaaccatgggtttcctaaagtctagctaccggttttcaaagggacaagaagttattagtgaatgatccatatcaaatcattgtatcagcagataggtgcaaattaccactcttagctaggcctcattctcccaattatcaactctgtggtcttagcggtcatggaaacaaataagtcaagtaaaaaaatatcatctaagaaaacaaagactcggatatattcaagtatgtagtaatagtagtagaaaatggatgaaaacaactactacatgcttcaaattttcgtatgttggtaattgtatatgcaaaattaagggtgattgcttgcatatcatgatatcgttatagtaacaatgtagttgctttttagaaaaaaaagggataaaatatacaattgaaaaaaatagaactagaaatgattgtttggtgcaatttagatttaacctatcctttctcgaaagatgtattgtgcatgcaccagcacctacctgaagcagacaccttacagacagaacaatcaagtggaaagggacaaacaatattcacaaggtgaccataatgatgcgatggtttctcttgtagttccattggaaaaaaaaacataaaaatcaaaaccggccatattgtcaaagtatatataagcatccatggttcatgaaaactagcaaggggcattaagaaaatgaatttggacaaataggtttaaaccatactctttgcgatttttttagttaaccaatgattctttaatttagattccatgtgtaatgtataaatcatcaaacaaagttatttacgtcgaacaaaataggaaataactagggtaacaagccattatttacatcgaacaaaatagaaaacaactagggtaacaagccattacttgtatcaagtaatcacgggaacaactgtaattggtattaaaaggttgttgctattgatatttcacaagttctacaaaacactaaaatatatcatgctatccattcactcattcatgtcctgaaaaatcaaaatgtggtgttgtagctgataaatccaagcctagaccaccttgcaaccaatccaaccgctgtccatcccagcaaggaaaatgagatagtgttgctatcaaaagacaaaaaaaaatgtaccaaatgaaatcataaactacacagagaaaaccatacgatgtatctggacatgtacaccacacgcgagagtagaagatcccggaaagcacgtcatcaccgctctttggtgcgcgctgtgcttgtaggacggttcaccaaaatgttcttgatccaaaatgggagataacggttttcctaatgttataaaaaatgtttaaaaacagttgaatcccaacacaatatgatcaaattttaaatattagcttgtattttttttgaaacttaatcagaaaggagccaacgtcaaacttcgaattttaaaacttaattttagagttgatttgatgtttttttcggcgtagtttttttcggctttaacttttaagttgctatggatggatatacaaaaattttactcacaatttttttctcagtaataaactgttactaccttataatcagtcataaactaccgatgagcacggtcattccggggggatttgtttttggccttttggaaaaagaaaaaacgccgatccctactgagcacggaaggcatcatcccggccgcgatgcgcttgtggccgtgtctgtggcttcctgaggccgcgccacgtgtacttggtcgaatcggcccggtccaaccgaaagcgaggtgggcagtgtggagcccaccagctgggccgggatgaactgtatctttttgggagggtttgtttgtgtagaactgtagatcaatcagtgggtttggcttgtgtacgtaagcatcaaattatcactgtcaaatatatacgtcattgtccagtatttaattagttagtaaaattttaactagtctctcagtcccaaaatagttgagaccagatgtgacacatcatagtataataaatctagatataagtgtgtctagattcatcataatatgtcaaatccgataggaagttgagtttattttagaacagattgagcagttcttaaaaaaaaagtacactttgacgtgtgacagtcacttatactgccagtttaatagctccaacccacacaatttttttaatatgttgtatagagtttgtaggctaaatcagtggttattttactgattttgctagaaagctgctaatattttttcctctcaaaactaattttcagtttgtggccatccagttgtcgaacccggaatccttggtgggaagccacgttagccaaccaaccatgagtaatttttagctgaatttacactagttacatatcgtatatctacaatataagtacactttaattatattatagtatatttgatttaaaaaaaactgacgaatttgtatagctaattttttaaaagacaaatcagtggcttcgaaccactatttatgttcttccataataatcagatgatggctcaccaataactttgtctaacctaactctatctcaaaaacctagctctatctcaaagaatatttagagctaagataccaataaacccaatgaatactttgaggctggttgtacgatactaccatctccattctaaaataagtttatttttcacttatcccacacataccaatacaaaaccacaaatactataatatccctacttattaaatatctcaatgcaaatatttctcactttatctactcccaacataattattttcttttttataaactctaatgcaatgattattaaaaataaacttattttgggataaataacaggagctaatagtaaacttattatgagatggaggaacaggaagactaaattaaactgaaatgattgtgctttttttcgaggaatgattgtgcgatttttaaccattattctaactgttaatgtgattttcaaaggtacatttgaaatgaagtagttattaacttatttatatatcaaaataggcagcgatagcgttttcagaacacgacagttattacaatatcatagtatcacgtgaacaaccgtgatggttgatatgaccactaacttctatatagcatcgatatatacattttttattattttgaataatttcatatggtttgtttttttttttcatgttggatgtttggttcttaccaattaggaactatcatcaaaattgaatatacttattttgattggtacaaaactgtcgatgttttatatataaaagtattgtactgtttttttctctgtgtagctaattttgatattcatattaagttatgctataaatgacataacagaggcttccagtttttatagcaacccctcagtggccacttttttttaccaggcctccaaagccatgattattaaggcgctatgaatctcgaaggaaattcataggaattttagagggtttcattcatatatgattttttactatatagccctttgaatcaaaggaatagatcctatggaatcctatggaattcctatggattgtcttttcccatgcaagttttgaaggaaatttaacatgaggtagaacctcatggaaagaatcctttgtgtctttatctctcctcgaattcctgtgtttttcctgcgacccaatcaaacagtcattcctatgtttttcctgtgttttgcaatcatctgttttacacttgcattcctgtcagaatcctatgtttttcatattcctctgttttttcattcctgttattcaaaggggccctaagggcttgcttgtttgtgttgtggcttataattttaaattttagaactttatttttaaaattaaattaaaggttttgttttataagtttattttcatttgggtttgactttttttaatgaaacacattacaaacgaaaacgctcataatatgtgcacactcacatctataaatgcacacacacatcctactcctatgagcaccttgagaagattgagtccaacatgatgaagtcaccacggatgtctcgctgttgatggatacgtcacttaccactgacagaataattagccgcaaatgtgagcacccatgtcaattttagaacttgaacccgactaggttggtttcagcaaaataaactaaccagttaaattatactcacttcaccttttgggtttgacttttgaccgcatatagcagaaaggcaaaagccttaatttaaaattacaattttcgttattatagaaaaatatattgaaaagtacaaccacagagtttataacttatttctatatatatagagagtaataataacatagttaaaatgtatacttgcatgtttaggcatggcggataataaaaataaaaaataaagcccaaaaccctatcgaaaagatcaaggcaaaatttactacagaatacttaaaaaacgtgtaattagttgtgggacaccgcaaatatgtgaattggctataggacatcccaaaagagtgataattagctactaaacaccggagacattattttatcatttctggtggaaacggagagaggaacaatggaaaaaggaccagatttccctatgtgagccaaggatgtcagcatctccactattttcatgtcctcttactcctgatgaggcacaccacacgcaatacggcgccgctgacaccgtccttctccatcacgccggcaggctcgtacgcaaacgtgggtagggcatcgatggcgtgataattagctactagacaccggagacattattttatcatttccggtggaaacggagagaggaacaatggaaaaaggaccagatttccctatgtgagccaaggatgtcagcatctccactattttcatgtcctcttactcctgatgaggcacaccacacgcaatgcggcgccgctgacaccgtccttctccatcacgctggcaggctcgtacgcaaacgtgggtagggcatcaatggcgtcgcggacactcacatcgtgcccactatgccacgtcacgctctccgcgcgcaccctcgccgccctcgccgccgcctgcgcacagcgatgcagccgcaaccggcgaggacggcgacgccaatgcaaggcggtaggtgctgcatcgacgagaagtggtgctattccatcggctccttgccgtggccgccagagccagtgcccgaggcagcggctgttgctcggcttgctcctctcgccttgcttgcgcctgggctagcatctgatgcacctgcaccgccacagccccagacggcggcttcttgatggcatgcgactctaacacaagcaaacgacacgggggtatgttggtacttccagcgctctttctctctctgtttccactagaataataaaataatgcatcaagtgtctagtagctaattaccactattttataatatcctacagccaattcacatctttattgagtcccacagctaattacacgttttctgagggtcccgtagcaaatattgccaaagatgaaaaccacatttccatcagcgcgcgaaatcccaatcctacccctgcacaatgacatccaccgaggggcaagcccgtcatttcagctgcgcccacggagtccacttccccctcctcccccacaacggcgacaataccgtgagccacccgccgggcccacctgtcaacgtcccctccacccactacgccacgtcacccccctcccgcctttataaaacctcgcgaacaaactcctcgtcgtcccccctcctcctcgtcgtcgtcgtctcacccaacgaacttttccggcgaactccccgacgagatcgatggccgccggcgaacggcaatcgaacaaggagtactaggacgcccttctttgttgtttcttctcggcaagatcagttggttggcaccacctgccattcttggtttggaagtgtgggagggaggggttcggttggtcgatgccgttgcggttgccgtgcgcgatggagacgaggccaccgcgggcggcggcgccggcgccggcgagggtgtcgaggttccggaggctgcttgtgcgggtgtccgcggagccggagcgggcggccgtcggcggcggcggggaggtgagggagaaggaggagaaggcagcggagatggaagtggggtcggtggggttggaccggatggtgctcagcttcatggaggattccgccgccgccgccgtggagcggcccccgcgtggccgctgcggcagctgcttcaacggcggcggggacggcagcgacgacgaggagttcgacttcctcccctccgactcctccgccaccgccgccgcttcggccgccgccgccgccggcgacgccctggacgcgttaaaggtatagggcctttttccccggctcgattgttgtttccaattgctcgccggagtgatcaacgctttgtgtcgtcgcagggcttggtgcagagcgcgagcatggcggagaggaacctcctcgccgacgcgtcgaggatcgccgagaggtgccgcaagggcggcaagaagaaggccgacgtccgctgcgccgtcgccgacggcctcgccgccctcggctacgacgccgccgtgtgcaagtcgcggtgggacaagaccccctcctaccccgcaggtaaactaaacctcgcccccaattcgatgctgctgaatcgccggcgctgaccggcggcgacggtgggcggcgcaaaccttgtgcaggcgagcacgagtacatcgacgcggtggtggcggcggagacgcggctggtggtggaggtggacttccggtcggagttcgaggtggcgaggtcgaccaaggcgtaccgcgcggcgctgcaagctctcccgccgctgttcgtcgggacgccggaccggctcgggcagatcgtcgccgtcgtggcggaggccgcgcggcagagcctgaggaagaagggcctccacgtcccgccatggcggaagccggagtacatgcgcgccaagtggctctccccgcaagtcctccgctgctccgacaagccgccgccgccgccgccgtcgcccccgcccacgccggtatcgctctccagcttctccggcgagttcgagctacgcttcgacgccaagaccccaccaaacctcagcgccaccgccgccggcgacgacaacgacaacgacaacgacgacgaggtcgaggcgaagaagattacgatggtggtgtccccatcgccgtggcgcccggtggagccggaggcggcgagcaagaaaaggtcaccgccgccgccgccgcggcgccccgaggggaaggtggtgaccgggctcgccgccgtgctctaaccgcggcgaagaactcactttactacactagctaattaaccagctctcctccctcgccaattttctctgttttttttttcatttttccatcgccgctttgatccgtccgaggcttagctcatggtgttttctcagttttttttccgattttttggaaaaagacatttacagaaaacacctccatttttcttttttcttttttttattctagaacaaattttggtttccacaaaagggaagtgcaaggagcagtagctgtgacagcttctaggccccctattgttgagaagaggatgaaaaatgaaagtatgaactagagatatgcaacattatctggttgcttaatcagatcttaatcactacttgtactagcgtgagtgtatcatatcacttggtatcatcagaggctcagagcaggcagtaggagcagtattaaaaaatatgcaagtatggagtactactagtagtgatgcatacttctaaaaaaacctgcagcgtaattatacttcactaaccactgctgcgaaaatatttggaattccaaattttcaaccactttgccacaaattagatagagcaagtaaaccaactataaacatacatatgtgaaaaagataacgagaagtgaaaaaaaaagagagctataaatttatagtcaaattatagacttctaataacaatagactttaacatgttgtttgtgtatgtgagagcttgtttgtgtatgtgagagcagactaaatattaatagtgtagtactacctctgttttttaatagataacgccgttgactttttctcatatcttttattcgtcttatttaaaaaatttaggaattataatttattttgttatgagttattttatcactcataatactttaagtgtgatttatatcttatacatttgcataaaatttttgaataagacgaatggccaaacatgtgagaaaaagttaacggcgtcatttattaaaaacggagggagtatatatttataggtaactaagggtattagcttactagattaattatagataatttgaagctaatagtagattgtattattaaacttgttcctagtccatatttgttctggagtactctattagtcctgaaaaaaacattctagaggatgaatctggataaaggtagtctaaattcatccttataaagggtcaggttggttttttttactagggagtaaagtttaatcttccactttgaccatgacagttacgcgcgggtgacggttacttttgcgagtggggcccaggtgtcatacaccgggggcagaggcagcggtggcccacgtgggccccaccggcgggcgtgcgggcagcagacgagccgtgcgggtgcactcgtgccgtctcgggagccgcgccggccgtcccatgacgatggcgtgcgtggctgcgcccccaccaactctttactctctctccctctctctgtggacttttctcacctcggttttttaccacccatcggtaaaaaaaaaaggaaaaaaaactgtgctccgaccgatgcttcataatttgcgatttcgcggttagagcaaaatatcccactactagctcttcaaatcacctataactaatataatagttaatttatataataattacttgctatactattatagctggtcctacctatcatacacacattacgtcttgaaatccgtactacagttggctatagatttatagctcactgctcttatcttttttttatctttttaaaatatgtttatactggctattgtatatgctcttaggttgagaaaattttacggtggccgaagaagaggcaggcagtttgatcggcgaatccaaggtgtgtggggggtggtaaaaagttaacgcgaggaacggtgaaataaaaaccaactgtagtgctgttttgcattgcgttgcgcctcgaccatggaagacgagctagcgtgtgcatcgtgcttggtaaatttatgttagctttggaagcaacgatcacgcctttacggtttgcgaaacacacgcccggggtcctcgatctacctcacccgctcctcaaactgtttctagcaacaatcatccaaatcaactgtttcttaacaagccggagtatgtcaattcgagtgcgggcataaaaaaggggtaaattaaatagtattagaaagttggcttagaaattctgatgatgttcgtttttaatcgcatcatttaattataggtttgaaaaacatgcctgtgataatccggtggtcattaccagggttcaccgaaccgttttgggtggggttatcgccaccccacggtttggtggttattgtagtaaaccgcacgaaaactatgagggattgtagtccagtttcatttaaaatttgtgacataaatatattaattttagaagttatacaaccaatcagactaaggtatatgtatttattggaccctacgatgtagaaatgacaatattaatgaggggcaccatattcatttcttttcactactaatttatttaagaattggtagaaataaagtgtttgttagatgaagtgagtaaaatagaagcaacttttatatttgaattttgtgccaaatacaagcatttcattttgtacctatcccatcaatcatcgttcattcaatttgtttctcatattatccctaaccatacttccaacttcaaacgtctcttatttatgtttttttttccggaacacaatatggacctaggtgttggataatgactcaaatatattattagtcctaggcactagtttaatatgtgcctatatataagggtcacccttatacatgtaatcctaaaccattatagttgattttgtcttccgtggtttttcctctttacattagaggggttttccgcgtaaaaattcgtctctttcgtatttttttcctaacactaatatttatatgtgtatacatactaccctctattagcatctccgaacatcatatgtgttccgttatcagtggatacgtctctattaaaaaataattaaccgctgatacgagcattcctgtccttatcttttgtaaccaaccttaattagaacttctacaggtgtttatgatttgccatgaagggagtagatacttggtcagtcagtacccgtgaaaccattaaactcgcttttctgctgcactatcggagtacccgtagtcctagtccagtaccagtaactgctcctgttttggacagatagctgttaatattctttaccccgcctgatgtgaatcagcttgtacttgctgtactggcagcaagtacgctgtcccattttcttaatgtgcatcaggggagtaaataaaaataattaaggacgagtctggtcatgactacagtgcatactctctcagtaaaaaaagaaaaaaaaagtaagtctagaactcgatgtgacacattataatagagtgaatttacgatgtgtcatatttaatagtgctagattggtttttagggacggagggagtatatattaccatgcaaaacttttgcattactaagtttcgatagctttcttttttcaacaaagcaaactcatcctaactctactttgtaacttgtaattgaaacaagccgagctcgaggcaactcgcaaacaactcatttggcttggtggcttgtgtggcctacgtgtatttgctcaacaattatggttttcgagattgctaggtgtgaattaatgataataggcaatatatgtactaatataccttttgaggcagaatataccttttgaagcagctgggcaagtgttctagtatttggaaatggtcggtttataccgttataaaaaaaattgcagatgtatgacatatatgcgtcaatcagtccttctgccataaagtttctgagacttattattgcttcatatttgactttttagcggctttatgttaaaaaaaatagtttataataagtggttatagtttctttaaaatactagtagatacgtcgagcccattttgtgaggcctatatgtcagtgggtggtaccaccacaagaaacattcaaatgagtaaagaaaatttatgtgttatttcattatcatttttttttaaaaaaatgcgtgagctgactcgagaaagagaattgagccaagacaacggccgagccggccagccagaacaacgcaacaaaggatctgtttatatctcatctcaaaattttacaccatatataaagtattaaatataggctaaaaaataactaattgcacagattgtgagtaatttgtgagacgaatcaatcttaaacctaattgctatatgatttaacaatatgatgctacagtaaacatttactaataacggattaattaggcttaataattcatctcgtggtttactgacggatttagtaattagtttttttaatagtgttcaaacaccctataaaatatccgatgtgacacgctaaaactttaccctagatctagacaccccccaagacagattctggtcctatactgggctttgaacatatccaaactatcaggcccacggcccatatatccttcaagcccacagcccattccacacacatgtctcgcccggctgacacgtggcatcaatcaggcttccacaatttgcactaatcgcagattagaacaggaaaaagcaaacaaaaataagtccattttaccctgaacccctaaactattttttaagttcaatttacctctaatactactaaaatggtttacttaacattatgtctcttctttgtttttctttatacgagtagtattttaaactaaaatttttgtagtgacatagatgtcaaccactatcaaagttctaaactattttttaaaattcatttattactatttacttgaaatttaaaactcggtatttaatttagtctcattgcttccgatctatgtaaacaataataataaaatttgagaggtaagttataacacatttatcaattctaccaaattttatggcaaaatataacttatacatggggaaaggaaaaggagaaataccatcagaggtgtaaaataagaaaaaaccaatacattactactttatccatttcatattataagttatttgactttattaattagtcaagattctttaggtttcgaccaagtttatagagaaaattagcaatatccatgacaccaaactagttttaataaatttagcattaaatatattttattacaatatttattttatattaaaaatattgctatattttactatcaactctgttaaaattgaagaattttgactaaaagaaaaaaaatcaaataaattataatatgaaacggttggaatagtttagaaggttaagtgaactaatgtaatataaaacaatttaaggtgtaaaatggattttctttccaatactaaaaaaacaagaaaacctccatttgaaacgatggattgacgaaataacgagagaagccaagccaagccatctccttcctcttggcctccgaccacctcgctcgcctcgcctcgacgtctccttccctcccgcctccaagcaacccctctcgccggaggaggaaaccctcctccgcttccaatccccaaatccccatccgctatatcaacccgatcccctccccgatcgttcgatcgttcgatcgatctcgccctcgactccaagccgacgagaggagttgaggagttgaggccatttcggtgcgtgcgcggcgggcggaggtgatcggtggcgtttcgttccgttggcggcgggcggaggtgattgctcgcgcggcgtggagcggtggggggaggatccgagcgggagggagagcgcgcgcggatggggtggcggagtcgcgcttcggcggtggcggtgctgtggatgctcgccgctgtggtggcggcggctgcgctggatcctgatcaggacgagctcgaacgcgcgtaagtgcgattcaccagaggcagcttctgattgtttgttttttttttcaatcgtatagcatcagactctgcttttggttgcattctgttgttgcctagcttaatggggttgagattacatggagattccggtgtgcatttttcgtgttcatctgtcgcacgcgatgctgtcatgctgcgaaattcaagttagtacggccgaattgcggctgttttttttcctatctcttaacgccacattggaaatgggcacttgagatgattgtgtgggaagtgggatattggaggggagcaggtagctgctgatgcatggttgaaatgagaaaccaagtggattattcatgtgagatgtggagtaggtagccggtgtgttgctacttgcatcaaccggactaattgagcgtggtgggtagatactttgttggttaatggatgtcaacttgctaagtttcacctacatatgtggataattaagaaagggaagacacatcttgaagatggaaaattttgaagtaattagagcaatagcaaacaaaatgatgacacattcccattattttcctaaaaaaaaaactgaagccgctttcgtgtcagcatagtgtgccccagttgaaccggctttggaactctcagatgatctaaccatatgaaaggcaccttcttaattgttttgatgaaagattgtagacttggttacttaacagaatcatcgtaggtctgcttcttcgacttaatgctgagtgaatgagagtacaacatgtatatggctggtactactagcatcatgcagtagttgtgtttcatttacttgttcatatggaaaacatcatttgctacaacgctcatatttatcaaatcagtggactgcaaagaaaaattattgtggttttggaagttcttttttttttaacaaagatagttgtgcaggtttccaatcgtcgaaccagatcatggtcacactaaactccgtcttgcaaaagaaggtttggaggcaattaaaagaatcgaaacaccaatagctgctgtcgctgtatgtttaaatgggctgtagctcacataaatacctgatagtttgcttttcccaactaatgccaaggcactatatttatttctttgtcgtggtgcatgctgagttatatgtctctgactctcaaatcaggttattgggccatatcgatctggaaaatcttttcttctcaatcagcttctctccctaacatgcaataaaggtacaatgagttcctgccttacatacataccatgctccaggaaagaggatacttggaatgatggattgataaattggctctgcaggttttggagttggacatatgcgagataccaaaacaaaaggtttggtggtgccaatgacaactttgtaatgttatcctaaatgattccatatcctaattgaaggattctaacactctgctccacatattgaaggtatatgggtctggggtactcccattgagttagatgtgaatggctccaaagtttctgtcctttacctggacactgagggatttgagagcatcggaaaatcaaatgtatatgatgataggtttgttgcttatagatgaaatgcatattaagtttgaattggaattttaaatggtgaaaaatggactgttagttcttttgtttttgttgcaggatatttgctctggccactgttttaagttctatccttatctacaatcttccagagacggtgtgtttctctggctcatgacatgctcacctccattctctcatttgatagctattaacttgacttatcttgatcatagattcgtgaagctgatatatctagactctcatttgctgttgaaattgctgaagaattctatggaaggtttgctttctgccattcctatttggagcttacaatttactaagtgcctccttaatgttctaacaaaatttccacttttctgtcggcatttgttgactccagagtgaaggtaatacttaaccttaagtgttagaattatttaaactagaaccactatgtcaaagttacagtgcttgtctctgtaggggcaagatgttgcttttgagccagcaaaactactgtggcttatccagagggatttcctccgtaagtttctgtttgcgttacatatgaacaattttattttgataatcaagtattcctttcagcatgttctgaatactagatgagaattagattttcataacaagaatagacaataaatcacaagtcggaccataaaaagttctaattgccttgtattaatgtttgtacattgtgaggtcggacttatgttgcggtacagactacagagggactagttaataacttgatatgtgctgtatattagcaatagtggaaatatacaggtctcgtgctttattttggtcaaatgtctattgttttgcatttcaccgtttgttgttgctgttttgtttttaggatattaaacttcttttaacattgttaactttcatgaggcagaaggaaaatctgtccagcaaatggttgatgaagctctccaacgggtgcctaacaacaatggttagttcaagttaccgtattaatggtttttatcatgatgatatttatttcctttctttcttcatgaaacaattgaagtggggatcttgaattaacctacttttgtgtattgctgcaggagacaaatatattgatgaggtacaattagttcgagctatatgctaataactggaagatatggcatactaatttgtttgaagaaacatggttttcatgttattttaggtcaaccgaatcagagactctttggcatttatgggcgataacagcactgcttttagcttaccccaggtttgtgaaaacatgatcatggtggggggaaaacatgagatatgttttttttagggaaaagtgatttgtgcatttaacatcattactatcacaattcataaaatttttggtattgagctaccttttaacatatatgctcattttgatgattatgtgctgtgatctttacatcactaagttattacattatgaacttttttgccagcctcatcttcaaagaacaaagctatgtgacatggacgatcaagaactggacccattatatatagaaaggagagatgagttgaagcaaattgttacttccatgataaaaccaaaacttttgcagggtagaactctaaatggaaaggagtttgtatctttcctaaggcaggtaatacctcttggcttgtttttttttatgcatcttaggcaggtaatcttgaaactcttgtgagctgttatctgaagttgcttacctttattttagatacttgaggcgttgaataaaggtgaaattccatcaacaggatcacttgtagaagtattcaataaggcaattcttgagcgctgcttaaagttgtataatgaaagaatggaaagagtgggtctaccagtatcagtggataaacttcagctgattcacaatttggcagaagatgaagctagaaagctctttgacaagcagcattttggtaaacatcatactacccgatccatcctcaagcttgatgaagagatgagaaaggtttgcctgacaataaatattcatgcgtgtttaatgttgtcttccattttcagataataaaacgacgtcattgatgcaatttttatgttgtaatgaatatgaatatggattgaagtatatgttataaacattatatcgaactgagatgctatggtcttcagttcttcacataagaaacacttgattcttcatattctgtcataaaattctattattaattactaatagccataaatcaagtttgatagttcattgtgtagtggtagtacatcttttgtgtagcaacaagttggatttctttccatgccttttgtgcttggatgctttgttttgaacacgaacgaattttttctttcagattttatagggtatctctggtgagattcttacatttgaagcattccatttaggaataaaactcgtttgttgcttacaacctatgcaaaatggataatatatcttcaatgtgtttaactgggtattctttttaggtcttcggaaactttggttttgccaatgagtaccagtcatcgaagctgtgcaaagcaaagttttcagagtgtgaagataaaatggaacaccttcaatccttgaagcttccttcgatggcaaaatttaatgctggatttcttcgctgtaaccagagttttgaaatggagtgtgtggggcctgccaaggaaagctatgaacgtaggatgtcaaaggtccgtctcttttaacttgagacatcttctatgatgggaaagaacaaatggattttgtacccacttaaaattcagatcaatttagggataatgcagtaatacatggagttgttaggtgtatccagttacaaaagtagcatatcacttttgactatcagattttgcatcaagtttttcaatactccctccgttcctatatactaattatcaccattgatcaattctgttgcaactttgaccagtagttcttatgacagagtaggtagtttttctctgctacttatgtgagcatttttagaagtcaaatcgagtcaaggtttcatgtagtaggtaccatttcacccattatgaatagcaaaagggaaaagcagagatgattgtccatatgtagaattcgaaagtaaaacatctttattcaccttccttcctcttttttttttcctggtaaatacaccagcacgttctgatatgttgtaagttttacctgaaactcattttttgtccaactatgttctttattacttgtgttgtgtattcctgcaccaatctttcttgaactgatatactccttgatgataaccttatctctgcatggtcacagatgctcgcaaggtctcgtgctcttttcatcaaggagtacaacaacaaactattcaattggctggtgacgttctccttggtcatgattgtgattgcgcgctttgtgatcaagttctttttactcgaagttgctgcatgggtgatattcatcttcttagagacatacacgagattattctggtcgtcagaattgttgtactacaatcccatctggcacatgatcgtctcttcatgggaaaccattgtgtataacccagttcttgatattgacaggcaagtttcttctctctgtgaagtgcacaacatgaatgtaatctctattttgccttccttactgttacgatgcttgtcttgtgcagatgggtgatcccaattgttgttgtgctatcatttttagctgtttactggcgttgcctcggtgtcaggaaacgaataggaagatcattgcttcctttgtacagaggttcttacggaagctccagtcgcccaagaacagattaatccaggtctagaaatggtgatgaatgatgcaaatcgctgggaaaatccatgaaaatatccttttgccgtgtgatggatagtggacggcaaaaggatgttggctctatgcacacgctgcaagaagcttctcttgcaatccaagaagggaatatttaggctcagctcacggctcttagtcttactgacccaccaagcaaagcaaacgctaacgtatgaatgataatcaatctttgttctatatcgaaatgcttatagtaacaaagaaatataaccatactttatttcaatgtaaagatcattctttgtatattatggcacactagataataacaaagaagatctggtagtgtacaggccagagcagctgaaatttcatgaaccatcagaagaaaccggtctctaaatttcatgaatcaccaggggaacagaacgaagttattgatgaagctactactgtgtttcttacagattttacataagttgggtttatttcaaatcttacagcaacaagatcatacagtcacatattgataaaaacagtcagctggtcttcacttttctgagcttcctcttggactcacggtttcgtcacaaatagcgggagtccgaagtgatcatggtccatgtatttattgttgttgttgcctctttcgagctatcttgcgagccctttcacgaagttcttcaggaggtggtggacgtggaccttcgggaggatataccacgtattcacgctgcagtggaagaatacagagcattagctcagacttctatatatcaccattgagaagcaaagtgatagaaacatataaaatgggtcacatgaaaatgattggcagatagatcttctcttttaattttgtgatgcaacaaacatgaagaaaatgtaagtattcatcaggaaaaaagaacatcataacacgataatctgtgaatgaaccacatataagcagatatatgcctacacaccctcacaacattagcattgctgcctacaaattgagcaaagtttcagtggcagataaatatggtcagtgagttgacatgcttgacaccacaaagcttagctctctaaatcgcttaatagcaacagcgcgaacaagctacaaacaaaacccgcaccagaaagggaatagccatccaacaaggcatatgcattgttcatcagcacgattctggaagaatcaggatccaatggcttcttcatcttacgaaacggcgtaggaatgaattcaagctcaaatgtagatatctccgcttccgtctgcagcgccatcggtcaccaccaatgccaaaattcagctcaaggtcgagtgccactctccactctctactaatgcaattctcatttcttccctcttcttaagatcgaaccccaaaatgcgcctaaaatcctagcatgaatttcaatcctcaaattggatagtgctactttacgcggtggtgggacgattgggatatatgctaccaaaacctaatcaaaagggggcaaaatcctcacccccatccagcgaccaatcctgatcttagagagccgaacagaagagaagggggaatcaagacgagagggagagagagagagagattacgaggcccatgagcttcttgagggtcttggagtcggtggcgacgaggtaggtgagcgcgacggggacggagacgtacaccccgaacttggcgatctccaggacccccttcgacgtcccaatcgacgacatggccggcgccggccgcgaggaagaagaagagatcccctctctctctctctctctctctctcctcctcactccgaacacctctctccgtcactcgatgaatcggcggcggcggtggcggcggcggcggcccgcgggtttgcggagaggcggattgattggtgagtgtgggttcgacgtcacctggtttagctgcgggcgaacgaggattagcggggccagacaagtggggcccacatggcagtgagaagcccggacatttgcatcgtggacatcaacgtaacttgagaaaacgtacaatatgccactccacaggagtgcaaaagataacattccacttattaaagtgcaaaggataaaatgtcactcaataggttatcttcagtatattttgccactttggggagttttgagaccaaaatgcccccactctggagagagagggagagaggagcaacgacggccgtgctcatcgccgtcaggcagggtccggccatttgcacaccatcaagatggcaacactcgctccggaatcgtcgcgttggttgctgcgtgtggctctgcttgccgctccacttgctgctctgcttcaaaatgcgtgtggctctgcttgctgctccatttgcacgccatcaagacgccgtgagcagcaagcgcttgcacgcgcgcaggaagtgctagaggcggcgagcgcgcgtgggtgccaccgccttgtcctcctcctctcatcagcaacgcgccagcgccgctccttccctccgtcggcgccctcccctggtcggccgcgccgtcctccttccccctgtcggcgccctcctccctcgattggcggcgctgtcctcc

SEQ ID NO: 7485 - DNA, 52864 bp, Oryza sativa
cccatataggcccacgacttaggacttaacccggcctgctaatcctacgctatagccagtgcagcgagtgatctcatctcaaactcaccatggcctcgccgccgccggagcgggcgccggcggcggaggctcgccggcgcaggacgacggtgtaccacggccaccgccgaccgtctccgcaccgccccaccgtccgaggcggcgtattctccgacctccgcgccaccaccgccgcctcctcccaaccgaggcctccctcctcctcctcctcctccgccccattccgcctcgccgactgggacccctcctcctcctcctcctccacgccttctccttccgccaccgcggccgcccgccgcctctccccgctcgcgcggttcctcctcgacgcgctccaccgccaccagcgctggggcccgcccgtcgtcgcggaactcaccaagctccgccgcgtggcccccgagctcgtcgccgaggtcctcagcgctcgcccgccgccgcccccgccgctcgcgctcccgttcttcctgtgggcgggacggcagaagggcttccgccactgcttcccggcgttccacgcgctcgcctcgctcctctccgccgctgggctccccgccgcggccgaccagcttcccgacctcatgcgagcccatggcaagccggtctcgcattcccagctcaacctcctcgtcaggctccacaccggcgcgcgtcgcccgctccgcgcgctccacgccctccgccgcttccgccacgagttctccgtgcagcctgaggtccacgcctgcaaccgcgtgctgggagcgctggctgcggctgggcatgttgatgataccctcaagctgttcgacgaaatgtcgcactgcagtgtgcggcctatgccggtgacattcgcgatcatggtgcgtgcgctggcgcgggcggggatgacggataaactcctggagatgattgggaggatgcgggctgaggtgtgcagaccggatgtgtttgtgtacaccgcactggtgaagacgatggttcgctgggggcatatggagggttgcatcagggtttgggaggagataagaagggatcatgtggatccagatacaatggcttacaccacaatgatagctgggctatgcaatgcgggaatggtggagaaggcagaagaattgtttggggagatgaggaggaagggtttgctggtggacaggatggtgtatgcgtctctcattgatgggtatgtctccacaggaagggtcagcgatggttgtagagtgttgaaagagatggtggatgctggttaccgtgcagacctggggatctataacacactgattggcgggctatgtgagatagagcgggaggataaagcacacaagatgtttcagattgtcgttcaggaggatctaataccaagctccgagactgtttcaccattgctggctcgttatgccgataagggcgagatggttaagttttttggattggttgataaactagtggagctaagcttgcctatagttgaaattttagtggacttcctgaagctctttgcatgcaagagtggcaatgaattgaaggctgtggaagtttttaatgctttcagaagaagggggcattatagtgttggcatttataacattctcattgagaatctgctgaagatcaaggagaggaagaaagcacttgtgttgttcgaggaaatgcaaagttcagatgactgcaagccggactcatgtacatatagccatatgatcccatgttttgtggacgaaggaaatattgaagaggcttgctcgtgctacaacttgatgatgaaggcagtttggataccaagcatttcagcctattgtgctcttgtgaaagggttgtgcaaaaaaggagagataaatgcagctatttcacttgttaaggattgtcttgggaatgtggaaaatgggccaatggaattcaagtacaccttgactattcttgaagcttgccaatcaaaaagcccagagaaggtcatcaaagtggtggacgaaatgattgagttaggttattccatagaagaaattatatattctgctattatttatggtttctgcaagtatgcaagttcaactgaggcaagaaaagtactatctaccatgagagatcgcaatattatttcagaagccaattatattgtttatgaggatatgttgaatgagcatttgaagaatgtcactgcagatttggtgatatctggattgaaatttttggatcttgaatctaaattaaaatggagaagcagagatgattgagaaatctttgtacagttgctacatactaggtacaacctgcttcacttcacttgtgatttgtgctatttagatattgtattatgtgttacctcttgtgagttgaacattgcattatgtaataaatagtcctaaacacttctagggatctcataacctggttattccatggtatgtttagctagagttgatatccatgggcctctggtttgtaccaaattatggataattcatacttcatactgatcctgatcatttttctcaagtattttttttaagaaaacacaaatctggtattccaccaaaaaagtcaacatgtgggagtggacgtggatgagtttgggaacccttgttgtgcttatccctccatagatttatcatgagaaaatttaatgatactgtagtatgtagaacataagtatgtatgttacttgacagacagttatttggaaaattcatgcctgcataatgttgtgtaaattcatgcctgcataatgttgtgggcatataggagatattgagtaaccaatgatggttctcacagactcacacagtcacactaacgaatgggcctgatcactttacattattggtgacattatgcagagaaagtaggtaaaggtagaagtatacaagttctctaatgagcaacgacggcactacagatgaatgagccttacagcataggtgttttttgtttacacaatttggaggaacaagcagtgtatacaaccagttccttctgagtttgtagtttgagcaggccaacttggtctgaggcatgttagaacttagaaagatgtgagttgcaagctgagaaaatatgatttgagtactgattagctaacctcaagcagcttggttcttgccctcccatatcaagtcccgatgcttaataaaaacagagtgcatggtttcctgccgtttaacattcattgtttatttatcttcaatttacgagctggtgttgagagcctgaactaatggactaattttgtgagtcaactcttccatgatatgtcctccgttttagtatttaggattcgactggaccatttatgcaaacacacaacactgacacctatgtccccagttggccagtcacttggttaatggttacataaatccatgcacacccttgcttgtagctaagtattatttcattttacttttaaattcaagattgccaatcttttgtgtaattgctaatagcagtactgtattttgacatagcagagataattaaagcaattttcatcgttttgttttatcatgtctcaatattttatgcatgtatggtaaatggtaatgtgccttcatccctgtatcctactacatatgttgtaccattagcaagttaaagaaacacgcacaccaaaaaaaaaaaactgactcggtccctatatatgggcaagtggtactcaaatgaagtagtatatcagtcccaacttctttcaggacggtaatgatagcgtttcattttactggggagctgattcttatcagtgacatgacactgttgaatctttaaagggtgtggaatctggatcgcttcctctctacattcctttaaggtacacactaccaatcgtgcaataggatctgcaagtattgttataattaggtatctgctccttattaccatgttaaacctcagtaacttgatcaggtttcttcttcacaaccacccctggagaactagcttccttagatgaggtgaaaaagccaatccagccaactggtcgtacaagtgagatccatctggtgcagcctggaaggttgatggcttgatacagaggtaaactagcattaattcttatagttaatcttttcagcagtactccgttattctgtcatctaccctatagttcaccaacacagtgttacattcatcattcctcattgatcggtcaggatcgtctcccacagatccgatgccccaggtcgctcccacctccctcacggcctcaccccatcaatcatgcgtcacaaaatgtgctctagcgagagatcattagactagaatagttcatttcggtcatggaactgtacttcaccttctatgttacagtggtactttgattatcaattccatttggtactcatgccgatccagatttggtgcttatcattttcatttggtactcatgcttcaataattcttgctttgatgaattgttgctgatccacatctttcatgattaatgtaacatagtctgtagtagcagtttaaaactgaatcagtagcagtttaaaattggaaccaagcgcattctccatgggatgccttaaatgactgattagtgcatgaagtaggcttaaattgcagtcaaaatcagtataatgcgttagaagcagatgatttctagatactttatttaaggccactattacagtttaaaccatataaactaataggaaaccatttgctctgagttgccatgtcttataagaatgcgttgctgtgagatgctccggaaaaaaaatctttaacctttcggcataatatatttttaactgaaatactttacacatgcattagttatgtcctctaagatcatgaaattcagtttattactgtccatttatgaatattccaactattttgccagatgatgaaaagcagcttgaggttttgaatctatgcaagtttgttcttactgttctgatggtacaccttatttcaggtacctaaaattgtccttttattcagtagtcctttcattaggtcaataagctccttttttgtgttgccactgagtgtccttcatttgttgttagagactacagtccgaaatttctgattatttaggcagttagaagtcccgagcagcggcaaccgggtctcgcccagcctccgctcccaagctttgagatttgagaatcccgggtaggggcagtggaagccgagggtgccaccatccataaatttctgtctgtaaattatcacactttttaggactaaaacttcggtattgtgaaggaaaacaagaaatgatatttattttatgccattctttaaattttggtatctaatatgaagcttaaaaaacacgtgcgtgatgtattttaaattgtataatctatattatcatatattgttgtcatagcgttagcacgagcatattactagtcttaataaattcatgacatgatcttccctcttctgaatatgtagtttttctttctttctttccttttcttttttcttacttcaagagataaattgtaggagtcagcattacattgcgtctcgtcatcaatgatatgtattcaacccgtagatgcgcatgtcttgtgtttttgcaatcctattccaagtcgatcaataactgcctaataagaaaccaatagataggccaatcatagtgctatttagccatcgctgtgatataattataaattatgctttcttgttgcttgtctgctttgcactgcaattaagatgtcattgttggaacagaaacttgtttgccggggcacacaataatttagatatgaaaaaaaaaacatgtgtcttgtcttgttctttgcagtgtgatttcatttcaattcgccgactatatatttcctgaagccaagaggggcaatcaggcgcatgccagacatgggcataactgttggcatatggcgttaggtataaccgttaatgcatcctgacgccgacgggttgctgtggatgtctgtgtacattcctcttgattgtcaccaattattttccagcatggggcgtcctgatgtgtaagtggctgcattgatcgttgatgcatgcatggactttgttttgtagtgttggataaatttaggggctatctatgcatttgttttcttctgcattttttttcttctttttatgtttgtgtaggcctttatggttggaactttgaaatgttgtgatttatgttgatgtgttttggagcacctttcagaattataggagcggtgactgacaggtgacgaagaaagtactttaggttcaggtggatgagatgaactgaccttaaatagatatgtagaccccagtgcattttctctcctcgtagtttcatttttctcatcgaggctatatttggaacacaggaactccatggaaattttggggggaattgcatatatcagctcatttcctataggaaaatgggatcaaaacctcacaaacacatcattctagtgggtgatccatagtaagctgaagttttatgcttctgaaaattggtagaaatgcgacatcgatgcattctcaataagaatttctcgattttattagtttccttagtatattgagtgtatgttaaaaaggagccacttttgcttgtgtgcgtggtagagtgtgtgcatatgtatttgtctttcatgcaatgaagaaatgaggggaaatggccaatattgtccttgaagttccattccaaggttagtctagtccttagcgtttttatattatccatacaagtgtttaatatttatcatatgacctaatatcgtccttaggcccacataaatgaccacttgcgcgtaccatatatcctcccatgcgaaaaatgatgatgaaatgaagtaaattggacccatcatatatagattttgtatgggagatgataatgtgatataaccgtggtgatttcgatggcgcaaagggttatattatgtgtcatgataaatttatcggttcatttggataatataaaaggctagcgactaaattaacctgagctgggacatgctattctcccaagaaaaaaaaaagagtcgatgacaatacactattttactgcagattgacaagatatcaacgttaactacaaatgcagctaagggttcctttggaacgtaggaatacaaaaacacatgaatagaaaaaaaatgtgggaatcgaggtgacatgttaattgaatcctttggaattgtaatctatagggattgttaaaatttgctgtttgggtccataggaaaagtataggattttaggagagaggttgacataacaaagttcccgatgaggtccaaccttattttagaaatccttcaaaattccaatgaatcaagccactccatatgaattttgtaggattctcaaatacccttccaaaggagcacaaaggaaaattttccaggggtttctaatcctacaaaaatcctctatttttcctttgttccaaaggagccctaaacaaacggcatggctggtgagctgtatacactttaatcgtccatggatgtacgtacgtttcaccgtatttctacttatttttctgacaggacacatgtacgcattcagtagagttataaatatgtacttgtacaataactccatgagtgctatactagctcacgagaaagctcgaaatggttagcttgaccagctagctagcctttttgtcagttttttctagtatgtagtccctccgtcctttaaaaagaaaaacccaacttaaaacttggatgagataaaatctagcataacgaatctagacaggcttttaggttgagttttttttttggacggagtatatagctagctagctttaaattgtgccagcccatgctgctgtacatactgtttgtatattcaacactccttgtgcataaattaaaaatgcaaaaaaaaaaagcaatcttgattcctgtgagaaataaactgaaatttgtagatagaacacatgaatttcaaggatgagttctatttataaggttggggaaaaaatcatacggccttaaccctaaaccacattatccgtcgacccatgttcagcgatgtaaataggtcaacccatgtatccgtaaaccacattagtattttttttccttagttatatactaagaatacatgattttataaatattccttttgtaaggtatttttggggccatgggttataaaagccaaagacacataaccaaagcaataaaaataattgtcaggtaagacttctatacttctactcataatggtctcaaaagccagagaattggatcacaaaagtgataaaaaaaataaaattaattctacaattagccgtgatttataagctgaatttggaaccagcatgactacattattcatgacataataatacaacaattagtttaaaattggaacatgtacttcttccccaacatgtttccatcctaacaccatatgacggttaggaactcaacttttcgcttatgattatgcttatcaaccagaatttaaattcttaaccttaaatttgaatttgattttgaggttttttaatcgtagtttatttttcagcttttacttttagatcgtttagaacatttatataaaaattttattcacaaattattttttatttgcaaatatgtcgtttggcttatttcaccaaacatccaaacgatgggactgttagtctttttccagcttaattattgtgtgaaccaacaataattacacgtttttacggcaccacaattttttcgattaagatgtatataaacaactggatgtagtcaatagccgtacctgtacgtgagctacccctaccgcaattaaattattctcttctagccttttcttttactatatcttttctcctctcgttagttatggctcttattgttttgcttacgtttttacttataagttaaattttgaattttaaaattgattttttttcatcgtagtttattttacaacatttgctaatatacgattcggataataatgtttactcataaataaatttctgtcttttaatatacgatttggataaatatatgaataagcgaaagctctatttattatatatagtatatatgcgacgagtagtggcacatctcacacagatcttcacatgcaattgagtaggactggcataatgggaaaaaaattaagaatgtacacccaactttcggctgtaatagacagggacatagaatctaatgtattgtacactcaaatcaaatggttaatcgatattcaatcaatcatcggttaatcaattaattaattaattatcccctctagctagttactccaaaaaatctgctgatgtgtatcgtcaaatctggtcatacattagtgtaatctggtctcaaaaaatatatctaaagagagataaagtaatataattacacaatcataatttgcccaactaatacatccgtagtgacgacgatagtgtggactggtcccacatgtcattcaggcggtactcgtaataatttcagtaagataaaatatctgcggttcacttcgccatgcatatcacaaaccttgcaagttgcaatcttgtatactatagtatgagataaaaacaagagagaaatttgcaagattagtatttatttatgactttgttacttctcattatcctggctagcatcaaaagcttgcagagatcagacccaagatttgtctagctggctgctccagactgatgataattaattggctccatatagctagctagcttctcctgaacatgctaagctagcaagaacaccctacaacacctggacaactggatatcagattttattgattgaattaaagacaaattaagaagttggaagaaactaaccattcattatatatatatttttagataataaccattcattatatatgttgatgatgcaaagaaagaactccttattagtctctcacacctgttcatcttcagatcttggcttgctagctcatgtgatcttcacacctgtttcatcctcagttcttgactcttgctcatttgatctccaattaattcatggatgctcagctcccaaacaaaacatctaagatttgatcgatcctgcaagattaaaatctgcacacagaagaatatataaatttgcatgtaagcctcacaccaacatatatatatgaatacaatctggccctttaattttgtgcagccacaagcagatgaaactgcacagcatgatctgatctttgttttggcagtcaattctgccctcacctaataagcactcatcagatcatgctggcagcttcagctcctaatggttgcacctcaacaatcaaggctgtgtttagatctaaagtttggatccaaacttcagtccttttccattacatcaacctgtcatacacacacaacttttcagtcacatcatctctaatttcaaccaaaatccaaactttgtactgaactaaacacagccaaaattcacacacacacacacacacacgagagagagagagagagagagagagagagagagagagagagagatatgagaggaagaagaaggctctgagaggctttatatagcagtggctccaaattactctgaccgaccagtacacactttgatataggtggttatatatatgtgtatatatgtttgaaggatatatatataatacggcttagttatctctagctagattgatgtaacaactaactaatgtggtggtcccattgcaaatttgcaatacactgtgtcactgtcaaacacacactaaccaccacctttcagttagggtttctaaaatatattttctgtatacatggatataaatgcatatatataaacaatattggccacatgagctctatgattttagtctatgcatttagggccatatttaaatttttggaagtttttttcgggtccctagtgccagccaaccaccacttgagatcttaatcatacatagtactttctagtcttttgctaagctattctcattttgtaataatttgttgatgagctagcttttgtaccattttgataattttgataattaagccagggccatgtgtaaatggatgctgctcccaaagtatcaacaggtcaagcatttggatcttgcatggaaaggtcttggtgatttgatataatgaaaatgtatttagttttttatttgtctgattcctaagaaattgcttttgaattattattagcattgtcttgaccatatatataattaagcaaacaattttagcaacaagctaggaaagcgagatgcatatgcctgtgaaatgaattctatcacctgtctggtagctggcgtattgtgtatcgtgtgatcatgcattgcacacatacattagaaaatttaatgaatacagattaattaatttgtaatatatagctggcatgtagtacactagtaccttgcagaaacaaaaatatgtatattagtatataacatgtgtgtgcaggagatctacacgtagtacatggcgtgcaaggcttgcactacagtttttatcttaactaaaaggtataaattattggagatgcatgcatgatttaataattgattaattagtggagtagttgattggatcactctttaaaattatactgtatgtaggatgtactatacgtatattaacagttgttatgttgtactaatgtactatataatggcaccaaatttggcacctcaattctcatagcatgtgcttgtgtgaatgagttgtctctcgatctagctagctaggagtacgaaaaatactcccattaattaacatcgacaaaatactcccgttaattcaccatctacaggttatactccatccattctaaatatagggtgtagctatatttcttcaatagtaatataagatatgcatccatgcatacaattaattagtatttctcctctaaattcatttctttaaaaattctctatgctcttgatctctaatcccagtggggacatgcattataggacatgcattatatttagagaacttttacggtacaacatactaccagtatatactggcagtatatagaagggcatgttaagaatttgatagaaaataaaataacactttagtaatttttggttcagattgaatttaattgggagtagccggtcctggatcttatcgtgcactaggggaggagcatcttgagcgccatttgatgatgaagcacgtgacgatagcacgatttgatgatagaataacgaagaaaagataaaattaccctttcaaactttatactgctatctaattaactaaaaaatccaatcaatctacactgttagatcatatatactagcagtatattgtaccgtaaaagtcctctatatttattggggtgataataattatttcttggtcttttaactctttatgttagtagtaacgtcatatattttggagtggagtgagtattaattaagtatgtatgtatgtacactagcatatattcaacaaatataatcaatcttaatgcaaatgataaactaatccgaagctgttcaagctattcttaactttgatcaaactactatatcttttacatgcatatatacatgcagacaaatatgtatatggctcaaattctactacacaacaaataattaagcataagtctatgctgactgagaacaaagaggacaagtaatcccttggctgcatgtgtggatcaagagtacacactacaacaaagtgaggtaaaaagaataaatatactgcagctttgcaagtattgaaatatatacagtgcaacaaagtgaggtaacatgtacttcatctattccaaaatataatcatttctagattcaaatgtgtacacttgtggggtgttgattaatttcaatgcatgaaaacatatacattttcagtcagtaagatgcttgggaagggaagaattaatctaagtaatccaaaacttaataattgtccaaagtgactgaaagaaaatattttccctctgtttatattttggaagtatatgcacataccccaccattggaagaagaatgcatgcagctagcaagcacaatctgtgcctgtctttcatgtgtatttacacacgaattaaataggttagctgcagccagcatgacctagcaacaaggcatgcaatgcatatgatccccaaaagaggccacatgaccataaaattcttttttcttggtgatcatttcatagctagctagtactccctccgtcccataatataagggattttgagtttttgcttgtaacgtttaaccactcatcttattcatttttttaaaaattattatttattttatttgtgacttactttattatttacagtactttaagcacaactttttgttttttatatttgcaaaagaatttgaataagacgagtggttaaacgttgcaaacaaaagctcaaaatcccttatattataggacggatggtgtagatcatatcaatgctggcggcagggcagcttcacccattcctttgggcagttccaagattgtatcacaagattaatagattaattatacagtatatacacaagtactagggaatcacatgttctcttctcactgctaaccagctagcatctgggaccattcatgcatgggatctctaagaaagacactggtgactagctagctagctcctatgaattaatgccaaattatttctaaggtgatatatagtttaattaatttagcactgaaaggttaacctgggcgacttcgatctggttaaaagaaaaggtcgataattaagcaaaactgaaagaaatgagggcaggagagagattacatagaacaaaagtacaaggaagaaagattccaagaacaatgttaagaaaggaaaaggaacaaaataaagaaggatctacctgcactcagtatgatgaggggtcattttggtttgatgccaaaattaccctaccagattgttgtcattttgaatagtagtttagttagtgtttagtttgttacccaaatataccaataagatacataagttgctaaaaaaattaacactaccaaaatttacttatgttttggtattgctaatattttagtatggtagcaacaaactaaacaagtctgatataaacatagtgctcctacatgagagtactcactccggtttcattttaattgacgttttagacaatgacatggtttacaagatatatctgtgactttgtttttctattataatatatataataaataaatacatgtttatttttattatagtgctttaaaagacaaatctatatatgttattttagttcctttaaactaaatatttttaaagttattgatagtcaaagttataaaagtttgaccttaactttgttcaaaataattaatatggaagagagagtatgcagcatcttcaattcattaacctgaggtaggtctatctagatagggagaaactgccaatgaagaagactagcaatagaagggatccgtagtatagctagctaaccctagatgcctagctagctatagctatgtctagacagcaagcataggctgctgcaccacaagagtgaaaggctgtggatatgtgttgagctgttgaagatactactacatctcaaaatataagtgtttagagttttaaagaagcttaaattgatcgataatataataattatgattagttaatatgagaaaactattatgtgaacatttaacaatagatggttgtttagttgagatgacaaaagcatgcactactacagaaccacatatcggtgccggttgggacattgaaagcggcaatgattagtccgccgacaccaatgtcaatcttaaaaaccggcaccaatataaaatcaatgagccaaaaaaaaacggctcctcgagccgacgcaggagccgatacttcgatccgatgaactccacatgaatccacatgatgaataagaacaacacatcaattctcattaataaatctcagatgaactcacatcggcacatcaatttcaagaacatcatctcacatgagcaacaaatgaactctaataagaacaaatcacaaatcacaaagagagagggagggggagagatggatccaccgacgccgtcgcacctcctgccgccgccaccgtccgaccacctcccgcagctgaggggcgcgggccgcctgcctcccaccgctgaggggcgcaggctacctccatccaaccgtctcatgccgcctcccgcagctgagggggcatgggccacttgcctcccaccgtcacctagaataggtgctggtttttgacatattaaaggtgtcagttttttataaaaaccggcacctaataggtgccggtttttatttagaaccgacacttataattgtttaaagatgtcaatttttttttgtgatttcaatccgcggaggtggaaaaaagcctatagtggcgacacctatttgatattttgtagtagtgatgtcgaaaagtttggtagtagtacattttaggatacatttggaatgttacattattgttatactttagattacaataatttcttttaactttaacacaaaacatggaaatattttccattgtgattttatgatagctattgccaccatatatgcttgcctacgcgatggagctggccgcgtacgtatagtaatagtttgcatgttgggaaccaaattccatccggttgtaatctcatgaatggatgaaaaatatggggggtatgtttgttaaaattctaaacggtacaagtttcgtaaaaactattttttaaatagctattaattaactttataatagttcattcatacatttctattctcggatatctatattcctttaaaaaggaacagtgatcgtgtatgcttaatttgactctcataccatcatatcaccaactctccagtatttttttttctatggaaatgatattatacgaccaaatgaaccacatgttaccgtcccccatcgtcaacttcctacttttgtgatgagaaagaaaaggataatataggttcaaacctgaggactcatattttagtaacaaatatatatgtagaaattaagagatgatatataaaaaatgatgataattattaattaatgatttttttcctcttttaactaaatcttattgcaacgcatgggcaatgctagtcatcacaaaatcagataaactatcatctattcgtccatttcagcactttaatttgaacgtggttacgacaaaaatatatatgtcgactacacatatcttttatggtgccaaattattcttctagttggtggaaagtgagatgatgctaatttggctttggttgaacctggcaatgatgaattaaaatatgacctaattaccaaatgtaaattcaattttgagtttgtatactagtagcttgtggtagcctttatttgtgcatattggcctattggccacaaattaagcaggacttttcttcactgatgaactggatggtggctgtaatttcatactcgtatcttcatgtgaggtttaattggttgttaattactgcatcaaggaacgatgatttggcacggatcggtagatcgatgcatggtcaaattgaccctggccgacaagaggttcagatgaaatcctgacagaacatactgtactcctagaaatgacaagatcttgagactcgaaacaaaggcctctcaagtcagatcaacagctatcgatcctcccaagtcagatcaacagctactccgtactccgtatcgatcatcgatgagatacttggattgcattgggagcacagctagctgaaacatttgacagctagctaaaaggatcagtactcttttactgttaatttcgctagatatgcaggagtagcattaggtaggtacaacagtctagtatcacttgtctcgtcgactatctgctgccgtagcttcttccttttgtccggtcaatggtgtgcattccctgcatcgcattggtgtgcatcgcaatagtgttcattggagtatgattgcgcttcctccttccctccccaactataaatatgtttatgttgtttacttcctcaatactaaaatggagtaaggtcgagtttagttctaaactttttttaaaaattttttaacttttttatcatatcaaagcttttctacacacaaacttccaacttttccgtcacatcgttctaaatttcaaccaaaattctaagtttaacgtgaactaaacacaccctaagttcatttttcactcttctcatacatatcaatgcaaaaacaaaaaataatagaataccctaatataactattcatcactttatctactccaaatataactattcactactttatctattcccaatataattgtttcatacttttacaaactctgatacaattattacttaaaagaacttattttggaataaatagatggagctaaaaataaatttattatgggacggaggtagtaacaataaagggttaggagaaaacattttgatgctccttaataaacttaataaagaagggataagtatagtgtgagtgtgatcggggataagatgcaaaatatttacaattaagtgcaaggtgattaataagataagcattcactccatcccagaataaagctcctaggagtattttgaggtaattaaggattgtggtgaaattattctcattactagatggtggggtgatggaaattataaatattatgggtggagggcaggtctcaacggttgctgggatgatgagcgcgccaggtagcatgtgaagtaatggggtaaaaatcacattttatatattctataattagctatatatggggtaaaatttgaacttagttatattttaagatggatgcggtagtatttcggagtgtttatatttttgtcaataaattttaaactcttgatatgcttgtggtacaaattatttggctcaatcggtggaagcacaggctagagggctatgcatgtacaccctccgtccaaaaaaaaaaaaagcttaatctaggaagggatatgaccccttataggacaacgaaccttttgttgttctaggggtcacatcttattgtcttaggagggagtcacgttcctttttaggttaagttttttttttatggatggagtaggctagatggctatgcatgtacgagtagtatcctagctacactatcactactgtgcatggaagtattgtcacatcgacggccaattaaaggttgcatggctaaactttagtactcattccaaaatataagtcataatcacccataatacaaagactaagaaaatatttaatcactttcttggttggaacaccttgatacatgtaagcaatatgattggaaggtttgatgatataagatttaaaacaaaataattttataggactaaaggatgatagttaatgtatgcatgcatgcacaccttatattatgagaaatgagagaaaagtggttgtgtcttatattttgggttggagggagtgaatttaagagcaaaataacagcacaaaacataacactacaagtatttgtggccatatgcatgtgtgtttattagtacttggcaagcaaatttttaagggctccttcgacacgcatggttatcaaatacggaaataagaaaaacatgtgattaataattaagatgtcatgccactctatccgtactaaaatgtacgtagctgtttctgttttgcattttgtagctatttcatgttaaatacaattttgagaccgagggagcataaaactatatgaatttctcaaaaagagtactactccattaatttaattggtttataactcgaacatagcgttagtgataaggttttaaaccccctaaatatgtacttttgtggtaatcttattgccagccatgtagttttgcgatacttagcattaaacatgtagttttaatttattgttaaatccgtagttttataatacaccatcttaaatatataatccttccatattttaatgtatgacgccgttgactttttaatcaacgtttgaccactcgtcttattcaaaatttttatgtaaatataaaaatacttatgtcatgcttaaagaacatttgatgataaatcaagtcacaataaaataaattataattacataaattttttgaataaaacaaaaggtcaaacgtttgtcaaaaagtcaacggcgtcgtacattaaaatattaaaatatggaggtggtatattttgcgataattcattaatttgactgaaatttcgtgaaatttactcaaacaaaattatcacatcctacctaggcccatcccatctggcccggcccactccacctccctcacggcctcacctcgatacatgcgcgaataccaccactccccgaccttagccctagccgccgccgccgcgcgctcccctccccatcccctcgccgcgccgcgccgccggcgaacccccctagcgctaggccagccgtcgccgcgcgccccgcaccctctcctccgccgccgggcctgccgccaccaccgccgcgaggcctcggttggtatccatctatctatactatctatatcttcttggatggcagtttttttttatcgagatgtgttgctaatggtgctgcgttagcacgcccactcgcgcgcccgcaggtggtggtcgaggacgccatgcccaaggcgaagaagaaccctcatgtcttctttgacatagcgatcggcggacgcgccgctgagaggatcacatttgaggttggttggttggttgaggagctagtttgttccagcatggctagttgcctacctggtgttattgtttgagtaatcgttgctgcctgggctaactttctttgccttcgatttgcagctgtttgcggatgtcgttccgaagaccacggagaatttccgggctctctgcacgggtaaatttttactcgtttgatgggatataagttgcgtgtagcggatcagttgtcgctaggaaatttatttgcgctatgcgacttgtaataaaccttaggtgatgaacaatgttttatgataaggatgcgcgtgagcttttctgctccgcagctctgttgggtgaatttacatgagtgatgaggcacatgccagttctgaatgtagtatattacaatgctaacaagtcatactcagttttattatctgcatgctcgtgtatggtaattaatattgttatctaaagtagaatagtgggaaaaaagtctcactatgttcctttcaatggttctggcatgatttgttctgttataaagatacattattctttcaatgagcaattggcatttagtttggtcaggtttcttgtaagtcataggcttatcatttcagtactatgatagtttgtatttaaatgatgtattagcactgatttgcaacctgtgtgaccttttatatccacatgctcactttttggttgatatgtaggtgagagaggccttggagtatctacacaaaagccactttattttaagggaacaaacatgcatcgcattctgaaaggttttatggctcaggtactgaaaattaaaccaaatgatccaagtcctctggccactgcatatttctttgtatcaactcacagtatgtttttgttcttttatgggatttcaaatgctgaactctacataattctagaatgtagatatgaatggcttgctagttatacagcataatcccagatttttttttgttccatttgcaggatatatctactctagattgcattctagcatccattttttccctaactatactcatcttatcaaaattttcaactgcagggtggtgatttttcaagaggagatggtattgattcattatcccaggcatcttctttcaactgacttcttgctgttgtacactttataagctcaacgttacatgctgtttccaggacgtggtggagagagcatatatggtgcaaaatttaaaggttaatgactaatgaaatttgtggctgccatagaatttttttaatccaattagtgtcaaatgcattagtatgctttcgctaaagtttttgtatgtactttctggtgttctacagatgaaaacttcaagttaaagcatgaccaacctggtgttctttccatggcaaatgctggaccagacagtaatggatcccagttttttataacattcatgccaacaccacatcttgatgggtattgcttctttctgttagtcagttggcaattttctctgttaatctctcttctagttccttgtgcatattaagttatgcctttctttctttccttactgcacaaagatatagtacttgatatctaccaataccaaaatttaacattctagagagatttagtctattaaaaaaccttgaatctaaaaattctgtacaaccatgaaagatcaattagcctcatgcatacacacataaaagttgccatttgttaaataatatcttataaacagcacatttatgtctatgtatatacaaccatagaaaactctctggagtgggtgtgtgtgtagaacacatcattaagccctactcctttcttaaatgtgtctacaagttgtgtcaggtaatggttgagagtatgtggtggctccaacacagtgtatgttgcccacagaagtaatcaatttcctaatttctatggtgttttcctgtggataagaagtcatataacttccttttaccaatggctccaaaatctatcaacttcaaatgacttaaaattataatcgtgtagcaaacatgtggtctttgggaaggtggtcactggaatgcccttgctgaagaagcttgaagcggtaggttctgataccggaaagcctacttgtgaagtgaaaatcgtggactgtggtgaagtctctgattcccagaatcagctaaagggagagaaaggtaaaaagcaacataaacagataataccaaacagtccatgtgttgtctggttagctttctcactacttgttcttttgcagaaaagaagctcagaagaacagaagacaattctgctgctgaaaaaagggtcaaaacccaaaaaccacctactcatgataaacaaaagaaaaagagaaagcattattcttctgattcctatagctcagattattctgacacacagtcctcagatagtggctcggaatcagaatcatactcttcgtcatcattggatactagctcatccagcgaccacagacacaagagaagaaaaagttcgaagaaggataaacacaggtctgcaaaggggaaaagcaaacacaagaagactaagagaaagagtagaggaacaaaaaggaaatccaaacggtacgttgatgacctgtatgatcttggtagtgttattagcttataatgatgtatttgctgaaagatcccctgtctggagctttttacagaagctacaggagctcaagtgatgattcagatagctcaaagacaggcggcagcagttctgacagtgaaagtgaaggccgtcgtacgactcgtaccaagcattcctcgaagaaaggtaggacaatagaagagtcaattcacattcatttgctatgaaaatcctgagtagtctaaaatatgctgctttgattgaactgcacagatttctgttctgcttgttaatactttggactcgctgtgattgtccgtgttactttaaattttctctgcctgttaaattttctgttttgtggttcaaaaggctgactttgtccactgcacttgctaatccctgcttgcgacctgtccatatctactttttttctgcaactaaactatctattctattctgatacacagaacaacttatgtctgcaactatttttttgattctgtttaccactcaaattctttaagcatccacataattgacgatactcttggccaaccttttgtttattatcatttcttgccgaccttaattacaaaatcattctagaatactttgaactgattctgaatatggtaaatgtagagtttcatcatttatattttttaaattgctaacaaggtaacatctttctaatttatgacagaagttaccatctttgaccttgaagttttgcctgctgtgtttggttatgacgtatgtttcatggaatgtgttgcatttaattgtttgaatgtactgagattgtctacacaattttgaactaataagcagctttgttcatagcagatccagataacaccaaaactataagtttggagaaagatagtactttggaagatgcagataaaggcaaacaaacagctacccttgacaacatatcaaatgaaggaagcaaaccctcaaacacagatggaaatggggctggtatcaggtacgaaaatcagaactcagaagataaagctagtaaattaaggtttgattacttaaaacaaattacttactgtcaggttcctttcagtactactccctccagtcacaaatatgtgacttttggaatgcgtgcaccgtgcagtcaacatgtttaaactttgaccatcaatattgctttgaatattttgaattcaacttttaaaaatgttatgattatatttgtcttaaaaatagtatcaaaatattataccagtaattcctaataaaataattgtcttgatgactgtgtcattgtgcaaaacgtcacttttttgtgactggagggtatttagcagggataaaaatgtcctgttcaacattgagataaccttatcctttgagtacccaattgagatgtttgtttgtatttgcagggatgatcctggtgcgagagctaggagcagtcctattagggctgatgcaagtttaacaaaagtggatggcaacaatggtgctgatactgcagaggctggtatatctagagctgaacctgtgccaaccaatggtaaagatttagcaatgggctctacagacaacggacagcctcaacgtgtcaggaaggggcgtggttttactcaacaatatgcatttgcacgtcgatacaggacaccatctccagagcgttcccctgttcggtctcgctacaatgatggaagaaatgataggtggaatcattttaataggtactgcagttagattatttaccacatttttttaaaaaaaaatgatgattaatttaatgtttggatgccatcatgtgcaggtatggaagaaatggtccctacggtgcacgctcaccagtaagaagatatcgtggttccccaagagccagtagtccgtccaggttggtattcttctgattatccttggaatctcctagtggtcagtaccaattgattgggtagagtggatgaactattttgaatatagttgtgtactcttcatgagttcatgccttctttggggttaacagtgtagtttgttattatttagtaccataatacccggggttatgtgcaacgtgccgaaacatctgattttgttcaacttggaccataatagtggggttttataaaaactttataaaatttactcataactatattatgatgccttcaagagtttagttaatctgaatattacccaagttcataacttgctttcattgccttatatttcatgccaattcttctcttaggtagatagcagaggctatgcatggacaaacctcaaactgggttacatgttaacatagatacagtatattttgcttagatcaatcagctttcttgcgtgattcaaattcaccaaacatttcctttttatccgcttcccttttttaccattgcaaggccatgttactttagcaatgagctatacatttttttaagaaactctgaaccattgcccagatacccaaggagagaccgtagcaggagcaggtcacgcagtccattgaggtaccgtgagcgtggaggatatcgccgccccagtccaaggcacagccgcagccgcagcccagcggagcaccagaggcgagatgtaagaaacaggcttcgatcaggtcgggatggtggtggccctgatcaccgtaatagcagccctcctgtcaatagaggaaggtcaagatccaggtcgaagagccgtgatccctcgaagtccagatcaccagatgctcctgccaaaaaggggagctcaaaatataaccgcaggcgcagcagcagttcaagatccagtagccctgctggaagtaaaggcttggtttcatactgagatgtgatatcagaagttgaggtgatatcaggagttgaaaaccctatgttccatggtagcttggtattgagtactaccctttaagaatgatgatgtagttaatggcttaatgtactcttcttttgtaacgtttctcattcagagattgttgtttttatgcatcttctatttggatatgatatttagacttctaagttctaaaatgcttcgcatcataacctaagcataatttataggtaaatctaccctttgtcgtctttttatgattggaagtttgtagtctcttgtcctattaaagcctgtcggtaactttgtttagatagtctcttgtcctattaaagtctgttggtaactttgtttagatatttgtattggcacgtttcttgttttcaacacgagtttttcctctgttgacaagaaaaaaatgagctgtgaatctgttaactgttatattcatattcctgcattccagtcgagtccatgtttgtttttcagatcccttaaatattgcctcatttttatttttgacggttcataaaaccaacaagggaacaaatgaagcaagctagagaacaaagcatgccatcagcacccacaacacaacatgaacacgaacattagaccattggagtgttcagtgcctaacatgtaacagaagcttaacacaacacaactttccctgtcattttgtctgacattgcttggcaacttggcatcaggtaacagttaaatgggcttggtcctttgggacaatctgttctttgatccacatggagacaggtaccagcacaagtaagaagcacagatcatttcgttttgttggcattgcttggcatcaggaaacagttaaattggttggtccttggggacaatctgatctttcatccacatgtagataggtaccagcacataataagaagcgcaaatcgtccccatgacgaagcggaagatgaaggtgaaaggattcactggtttctcaacatcttcagcctttggaccaagctgcaacaagaacaaaaggtgaaaaaccagataacaaagcacatcagtgtgagctagcatgacacagaactcaggtgtgttagactcactgttaacaaatttaggtgctcttaacatttgatgtttgtaacaagaaagcaattctgagttaatatgaagctagaacacattgagatgcaaagaatacctgcaaaggggaatcgccagacgatcgcttcacgcctgtcacagagcaccccatgatcaggccatggcgtcgaacaccgcggtaccatttgggcccaattctcttgatcttgacatcctggaaccctgccttctggaaccattctatgtactcttcttccttggggaagagcatccacatgtcggcgaagaagcgtgacagccaaaaggttgggtgaaccgggccaatcaaacaggcaactccacctagcttcaggaccctgtaggcttccctgattcctcgttgtggatcaggccagtactcaatgctgacaaaacaacaccattggtaagtatggcatcaaaactgatcaatgaccacatatgactaagcttaaaagtaaatgaaacacaggtcactgatgaccacatgcatattgctttcacatttcaggtaatagattcattggataggagtgatacttaacatcttcacatggacaatataagtcaaaacaatcataagagccagtattatcatattaacagaaatctgatccaacaaatatataaacatctcatcatggacacttgaatcactgataacattaaccatttactagaaaccacactactgcaaatatatccaaacagatggttttgtcatggtgtcaacgctagatcacatagaatttaacaggtattttctttcattgatacagaaatctatacatcaatatcaattcaaggatatgcaatgacaaaataatggcattagttgatgatagatgaaaaaaaatgttattgtacagttcacatgtgaagtgtaacacattcacattagcaaagagaaaattcttgaccaaacttaagttgtgcccacacataccgtatattggtttatcctagtaaacacaaccaagaatgaattaacttcacaatcctgaacacatatctatacaagacagcacataaaatgttttatatttattttaataaatcctgcatcttcttatagccaaattataagaatgattctgtgttgctatatgtcctattaaacacgacagaataaaccttcatgggttgctcatgggaaacacaattgagaaaataccgtaaactgcaatgcaaagaggacattagagaatcacctcccagcagagacatagcgatcaaatgtgtcagtcgggtaggggaggtcctcagcgtcaccctcaatgatgttcaccccattcagtgccaccttctgcctggccttctcaagctggtgtggagactggtctagcagtgtgacattctcattgtccacatgcttgacaatccccaatgtggtgaacccagtgccaccaccaacatcgacaaccttgagcccatggtggtagagttcagcaggctccaatgcatcatccctcatgtcctcggtccaatgccccgggtttatgacatggtcatacacaatggaaaggaacctatagaaccagaatgcttccttcttgtgttgtatgaacctaggttgtgatgctggcctagcagaggagaccgcgcactttggtgcgatatactttacccttgatctcacaccacttctatttctcaaaggaatcaaacctattttggaaggccccaagaatcctaatccaccgggagctctaaatgtagaggaagaaaccatttccttcattgttgtttgaaaacttggatcaaatcacgtatggcttagtgtatcgttgggcaagagaatactggttttatgtacgaaagaatcaacaaacaggaatggactaggtagctcctatgcttcatttgtgaggtttcttggtagatttacaatgcaaataaatagaagatcagtagatcacatatgagtgcctgtacgatgcaggagagagggagctagttcttggccatggtaacctcagctgccaagccacaggaacttgagaacatgcaacagccatgtatgtaagcatgtgtgtgtgtgtagtcgtgtacagtatagaccttttttgtgatgcaacaaaaggcttaagcttctattccatcaggaattcaggatgctgatggctttatttgtcttcatctcctctagttgctccattgatggggacatgtgggttggggattgtaaacctatggatgacaattctggacaggaatgtatgggggacttgctacttggcatcttgcagtccttttagttctcatccaaacattacacctaatttgtttggtttatgctacataaacagctttttttttggaataacacaaattcaaaatgaaagttacaagagctgcccataacagtctaaaatacaagtatcatttaaagtacccataattttcagttctaaggaagattaacagcatatgtgtgattacacaattacttctgcaagtgaaaatattttattgtgtaaacttatggatttctttaagttcacaaactaaaatgggtgcaaatgttaccaacttaccatagacaaaacccatattttggtaatcctaatccacataatccaaattgataggtatacacctctcaactctaatgtggacaaataaaacatgtttatagatcttgctagttaagtaaaaagaaaaggctaacagtgacacctttctgcttttaatgatctgtaaatgactatatatctttagtgccataaaaaattctctatgagataaatatataggtctacgaccaaggagaactcatgatcaaccaaagtaaattgagcatacctggtcaatgtgaagaggaccatgaacaacactggagcagaaatcaagcaaagaattatatcgcatgagctctgatgaagatatacatcacatgggtacatcacagaaggggcagcaaattcatttataattgatttaccattactccaaagaacgtcaaggtgacttccttttttacattcacatggcaaaggtaggaaataaaaaaatgtgtaaaattggttagtgcggaagttcccaggagctaagattgaatttgtacaactatatcattcagagtgaagtaatacttttacagggccctggaagctgggacaagtttcaaacataattcctcaaaaaggtaactaaaataccactttcagattacttgttgagactatggaggatcattcaggatttagtagagtgaattgcagcttggactgtctcttgttaccatagtttcactttgaatccgctttaccttttgcttcactttgaaccccctttttcttcttctccagctctggaaatagcattatctcctaggtcacaccacttccgcggttctgcagccgctgccataatactggcagtggatatgtgcctgagtttgaggagaagggcaaaaaaaaaggggggggggtgcaaaatgaagcaaaaggaaataataggggtccaaagtgaaattatagtaagaaaaggggtccaaaatgcaattcactcgattttagtatacagccaaccagaatcactttactccctaaacagctaaacacctttagatgctgctccttcttgctgattagctttctctgcttcaagcttccttaaagcagatgaactcaatttctcaccctctgctcctccggatagaagatcaacaacctcaacctgcaattgagctcatcaatatttggatcactatgaagcatatcttgtacttgtaccaggttttttttaaaaaaaaataattctagggagtatgaacaccacaccttcagcaaaggtagtcctttctcttctcttttcctatttacggcaaatccaccatttaatgtctccttactgaacataagcagcatcactaggttaaatgaggaaaaacaaaaaggagaaaatttaaagtaagcacgaacaactctacattatttaagcatggcatatttcatacatttttaatatagttccgtagctgtttgatgaatgaatttcaattttggtcagaacacatgcatgaagtaataaagggaaaaaaattacagagacttaatatcagataagagatgatcaaattgtccatacctgacaataatggcatccaacttatcatcaataatggatgggccataaggatcctcaataggctccacttgtactaccagttctggtttaacagactgcattttatacaaaaccaatcatgagctttcaacaaacatcataattgagcatcccagaagcagcagtttcacttttggcagctcctcctaagtatgaacatgcttaattgggtatgtacttatgtgaaactgataacccttacaagtttttttttcttttttttgcggggaataacccttacaagttaagaagcatgcaattccaaaattctatatttttctaaaatgtagacgactaggaacaggtcttcagtacaaggaagttatggaacaaatttcgcagcaagttggtcctaaattgccacataactcttcaccaaaccaattcactgtataacttcttattactcacctaaagtaatgtgccacatgagagaagctaattctcatgcgcgaaatctaaggtttactgaattgtctttgtaccagaataaattatacaccgcctcccaaatcaactgaaaattacacctttgatttccttcatttttggaagagaaaagattcatcttgtcacaacgtctcacaaacagcaataaaaagcagctcagtaacttaattcatgcaaactgcttccactagtcatcacccaatgttccaatcctttgtaggagtatttactaacagaaactatatactacataataaagtaggcaagattatcccccaccttgatgtaatcctccacagccttcatgcgcttttcgacgggctcgatcaactcagcgtactgcaggcacacacacagagggtggaaatcaagaacacaaccagcagctagcatcacagctccaataaccggtgaaaaatggtgtgtcatttctacctctttcttggcgagcatggggcctgtgcagacgcccaccacgatccgatccctcgccaaatccgccgaggcctacacacccaacaaatcgaaaaattcgttattcctcaaagaggattaatactaagctcggttctttaggaggaaaataaaaatagaaatcctcttcttttttttttctcaagctcgcagcaccgcaccttgaggaggcgacggtggccgtcgtggaggcggtcgaaggtgccgccgaggacaaccgagccgtacggcggagcatcctcctcctgactcggcggcggcggcgctccggcgaaggtgtcaccggcgacgggaggagtgatcattttcttttcctacttcaatctgtccacctctgcatgctctgtccggtggagtaaaggtggtcaccggtgaatacgggatcagagagaggcccggggaggaggcggcggcggcggatccggcagcgggaggcgccggagacgagggagaagggcggttttgcgggggaactgacctcgctggaggaagaaatggatgcggggcggtgggaaggaggaggccggcaaggggagcggcgacggcgagccgacggggtctctccggtgatgtgggctgaggttgccggcgattggccggcggcgcgagaggaggaagaggcgaagagcactttctacttttgacttttaccctttatttcgtttgtttatttgtttctgttttttttctcttgcgaggaaaagaggagaaaacgtacacgtggacggtccagattgactgattgacttctttagaaagagaacgtatacgcacggcttccaacttcttctgccgtggacggtccagattgactgattgactttgtttcctagaactccatccgtcccattttaaacgcaaccataaattttcgcgtccaactttgatcgtccgtcttatttgaaatttttatagtatttttattgttattatatgataaaacataaatagtacttaatatgtaacttatgttttttaatttttttaaataagacggcgattaaaattaagcacgaaaacttggacggagggagtaccacgtagtccaagaatttctttattccacatgaaatgaaattctttatctcacgcttggtgttaaattttttgaagaggaatcatatttttccatcttttttctcggtgtagctctattttttttctaattctttcagtagtaggtgataaatccttccacagcgaagcacctgtaataacttcatcaatctcaagacatattggtcaatctttaaaagtgctaatagggataggttgtaagtgtgtgcatggatagcggtggccggtgggtctgcgcgcatatggacacctatatctatattatgtttagaaaagaaaaaagaagaatctcccacctaaactccgcttgattctcatctctataaccaaacaaggggtgtgttcgctaccaggggatgggaacggtgtacagtgcacacgaaaaacggggcggtacattagcacgcgattaattaagtatttattttttttaaaaaaaatagattaatttgattttttaagcaacttttatataaaaactatttaaaaaaacacaccgtttagcagtttgaaaaacgtgtgcgcggaaaacgagtgagagaggttaggaaaagtagcatccgaacacacccaaggtcatcaacttttctcttaatctcccaatcccctttcccaaacacgattctcaatctctatagcaagcacatcaacttcctctaataaactcctaatcccccttcctcgaagttgaaaaatcgaacatgaatttttcatcagaaaaataatttgaaaatttattttgaacgcattactattgacgtgaaattcgtcgcacacgaagacatgggagatccgcttagctctagtgcaggtcatatcaatcgggtttagggcgtgccagtaagtttgataccacaactgacagaatagataaacaaaattgtaccaataaaccaatcgaccgatgttgatatagagtagtaaatacaagattacggcatacatcgggctagtggtccgatgtaaatcagatgaagccaatatctgtcaaagcacttatatatcggctagaaaaccgatgctagtaaggtacatgcagataaacataaataatgatatcagctctatccagctttccgaagggacgaaacctacgagctatcaactttcgttcggttacttgatagatcggtctgaaccgagttgaagttaacaaactaaaccgatagaaaatagatcagtcgtactacggtcgtagatcgactagatgtaatataaagataacttatcggttagccctccaataaaacgtagcacaaaacctatcaacttagcaagacttgattatcagcaacaatctagaggatcagacctaaccgagacagtacgagatcacatctaataaataaactatataaaccgatagatctacacaaacgtgatgtatataacaaatcaatttaaaacaacgtacgcttagagaaatatcaacttatccagaatatcagacctatccgagaaagtcataattaagctgatacgactgtaaatagcgatgcagttaaagatagaattaatatatctaatatgcaacgcttgcatcaacttggatagactatcagacttaatcaagaaagttctagccacaccgatacaggcgaagttgatagaacttacttcctcactggagatcgaacttaaccgatgtagccctactcgaaactaagaactcgttggaataagggtggcaatgcattgaaagtatttgtattgatatgtggagatagactaaaaaaacccgggtgtacatatttatactctcaggttgatactagtcctgatcgaatacgatcatgcttaattaattgatagaattaaactgccatgccatggtttcacgattccttcatgaactcggtctcttctagataggcttctctcagctgatcgacttttttggtgttaacaattacacataggccctctaaacttcgccgaagctcacatgcaaaatttgaacttcaggatatgtggatacgtctactctctctctcaaaggaagccctcaatctttttgtcatgaatagtgacaataacaatgacaatggaccaccacttgatagttgaacacaaaatccaaacattttttttctcattgagagggagagaaaaggacacaagcatatatgttttcagccttcagtgcactgtcacttgcagttcctttttttaattctgtcactcttttaaattctgtcacttgcagcccacaactctcttataaagacaaaactgatgtttatccattgttcagataagagtatctgtgtactgattattgcctttgtggagtcattttatacctgtggctgaaaagaccatacatatggcaatgaaattctgtacattctctatcatccaagaaattttcatcttccaggtaggttctagatcagattttaatctgtcaagatttttcatcaggtacatatatgaaacataactatcactagaatcaccaagtacagccatggacagagtaataaacaagtgaagagtgtatgcacctcttgtaccaaatattcagatctggacaaataacacaatggaccagtattcaagtaggataatttcgcggtagcttttcattgtcctgaaagtaaaaccataattttgctgtagcttttcatgctcctggaagtaaaaaccatcaaattctcatttacttctaacaacaaaagtttggtgaaatacaataaactaccagtaaaatttccacaactgtttttatatttacaacaccatcaaaggtggaaaaaggaggaagtaagctccagagatatctacaagatggagacgaagagatacaccgagctcagaacagcacactgttcttgcgaaaaccgttagatgtatagccttcagttctcaacttatctgatattggagaagattcaatggttcaagaagataataggtgtctcaactgaagcaagtgttcctcatttgtgatgttaagcgaaaggcgcagatttgtcagaagtgactcttgctcccatgtcagtggtcccaatgcatagaaagctctcactgttgattgatatgcttgtagctccagctcatggacatccattttgaaatcacagccatggacattgtcactctcctgcctaagcatggatggacatgaagacatggcatcatcagggaagctgttcctgactccgacagattgtgtgtcagtgttcatagagtgttctgagaaattcacactacaactagccacagaacactcgttttcttctctaacttgaagaggcatttgggatggaggacgaactatgctgtctggttttctctttgttaagttgttcttggcaagatcattgtatctttcactagaaggtctacaaaagagatctctgtggatgtcattctttgcagacactttcagaggctgtggtttcctggtttgccgatgaacttcatgtgcatctactctccttttcttgcttgctcctggaattgaatcatctggtggcatcctagtcagttctaattttttcttcacatttcttgcactagaggaaggacagagattgatcgctttgtgcctcttagtgatgtgatcattagcttcattggagtgatgatcatcttccatcaccatttttgagtgatgaaatgtttgatcaacatgttgggtctgtttttcactctgctttctgacctgaaaagggggcaatgactttttaattaccatgtcaatgaaatgcttgctgaaaaacctgagtgaaactagagaggtgaacaaaatttcagtcatttcacaaaatttgcaataattacacccaactagtaatgaaatatagtacttgagcatgccatgtcatactactgatgtcaaataaattcgtctgctgtcgtatcaatcttgtagccaaatgcttattggaaacaaatcacactagcggaagcaataacaagctttacagattttcaataaagaatctaaatcatcagttgaagttcaaatacactcaatggagtcttttgcaaattcgacaaacatactaacataatctcttcctaagaagtccaaagaatccactaataatcatatatgcactactacaaagcacaaacatggaagaacatgagctaaccacacaacgaattgaagtactgaaacgactagctactgtaataaagagtaacgcgtgggaatcagtactcactttgtctattacagctgactgcttgccatgataggcatgtggaaacctcaagcaagatatgtggaattctctcatttgcatgcaacctgttaccctgatgacgaaatagtcatccttcagcacctttgcgatcttcccaagcctccacgaattacgatccaaaacctcagttatgtcaccaagaacccatctgccttttctcataccaactggccgatgcgtcctaacatcatccttcttcactgcaggcatcccttcagcagcaaagtttagattgctatccctaaagttatgtagcgttgtaccttttagtttcatcatctctcactaagaacctgaccctgcttacaaaaggcagaccattaggaaagtaaaagtaagcacttgcactactgaaagaataacaaaacatgaatggataagaaaacaaagatgtcattttgtcaaagtatatataactgtatttctaggtaaagcatacaagtgggataaagacactgtcattgattaaatcactccaaagatctgctaaattttatttaaagaagaaatctaggagaccttacagtcaccgaataaaagaactaccctggaggtatagtgctgagtccaatcagattagtttgcaaggtaccccactaacttgtaacatcatttgttgaggccatagaacaacgacggaagcaacgcagcgctcattgaatcaggcaacacaatatagaacaaaaggtatgggtgcacagttctagcatcttgatgtgaaagtacgcaagtaaattgaccaaactccaacaaaatgcaccagattctcagttggggttgtgttaaacattcaagagttgacatgaactacaaaagtatttcattaagtatggttcgtggacaactggtacactatcagaagcaagatattgtcccttattcggagatgcgttcacaaaactacttaatgaacagagcaaatccagaatgaacaatatcagaatctggaccgacttctttttcccttccatttttagcaatcaaacggaatcggaccaacttctacagctcaaagttggaagctgaacaaagggggagcagatgactaaactgcaggactgtcacttatgcatcatttaagcttcacaagtccaggactccaggtacaatctatactataagagcttccagtttccatgctctgagcagccatggcttgtttccttagtacaaaaggaggcctaagaaaagcccctaaatcaactagacattctacctaagccgttaattaaccgtgtgaaaggattcactccctatgaccctatctactgcattttaaccaaaattacctagaccatgattcagacaaatcggctatccttctgaattctgattttgagccaagaactaggaacatcttatgatatccggaagtacattcatggaagaatccccagaaaatggtagtaacttttttcctaggaaaagtcaaacctcttctaatctttttttttctgaaactgaaaacctcttcttatctgtcagatggggtagaccaatcaaccaatctggatcagatggcacacaacttcacctaaaaagcatcccttgattccataacattgaaaagcccaatcaagatttcaaggagcaataatagtacagtacagcagctcagatcggaaccatgtactcaaagatctaatttggaccacactaaatatgcaaaaacaggagctttaacgtaagaatcaattaaaaaactagttggattgattgaatctgtgatcccaaaatttgtagcagcgaagtacaaatttcatctcagcccaatttcccttgtaaaatactaagcttcagagtggaaagaaatcagggcagattttgatccttttttgaaactaagggcagagttctagactatgaataacaaaacattaggatcttagtacacccaaaaactccttttttacctcagtttggtgaaaaaccaaatcagaaggcatcatcgagttggaatcacgaacaacagcagctcaagtcggaatcaccaacacaagaaactccaagatgggatttttaacgcgcaatctaggccaaaatgtaagagttggagtacaagaaatccaaagaaaccagcatcaaaccactcctcacctgcaacaagaagccaaccaacggataaactcgcctcgccgatccaagattctcaaaatgaaaacagttttcccctctccagattaaacaagcaactcctaaatcgggattaacccccaactcgtctgttcctccaatccaattcacgcaagaaacagaaagaaataaagaagctagcaaaaaatttcgccacctccaaacgccctaaaatagaaacccaacccaaaaattatgcgaaaaagaaaaaagaagatcagaaatttggtgcatcgaaggtgaccaacctcgagaggagatgggaggattaatccggcggccaggaagaaatcggagcgcctaattccgtgcctaaccgtaggagaaaacggtgtgctggctttgccctgtggattggctgtttctttcagttcttgctttcctgttccttgcgtttttgtcatgggaattattgtttttttctttttaaacatttccgatgtgtttgtaaagtatataaaaaattttatcactggtaattgtaatttctgaaaaagattgatctgatggtaccatggtaatgttcacgcttctgctaaattgattatatatattttttattttttttgtcttttgtttgggagacgagagcaagtgaatatagttttgtgtcactccttggtctctccccctgccttatttgattgttcatatctccttatttttattttatttttttgcataaaaaaagagaaaaaagctaagttccatgaagatataattatactttttgggtgaggaaacccgggcaaatatttatggatctattctcaaaagattatgagtaaccatttggctactcttttgtagctataaaaattgatacgaagatttgtggctgacctatcttcttgcaaggctcatatgttcatggaattctatattaagatttataataaaatagataaaaaatacatattgattgtcctaaactgctaatttcttatttgttctgtcataaaatatagcaacgtagaactggatgaaacacattctagtacagcgaatctggatatatactagtcactaatatcattattattatatatgtgtgcttagcagttatattaagaattagattaggattaggattgtgtcaatgttccataagagacttcgaatcctatacgaatctcaattttgcagttataccaatttataccctcccctccgtgggagaatgttcctctatagcaacctgtacacctgtgggtagacgtacgtttcttggcgaaagtagcgccgccgtcgttgcagccgccatcgccgcggagcagatcgatctactggcagcgttcggactgatggttgcagactcatttccattgacatcgtcgactaatgctgctgatccgtcgcatgtcacgccgccaccaagacccaccgctgctactgagcagattgatttgtttctgaatctaggaaagatggctcctactacgctgccgcacctctatccacgatgaagttcatcgcctctccgacgtataccacgtcgccgccaccgcctccgtagtcggatagacccacgatttcctagtcatcggatatcaaccatcatcagggccaagagaaccgaggtgactccagcgagcaccttcgtctcggcgagggaggccaccatggtggccgccctgggccgggacacggctatatatggaagtggacaccgtggtgtctatggcttccataggcattatcgtgacggttggagaggtgatcaccatggtgggcatggacaggaacacatcatctctcacattggtttcctcccgccgctgccgccaccacattatcctttgtcggagtttctgccgccgccgtacttcggcgcataccatgaaccaactatcggatacgcaccccacagcgaatactatggatcaatggtcagccatgcacacccaggtatgtgagataaggaacacatcctctaccttaaaagataggtgactgagtcgcttacatgtgagaccactctactataggatcacatgtcagtgactcaaagtcatgtgacctaatagcagaggatccaatttggttagatatactaaaagttaagtttggtgaattgttatttaaaaaaatatatattgatattcagttatacataccctatatgggacacaccataagtttggtgcattctttcttttatttatttatactgattttctttgttatatgtaggagaagtttggtgtatttttttttaaaaaaaattatactgactttctttgtgatatgcaggatttgcctctccagattaaacaagcaacttctagattgggattaagccccaactcatctgttcgtccaatccaattcacgcaagaaatctatacctacttaaaaaatacttaaggcttccgatcgtccgcttcgtccgtcgtcgtcgtttgagtctgagcccgtctttaaaaaaaatccccttgcagatcagccgattgctcccaacccctttgcccccaattcccaaaatacatgaatgacaaaatcactcaattgcaatcccaaatccaaaccaagaatccccacaaaatcaacatcccaaatcaaaaataaaatccaaaccctaaccctagccgtctcccggagcagccctcctcgtggtcgccatcgtcgccgtcgtcgtcaccgccttccaccgtgaattatcactggtaattgtaatttctgaaaaagattgatctgatggtatcatggtaatgctcatgcttctgctaaattgatttgtttgtttatcttttgttttgttttattttttaatttttttttgtcttttgtttgagagacaagaggaagtgaatacagtctgtgtgtcactccttggtctctctccccctgccttattcggtcgttcatatctccttatttttattttttggcagaaaaaaagagaaataagttaagttccatgaagatataattataccttttgggtgaggaaacccgggcaaatattcatggatttgttctcaaaagattatgagtaaccatttggctactttttttatagttatgaaaattgatatgaagacttgtggttgacctatcttagttcttgcaaggctcatatgttcaaggtattctatattaagatttgtaataaaatacataaaaaaatacacattacttgtgctagtctgctaatttcttacttcctccatcccaaatatagcaacgaaggactagatgtgatatattatagtacaacgaatctggatatatctgtccaaattcgaatatggatatatatatatatatatatatatatatatatatatatatatatatatgtatgtatgtccaaattcattgtattaggatgagtcacacccagtcataggttgctatattttgaaccgagagtacaaattagtactttctccatcctaaaaattttagtactaattagtactaaatatatcctaattactacttccttcatattcttataagttatatcaaatatgatattatttgatactatgttgctatatttcaggacggatagagtatttgatttattggaaaagccaaaaacaaaattataccaaatggccatagattttatccctttgcaagccaaagcgagctgagtttatccatgtcatgataactttgctgagttggagatgatgtgttctatacggtcttctacggttgcacgtgcatacacacttatttgtcgtattttaggacatacactagagcaaagcatatctttcgaatgttcgtgtgttttatcagatttagcatcaacagttatctacaagattttttttatataaaattacgtcttttacaatattaatttaaagaaaaatacttacagtgcatgcgtaagactaatcgatccaatggggtcatgcgctcatttatattgatattattttattgtacctgttttggtattagagtttacttattccaaatctagccaaatgtggggcctccgttctgataaagtaaatgtaatgcacctgggtgtttcctaacatcctgatcattggtagtataaattttacaatattattttttttttcaaaagaagattcaactccaataataaaattttagggttaatatgttagtataaatttcatgattttgaaatatatcattactattcaactatttgaaaccatgtcattataccccttcacttttttttttaattttcagtaccaaattgcagctgtcttcttattttatccccttcttccttcctagtctattttctataaatgtactgtaataaataaataaataaataatatatatatatatatatatatatatatatatatatatatatatatatatatatcttcattaatgttcattgaattaaagatttggttttgttttctcattgaatttgaagatttcgttcagatttcggatttaataagttgaagatctttctgactcatctatataaagcggatgaaacaggctagcaaaagacacacaaaacacgatacctcttcccttccccacttctaacatggagaacgtttttactcaatctgcactactctgtgtgttgtttcttagtagttcaatagttggaggttgctctcctacaatggaagaagaggtacttctcttgagctatatatattgttataattcaaattcgattttattcaactgaaacatagaagtaatagctagtctatattgatttgttccccttttcccaaacaattaaccaggtccaaaagaattggcgaacattgatggcccctctacttcatgtgaatttctcttcatcggatcatatatcaactcaagctgacccagtatattatgtgagtgtcatatactccttccgtccaaatataaaacatagttagaaatttgttccaaaataatgcaactcatatcttcttacctatcatcgatgaataaatcgataaatttctttcaatatcccatcaccgtacctactaatataactttcctattaatttggggcattttggttctttgtctcctttcttaactccaccataggaagctaaaatttgagtttttttggggagtatgttttttttccctagatctaaaagatgcacttgtactcatgatcatgattttcatgaccaaatacgtactttggcagtttgcagcatatggatcgattccttcagacgacgctatcaagtattacggattagaggccaccatggacatttatggctttaatctagagcatggacaacaaaccggaggtttcatttggatttacaatacggatgaagcatctgccgtgaataaagttatagctggatggaatgtaagttaaacttatctgcttgatttggaattgtaatttcaagcctacattagcttagctggttgatgctcaacaggttcatgagcttctcactgtcaatcgaagatgtgtcactaaacaagttactttgattaatcatttgctccatgtcttttagttttaacatttagttgtattgtacctcatacaggttgagcctgaatcgtacaatgattcacagacgcacttcagtacttggtttgtaagtttcttcataaacactgcagtttcctatccatcaatttttatttttattttttttgccataataaagattttgtatttattatgtcataactcattctccaattaatgccagattgaaggttctaatgtttgtcctgatatgcgttgtcctggattcgaaagtgtatttagctcagaaatcgttcctggaatggtgattagccctgtttccaccacctctggcaagaaacaatacattacagtcagagtatccaaggtttaattattgtctaattaataacagaacaatcttacattccttttttttatcccttcatatataaaatggaaatagtataatgaatctggacatacccatgtctagcacaacgaatctagatatacctatgtccggattcgttatactaggatatgtcacattccatgctggttgagatattttagcacggagggagtatgcgtcatgacactatattttgatgatttcaggatcaaaattccggtgattggcaaatctactatggctttaatggggatgccaagcttgcaggttactatccaagatctctgtttacaagcttgtcagataaaccagtgacaatattgtttggtggctatgccttgagaaaggatcaaaagccaagtcctccaatgggcagcgggaatgccccgtttaaaaacgccgcatcatttcgtagtatcaagttttttgatgccggtggcaacgcccatccaatcgattttcgtctcggatttatatcaaattgttacactatttctgttattgaaaatgatgggttcttttatgggggacctggcaatatttgctagtagtttgtaatcgagcttcaacttagtgtaatgaatatcctggggactgcacccacagagaaattgagcttcaatagagttcatcacaactgttgtgccactcttagttgataagtatttagcctcatcgtttgacgtattggaggaaaaaacgaaatggcatatttgcaaatgaaaaataatttgtgaataaaacttttatatacatgttcttaacgatctaagagtaaagactgaaaaataaactatggaatgaaaaaaaaaactcaaaatcagctccaaattccaaatttaagattaaaaaattaaattttggctgataagcataagtggaaagatcaagatacaagattctaatatactccctccatttcgaaaatataagcagataaggagaggaaagggaaaaagaaaaagaagccgaagaggaattacatatgcgtcatggttccttgcttttagtttcactttcacttttacccagggtatttacatactcactccgatttgataattcatgtcatatagacagcgacacattctccaaaacctatctttgaatataattttctattataatataaaaaccttaataagtactccctctattttatattataagttgtttaacttttttcttagtcaaacttcttagagtttgaccaagtttgtagaaaaatatactaatatttttaatataaaacaaatatattattaaaatatattcaatgttcaatttaatgaaactaatttggtgttatagatgttgctaatttttttataaatgtggtcaaacctaaagaactttaactaagaaaaattaaacgacttataatataaaacggagggagtatctaatttaatttgattttttaagtctcatctacacatgttgtcccagtgccttaaaattaatatttcaaaagttgctaattgtcaaagttataaaagtttgacatcacccttataaaagaatgataggaattataaaaacaaaaggagtatgtgacattatctttcggatactttcatcgtaagtgatccctcggagtggatactttcatcagaagtgatctctcaaaaagagagaagaggaggtgtacacttggcatggttgcataaggtaaaattcatatcttgccttttgcttggtcgagctagctagcccatgtcaagccagctcgtatcacaccgtagaaaattaaaccctactgtcacatagattatgagaaaatatatatagagagctatagaaatatagaatctagaaaataaataaaaaccatatttttttttatagattctcacaagctatttctcataatccatagtttcctaaacaataccaaaacatctaggtacttcaacgcgcaatatatatgcaaaggaaactactccttcgtgatgattaaaaaaaaatagggtcatcgaggccaatgtcatgggctcacggcgacattaggatggagtgccgccgcaaccttcttccggccctacgcaaggaggcaggtgccactgtcgccgtcgtccgccttaacctcgagaagcaatttcctccttctgcctctaccccgggaggctgccgtcatcatcgacttggatgccgggaggccaccatcaccatccacctcaacttcgtgaggccgtagccgtcgtctgcccccaggaggcacccaccactgcccccatctactaactccaaagagaacaccgccgtcggctgcttctagcatttcaggtgcctactactcctatgtatctttttagttcatatattggttacttaaggacagtggcggatccaagaagatataattagataaagctatagcttcccttcaaatgcatatatgataaaaaaaatttagtcgaggcttcgtagggctcccatggtcctattgcaagtactctatctggaatggtcggagccattgtattttttttgaacctggaacggtagcatgcatgacatgtgacttgtataagaacactagctatcaggtgctaatgaaatattttactctaaactttatgtcattcctatgcttgtgaatagcgacagacaatcaggtatgagatatgtgccattcacttggaaaaaaaatatatatgacattttacattcaaacatcaaacattatattgatcaaacaattaatatactagctgagctcgtttggccccttttcgaattactataatgtaaccatacattgctgatgagcatacctgtttttcatcgtaccgccaacaattacctgaattttgttcgatcggatagtaccagtaaattacttttactccatccatcaaatcagaaagatgacaaggaatctcatataggaagcgtacatgaacatatataagaccatgatcccaaataaaaataagccagggaaagaaatatttttatttgggatatttttacttatctttaaataaaaataagttggacatataaaaggttcaacgaaagaaatattgatttaaagataggtaaacatattcaatgtgcaacttatgtagaatctgaacattccaactaaatctagaagtacgacacagtcaaacgaacgaaagcttcacacaatacttagggtgtggtgtgtttgagagcagtggaaaggagaagattgagaagacaagtaaaacgagataagtcattagcatatgattagttgaatgttaattattttaaaccaaaaaatagattaatatgattttctaaagtaactttgctatagaatgttttttcaaataacacactattaaagttcaggaaatgtgcgcatgaaaaactacacaattttcttctttgttttggctaaagcagccatgcgtcaagcacggcgtggatgtggatcacaggatcgtgggaataattaactatttaccactcttacaaatggtcatagaggatttgtcactatacccacatatcatagatacatgaggacccatatgttatagacaacaagtggcaaatccttaattaccatatttagaagtagcaaatagttaaatggcccattctcttttttttttcatctccttcgatacatggaatgtgcttgctattgagagaatctgtttaatgagaagacgaaccacatcgccactgagccgtaccagagtatggacgctgtttgcgaggcacatccacacatcggcgctaatctccacagcgtccatcctagtttcgtgaatctaatctatgatttacaatttatttaactaaacaattattaattaccgtatataaaaaaatcaggagaatatcacagttccaaaatggagcttaaacattggcatccttaatatccatgcttccttctgaatcattctctaaattcgtaaatgccaccaaacaagatatagggcctttcggctagcactacaagatgccagcacggttcgagcctcacttctgggtctgttcggtggcactggctgcagcagctgcgcagcagcatcagctacagtggctgcagcagccagccaacagctgttgtaccctgtagggcttgtaggggagtagttttttctgtaggggctacagcagtttctacagtcgaacagctgggctgtgcagcacagcccaaacagctgtgaaaatgggctaccgaacaagccctctctcactacgagagatcagaaggagcgtgtttaacgttcaaaaacacacaagatctttcccatgtgtgataatgtcttaacaaattctgatcgagagcccctcctcacatatcaagtgttttttttgcacactctatcagcacttaagtattagtttcctatgatcacctacttgtatttcatacttttaaatagactagaaaaaatgtctatgcgttgcaacgggtaaagactattttaatcttattattgttatatgttttagttaagataaaatctcctgtgggaacttatttggttatatatattttttaagaaaatcgtgagctgcaattaggagtccgatcgtctcaacttagcatgcaagttttttaaagagaattattgtacgattccttttatatttactaaagcaaacgaacttaaaacctacatatttctaaaagcgaacaaacttaaaaaccgactcatgcccggatgagtaccaaaataccagcaaaaacatcttcaatttttataataacagagattagacctatgcattagtttccagatcacctatatgcatttcacatctttaaatatatcagacggccaactaaagagactagctttctcaaatgcacggttctttatgaagatatacaaggaaaccctacatgtaatgtgatttgaggctagctttctccaatgaacggttctttatgaaggtatacaaggacttaaccctatatgtaatgtgatttgatttcaaattatttttgtttaatagatattcatcaacaaataggaagaacatcatacttcatgggcataccagtgattgacttactgaaatcactatcatgtcataaactcatccagatggcacacacactgaaaatgtgacccaaacttctccaagggttgaatattaccatcagcattaatattatagtgatataaattgttttccgcggtccgatttgtaccatgatgaaagacataccacacaaatttaataaatgattctaaaatacgatgatagctaacacacattagttgtgtttcaatctggccccgtcgtgctaatttttttgtcgtgtttcaatctggccctgtcgtgctaactttttttgtcgtagcttctcctcttcctcctctaataataatttactaaacttttaaaaccgtaacgtatttaacatactaggacttaattaaagtaagtagagagataaagtaagaaactaacaaagtataagtagagggatcaaagtaggacattgagaaacaagttagaactcgagtatttgtagacttaactacttgaggttaaaatataatgttttcattttgttatcagcttgttatactgtatatattaatctaacattgattgtgcagtgcacaaataaaatctccctcaactgttaaatgggggctaatttatcttccttgatggttgtttagattaaattttcgatacattgatttggttatcattttatatggtggccacatagcgtttacatattattaccgtaagttaaaagatatccatgtagttattttaattaatctaaaagtagaccataccgctttcaaaagtgtttcttctcattaaaaaacttaaaaaaaacaaaagaatcaacagtgcattaatcctcttcccccttaaaaaaattattcatgcctcttaaaaactatgtcctaaaatatatctctaaaaaatataaaaacctaatacatcataaaaaatcattttagaaataaactaaatcatatttttatatctagatcccattgtaatgcatagccatttaactattaaattgtgaaccgcaacacacttgaatagtatacatagtgcactatgatcattggattcataacaattgttaatctctaatttatccataaaaaatatcattttatatcgttcaacattattaatctttatagcattctaaattatgtttagcaaaaatatgtttccagttgttaaaaaactagtcaaataccttatataaataaaatatcattaacaaagataatattgattatttattgatgtagaaacatagataatatatattacagagcgcacacacacatgagcagctgctagaaactcccccaaacagaccctttcgtatgagccctcaccggcggatcctgatccccttcatgcttccttaatggccccacctcctatacttccccctccccttctttggctcgcctccatctgcaacatcgggctcctccgcctcggtctctgcctagcggcgcagggggctcgccctcaaccagtcgctcgaccacaccgctgtggcaagcctggaagcagcagagggaggcgggtcttcgttgataacatggtaaggaggaggtggaggtggatgtggatggaaggagtaggggggaggaagcttgacatgcaaaccctacattttttttacttgcaattggcatgttaactctacaacttttcttttattttttagagaattgctacgtaagccccatgtgtggaccaattactcacgataaaggcatgcaagcaccatataggacaaagcaccatcaaaactattgaaggaaacaaaatgaaccggttttattacttgaggaagtcacactatctataattggggatgcaaacttcggccaatagttttgggaggtaaaatatatttctttcattgatttttttcagccaattcggttaaaggcacccttattttatttattttctttttgttgtttttgcaaatctccttgtttttattttaattatggaaacatatatattacacctcaactatcttgtttatctataactagggatgaaaacggatcggatacggacggaaactagctttatcatattcgttttcatattttttttcggaatcggaatcggaatcgaaaactcggatacggaaatgaaatcgaatattatcgaatacagatacagagcgaatacgagacggaacgaatacggtagcggatatttaccggtatataaaaaacccctcaaattgagtttcttgatcaaggaagagatatcgcttattattttagttcaacatctccaacatttgtatcgtcaattttatagacggtcccacaaccctatgtgagaatcgattttcatggctattcctcttagagatccatatgcaaatatgattatcattttctattcccaagaccttttactagatgtataacttacttaccattgtataaattggagatgttatttattttactttacatcttcaaaacttgtaatgtttgttttatactttaaatgctttcaaatacaaatgttataaactacaaagtggtagatcccgttgagctctataactttgatatggaacacatctccatcagatgtcgtttgaattgtagatatgagattttataaaaattaatatggtatattataatgaatatttagactcattaaatgacctcaaataataaaatagtcaataagaaaattgtaggtctcatcaagctctacaatgttgatataaagtttgtctccatctgattccgtatgaaaaagttatgtatatatacatgttttttctaaactttgctcaatgtctgcggatatccgaaaaaaaatccggatagtttccgaccgttttccgattccgacggatagtacccttactgtattcgttttcgtttccgagaaaaaaaaatccgaattcgtttccgaatccgagaatttccggatagttccgaccgaaactatccgaatccgaaaaatggtccggacggatggaaactatccgaaccactttcacccctatctataacaactttcaactcccatactatatattatttaacttgctatcactactttaaaaataatttttcatggcggccaaaataggttttcataagtagccagtggaaccgccagagaccaaaggccaatgataatacaatattttcattggtgttcgccaaccgccaacgccgatccattttcattggtggttttcgtaaggtagccacctacgaaaataaatttgcacaggcggctatattatatcgtccgcctgcgataatctagccagcactaaaaaaatgacggagcgacgtcgctccgtctgcctccattagcgccaagaatcccaaaatccgcagaaattattcccaaatcctcattccctaatttc

SEQ ID NO: 7486 - DNA, 33601 bp, Oryza sativa
aatccacaaatcatcacaatttatagtcatgaatttccattcacatgttttcaactgtatcaattcccatctccaaataaactaaccagataggatcgtcaattcatcatcgctcccggtcatcgtcgctgtcgctgagagacgaataccaaacactagttgagcaccgccaccgcacaacggatctgggagaggggagggggttggaggagccgcctggaaccttctcgaggaccagccgtcatcatcgttgccgtggcaaccatcgtcatcgtcgtggcagccgtcgtcggatccaccttccggccacgggtccgccgccaacgcccctccctgccgccggatccacctcctccaccgcaaccacccctctcctttgcctcctgcaggccgaatctgtcatcctccccgccgcccgcagcccaaccctccccgcaccgccgcagctccccttgccgccgccaccacccacgattgagggagagttgggaggggaagggagaggagaggtggtcggtgtatctcggaggtagggagaggtgggagagatgcggcggagaggaaatggacgacttggacgtagtctccacgtgatttatgcctcccacaatttttttatggtgatcgctcatagaccccgccagtaaaatcgatttttactagcggggtgctcataagacatttttattagcggggctaggtttttagtatctcctgtgatttttacaagtgaggttttttagatccattagtaaaaataaaacccttgtatcacgaaaataaatcgttttttaagtagtgtatgtatagctagctaattaaggagtcactttcctcgcttcttgctagctggggaccggtctgccattttctctggtcagtttttagatttttatttggcatttttaggagttttgcgtgaggtagattagggtttatcgtttaatattcttatggaggtagatttgtttagaatcttttgtctctcttacctatttgtcgattgccactacatttacgaggtcctcaatgaagatccatccatgaaagtttgtttgttggttgccgatgatccaattgacagaacagggtttaaggcctagaccatcaatttgtttggtgatgctgtcttataggtttgtcaaatgatcgaatatgggggtagatacttgttcaaatactcttccattcttctttatatatatcacgtcagttagttcatatatttagggatggaggtaatatcttttacgcatacccgaagtctcggtgaattgatgcgttatgtctgaacacgtctagctactcatgacttttacttgacttttactaggatgttactagggccctatttagatcccaccccaaaattttacgccctgtcacatcgaacgtttaaacacttgtataaagtattaaatataggcttaaaaaagttgcacatattacgactaatttgcgagacgaatcttttgagcctaattgcttcataatttgacaatgtggtgctacagcaaacatttgctaatgacggattaattaggcttaataaattcatctcgtggtttactgacggattctgtaattagttttttttactagtgcccgaacaccccatacaacaccctatataatatctgatgtgacacgccaaaactttacatcgctggatctaaaaccccctagatacggatcatctttgtgctggcaagtactttttttttcttataacaaagggcttgtttagttggtgaaatgaaaatttttggatgttacatcggacgtttgaccagatatcggaatggggttttggtcaagaatgaaaaaactaatttcataactcgtctagaaaccgcatgacgaattttttgagcctaattaaaccgtcattagcacatgtgggttactgagattcgtctcgcgatttacatgcaaagtgtgtaattagtttttctttttatctatatttaatgctctatacatgtgtccaaatatttgatgtgatgtttttgcgaaaagtttttgggggaactaaacagggtggagtttattttttttcactacatttggtggagttttttttttccgttataacaaatttgttcaaactagtgcggttttcaactatttggcacattttatttgacgctgatgggagtcgagagtcagcaaacaaaatgaaattaaaaaaaaaatccgtgtcctatctcatactcctacctttcttctagacttgatcaccgcatgctagccaactcaactacatacaagtcgactaccaagtcacccggtatttgaaacgtattccaagtagttgtgtatagtacgcatcgtgaaccttttagataaacccctaatgaaattggagtgccaagtgccaactttctgaccatcacgaggtgtacttaataaccataaaatttctccagttcttttcttgcaaaaataatcacctcctttttcatattttacttggcgcgcgcggggtatcatattctctggttaaataggactccctccgtttctaaatatttgacaccgttgactttttagcacttatttgaccattcgtcttattcaaaaacttttgcgaaatatgcaaaactatgtgtatacatataagtatatttaaccataaattaaatgataggaaaataattaataattacttaaatttttttaaataagacgaccggtcaaacatattttaaaaagccaacagcgttaaatatttagaaatggagggagtagaaaatttcgcgcgcgagtatttaaccctgaacgtctggcgccgcgccgccagccaccgttgacgacacaccgacgccggcctttgctctgcagccaatcttcgcaccttcttggtctcttcgtcgtcatcgccgccggaggaaggcgagcagcagcgtcgtcgccccgacgaggccaacgtacagggtcgcggtttcttggcttttcttttttaaaacttacttttgaataacggggtttcgatcttggtttgattttgagcgctgatttggggctctacaactagacccatagatcttcacaggccgacccaatttttggctgtgattacctgtctgcatagttgtgtgaggaggggtccggtttccgaccacatgcgagactgcaaagatccattttcgcggacgaacaacttaaaagggtcgtctgcgataatgtttttaattttgtaggcgaaccttaagccgtccacttgtaaaaaaactaatttttataggtgaaccgctaggagtgccacctgccaaaatcgccgatggaacaactccctaaaaaaatctatgtcgtccccgtgtaattcttatcccaatataataactctatcgactaccccaaccttagatatcctctccctctcaaagtgcgcagcggcggctcagtgctgagaggaggagcagcggcagtgaggtaggggtgccagcggcaggagctcggctcctccctcccctcttcttctcctccccgcttctcccctccaatcctggcaacagcggtggctcggtgatgagaggaggagcggcggcagcgatgacgatggcgaacgccactcttcccccactcccagcaacggtggccggtgggtgctactttcttggcctctctcctgtctctacctctccctttctctctcgatctctccagtctctactctgccactgaagcgcagcagccagcggggcgtgggagtagagcagctggctgggcacgggatccgccgtcgccgcgaaggagttgggggtggcgcggtggagggcaaccacgatgacggacgaccaaatccagcaaagacaggaggtggtggatccggccgtggcggatccagtggtggctgtggcatccgtgatgacgatgatgaccttgacggcgatggcatccatgaccacaacctgcttgctgcgacgatggctggcggcggtgggcgaccttggcccgggtggatccagcaggctttggacggttgtgatcaagttgtggcggatctggctagggtttcgattttaggaatttttattttttttaacaaatttttcttttcacagtcaccctaattttcgcatgtggttgctacctgcatgtaaaaatttgattttcgcagacatctgagtgtaggcagtgctactacaaaacacctgataggttacggctcataggtgccggtttagaaatatggtacctatttacagtttcccacctctatcagacaaaaatccaagataaaaaccgacatatagtatatgtgttggtttttttatactataattgccagttctagataaaaaataatacctatactataattgccagttctcgcttgcgggacgagagattgttttagccaccttcccactcctgccattatccattcgcccgttctctctctcgcctacgccttcctctctttttcttctctcacctgtgccgtttcctctcctttagctctctgtcttcttttcgtctctccccagcttttcctctccaccggagcctctccctggcggctcgccttgccacggccgacgcccagtagctagcggccagcggattcatcggcgacggcaagggcggtggtacggatgccagatccggcaggcttgagcttgagggcctctggatctgccccccccctccccgtgcggcgccctctagtagatccgtggtggcgatggcggtgggctgtagcattccctcaacgtcgtcaagtgcacgggcgacgatttttgctgatttgtggatgtttttgtcgttgattttgtgtatgttcacgattttgtgatgacaatcgatcagtgtggcgatctaattttgatttggggatttggggcaacgggtagcaactcgatgcatcgacttgaatcgagccgatttttttttttttgcctagcgagcgcctcgaaggtgctggttgcgaaaccaacaccaatggctcggagtcatctgtgccgcgtctgttgtgtcggtgcccccatgtgtttttccaaccggcaccgatgacactttctgtagtagggcaggttatccacccgcctgcgaaaatcgattttgaccgcatggaaaaaatcgattccatagtagtgaactatactattagatatggtgcatctttgtgctggcaaggttgtttttcttatagcaaagctgtaatcttttccgatcctaagtataataattcactcttttatgtatttggcacctttcatccatttgacgctgatgggagtcaaagacagcaaacgaaataaataaaagctgagccctaccctaccttctcttcttcctctcggttccggcttcataatcatactcctcttcctctctctagccggctgcgtggcggtgggtaattcctattgagtattcgtgggtgggtttagtctctcttgtatgctatagcctacttctctattttaaaaaagggataattacattcttgcacctactttaaaaagcaattgtgttgaatctatcatgaaaagacatatatgcccatgcaaatttatcttacttatctgaaaactttgtggttttggccatgttttggtatcaagctttttggtagcattttgacaacaagggtttatatgatttgcatgaattctgaaatgcgaactttgagtattggcttccaatgagccaataaatctcccaatcacaattggtgatgcatttttttccaaatttcactagtactcctaattaaaaagaatatatcagatatactaaggctgtgttcgggaggaggggttgggaacccctcctctccggcacgcaaaacgaagctagtattattgcatgattaattaagtattaactaattttttttgaaatacggattaatatgattttttttaaaaacaactttcatatagaaagtttttgcataaattacaccgtttagtagtttgaaaagtgcgtgcgcagaaaacgagagagggggttgggaaaatgggggaaagaacacaacctaagcaatggttggtaactgtctaacaacaccagtactccctctgtcctataaaaaacgtttatgtccagattcattttattggaaaacgtcacatcatgtcctaggttagcactcaaagtttatcccgttcccatttttaacacttctatcaattctcatatcattttccgtccgctttgattgctattgactcaaacacgcacacgatataacatttctacccctcattgccatgcattctacgagtactttttaaggttgattccataaaaattgttttctttttgggaggaagtactaaagtacggaaccatgatcgagtaccaactaccaagtcactgagtatttgaaaggtattccaagttgtatcgtcaggaatctcttgaacaaacccctattgaaatccgaggcctaacaactctctcacgatcacgaggccaggcccataaaatctgcacggttcaattcgtttccttaaaaaaatcacctcctttttcgtattttcttctgactcaagtcaacagtagaaaactcttggcgcgcgaatatactacataattaacctcagacgtccgcctcgcaacgacaccttttcgccctgcagatgagatcgctcttcgtgtctcggtcctcgatcgcccaatcgaatccgctgcaacttcaagcagccactgcccactgatccactcgagcggatcatatcgtccggagctctagctagcctcattattgccgccgtcgaagtggctgaggcaaagagccaccgccgccggctgccggagcggctcgccggagaggaggaaggcgatcgagcgaggagagactgcagcagcagcgtcgacgactaaacgaggccaacacggacagggtgggtttcgtttcttggccttttatttttcttttattttttttggttttcaagatataatggggtttttcttggcttgatttgaggtggtcgccgttcttgagctgatttgtcaggatttttgactggtttgggaattgggatgtagggattcgagattttgtggttttcttaggagggtagtgcggctctgcccccttcctttggggtcttcttgggagggtagtgtagctctgcccctttcccgctgactggagttgcgtttggccgttgaagtagtctctttgtttttctgctttctttttgtttgtgtttttttcttccttcccatggcataagccggtttggctaattgcttgtataaacaaactcttatttcttttaatatattgacgtgcaattcttttgcgcgttcgtgaaaaaaaaagattttgtggttttgtggacaaagtttggatctttgtttctttcgtaatatttgttgctgcctcagattacccctttgttgataattggatttcatttaacttgttgtttctccatcctaaaatatagtaaaacacaaccatcactaacacgatagaccaataaaatttattgtgacccccttcccccctcctccccaacccaaaatcaccctaacaaatataatgcatgcatcaatgggttagaaatcacgagtgtaagagacacggtatctaggtacccaatgttatgcctttgggccatgttacacaagatgggccaggtggcctaaagcccatgcagtgtggtggatcaaaggtaaggtgtaaatcttattccatgtaaataggatttttagaaaacaaatttagaaaagggagaggtggttgttaattgcatatatgcatctgcgccttgtattttgaaacatgaaacaaagtagtgttctgtattttgtaattgaagatttccaaagatcatttcagcagtagtaatgcatgattttcaaaacttcttttcttcccggactgccatgtcaacaccgtcaaaaccacgtttacagatgcgacgttcgggtatttataacaatttttaataatagcacactaatagagttactcgctctgtccacaaataagtggtcctaatacaagatgtaacatattccagtaatacaaatttagacagactgtctagatttgtagtactaagatatgtcacatcatataataggtgtatttattttggaacggagaaatcaccaactaccagtagtaaaatttgctgacatacgagagggataggtgaggagagagaaatatcaatgttaagcttaatatcatcttttagcccatgataaaagtaagttttatagcatgaaggtgggaaaaaggaaggatggataatataagaaaaatatttaagcgactattgtctcaaccattataaggtacacccttcgtttcatatttgttttgactttttcttagtcaaactttttttaagtttgattaagtttgtaagaaaatatagtaacatcttcaacacaaaataaatatatttaatgttaaatgtagcaaaactaatttggtattgtggatgttactaaattttttacacacttagttaaacctaaataaatttgactaaaaaaagccaaacgatttatggatgatgtgtattgtctcaaagcctcgtggaggctcaaagtattgtgcatgcctttatcaaggcgatatatatttagaaatttttttcgtcaaattttgtttaaattccactgggttcgtctatgactgctcgattatatattacagttatctagaaaaccgtcagggccggagaggttttcgataacaaattacattcttaaaccataaacaaattcaccttaattcgtttgaacctaaggataaattggaacggttttagaaatggaagggtggataatgtccagtagaacagttgagggattctttttctacaagcgtgcggatagtttaggcataatatggatctgttcatttaattttctaattggactatgtttggcagcggcacaaggaaaaaaactcactcgttttcttcaatatgtatttttgcaaaatcttcggtgacatgaggaagggggagaataggggaaagagagaggaggctgacgtggccacgctgacatatggggttcacgtgggtcccacgctgacttagccaccacgtaggataaaatcggggtcaaaaccactgaataggggtgaaaacggtacggaaactttccggattgcatacttattttcgaaaacggaatctgtcggtcggaattttttcggaatttttcggaaacggaaacaaattcggaaatattttctcggaaacagaatcggaaatgataagggcggtttccgtcggaactcggaatcggtcggaaactttccgaaaattttctcgaaattttcaaatattttctcggaattaccagaaattttgtgactaaaataccctggattctttttttaagcactaaatagtgaataccatggtgtttggctggtattttttaaaaaaatatttgttatgcaaatctaaaattacataagaatattttttcctacattgggattattcaacaacattactcttttaaacatagataatttattcaattggatttatcagtttgaggggttttttattccgataaattttcgttaccgtattcgcgccggtttgttttcgctccgttttcggtttcgataatattcgattctgttttcgtatccggggtttccgattccgattcccaaaaaaatatgaaaacgaaaacgataaagatggtttccgtccgttttcgtaccgttttcacccctaccactgaaggacctattgtgaccggttttgattagttaagggacgtcagatatctggttttgtgattgggggacgattttgtaacttgatgacaagttgagggaccttcggtgtactttttccctaataggttgacaaatttctttcccctttgttcctgtcccaaatatagatggccaaaaggctagggacccgatggctcggcccaggaacggcatgacccgactggtgtggggcccgtgctagaccaacccgactgttgggccgtgcctgggcctctgcctcagcatggtccaatgatcaggtaggaaaaatagacttatttgagccatataaggcatgaccaaagagatgagcgatgcaaaatagacttattccatccatataaaacacagctcaaagagataaggaaggcaaaatagacttactccaaggaggagcacgggggatttcgtgcctccggaccggccagcacagcctgggtcttattgggccatgcctaagccattggtgtagttcgtgggcaggcccgacccggcccagtgtgtaggtcgggccgtgctggcccgactgatcttgggctcaggcctggtcgtgcccgggccagaccgggcggcccatttgaccatctatagacccaaactatatgagattcttatataccttttgtttttagatcgaagcaatggtttctatgggtttcttcctacagttaggattcgtaattcttctagaaatataatatggagtaattataattaccatggtaaaaattgtcacaaactatggggcattgattatgttcccttttttttttttacttttgtgttacctggaagatgtccatgcgtaaacacacaccactatatacgcaggcacatgctacaagagatagaatgttttgtaacagttgattcttttgttgttacaagttttttgtgccaaattaagtttcatagccatggacctcacacgtcatgctcttattcccctgggggctaaggcaagatggagtaaacaaattcttggccacatcttagcgaacattagcaaggtggtgtcacaatgtaaattcttattgaaattgcatatgtgtagtgcagccagtgcttctccgactgttttctttcttgaacatgcataaagctaaaacaactttatctcacaaaaaaagtgctaatctatataactaattgtatacaacaggtggcttggtgtcaataatatttatgcgatgaagaatttggtggaactatattatgagagggaaatccagctgtttgtcctcgtcagcttcgcactccaagtgttcctctttttcactggcagccttcggcggcgcagcaccaacatattcctcagtgtttctatttggacagcttatttaggagcagattgggtagcagtttatgctcttggcaacctctcaggagtacaggagagcatcatatcaaggagaagtcagctgccactgtcttttttttgggcaccgtttttcctcatccatctcggtggtcaggacacaatcactgcttttgccatggaggacaatgacttgtggctgaggcatttcttgaatttggtcgtgcaagtagtcctcgccgtgtacgttttctggaagtcagctagaaggcagagtgcggagcttatagtttcgggtgtgttcgtgttcatcgttggagttatcaagtatggagaaaggacatggtcactcaagtgtgggagctcaaaaagccttgagagctcacctgggcatcactacaagcaacggtttccggaactaagagactctgattgcgactatcgaaatatggtttccaatgctctatgttcaatgttcaatgtcctcaatgtctttgcagcgcgcaacttgttcggttatagcttcccaagtgttggtccagatgatactcaagtcgacgccaaaaaaatgttcaagttggtggagcttgagctcgccatgatgtacgatgacctctacacaaaggctcttgtgctgagaacaaggacaggcattatactccgatgcatctctcacgcatgctccttcgttgcttttgcactcttccttgcgagtgataaagatcggtacattggagttgatattgcaattacgtattcactgtttatcggaggctttttcctagatttttgtgcgatgtttattgtcataacatctccatggacttgggtctggttgaaggctgcacagaagagagactggctagccaacttgtcctggttcctcttttccagtgatattgggtggcccgagagaaggccactgtggtctagttccattggacagtacagcttactcagctgggactctggatcagaccaaccaacaagatcatgcaaccagaaagtgatggctctggtgagaagatcggcgaggttagtcggcgttggaaagaaaaaattgttttggatgagcaagctgctggacactaagttcctagaggtagatgagaagacgatggagtttgtggtggaggggatcaatcgcatccgcgacgaattctccgatgtcgcgtcccgggcatggccaaagcttggcccattcctcgaaaccataagagttcatttcaccgcggactttggtgctgccattgtcgtgattcactcattcacagaggagtacctgatgaatgctgctgctgcagcagaagaagaagaagaagaagcaggtcagggaggagaagcaaatgatatgatggaggtgtgccggaagctgtccaactacatgatgtacctcttggtgaaccacccttccatgctgccgctcaacgtcagctccgaggctacgctggctgaggctgcgcagctgatgaaggtggtgagagggcgagcactggaggagatggtggatccatgcgacgaaacgttgagggagatggtggacatgtggacgaggctcctcatctacaccgccggcaagtcccgggggccgatgcacgcggcggagctggcctgtggaggggagctcatcaccttcgtctggctgctcatggtcaaggccggcctcggggattccgaggcgaaaaggatcctcattgcaaattctgcttgcgccgacactaatacgaaggaagcctatgccttttatttcgcttcgtgacgtgtatctatgtaataaccatgagccgccggtcagaccgaccaaacacctacggtgtcagaccggctccgtgaaggaataacagttatttccaaattttagtaatgtttttctattttgaatatgatatatgtgttgaatttggatgttaacaccgtcattcctgtattcaaatctttggattcacaaatgtacattattcctgatttaattgaggcatgtagcttggcagtgaatgcccatgatgggcttgcaaaggcatctgccatttgtccagagatatagcacgatctaataactgactccctggacaagcttcccttgagatgtgcttctatgctctcccactaaaaaaaaagcatggatttcaaagaagacgagaggctaagattagaaggtgcttaaccgtctgaaaatcaattagaaagggtactttcgtccatggagagaattaatctcgcatctgatgttggctccttcggcgccggaggccaatacgctactacagctactcgatcattgcccagatcatgaatgcagaacagaagataactggaagaaaaattaacaacgaataggatcatcgatggtatagcttgatggagcattcaacctgatatatccatctcacagttcctactcttcgtctgaatgcggttgcacacttgcactggatggccatgaaagaaaaaggttctctaggacagccaattgacgcaaccccctaaaaagacgctccacgtcgcccacgcgcaggcagctcgtggcgaaccctagctgccagccgccccctcccctcctcatctcttcgtctcgccaccgcattggagtgcgccgctgggagaatcgggcggcaagcgaggatgacagtggcggggctaaacctcggtgacattccgcctccggcgtgggggaggaggcgcggagcttggaagctagaggacgacgacggcttatctggcgtgaggcagcggattcggcaccgccccaaccggatccggtccccacatagccagattcaacgtccctacttggatctggccggggagcaaccgaagtgggtggtggcgtgcggggacaatctgcggcgagaggttgtggacgacgtggtgaggctggaggccatggacagcacggcgggaggcagtggtcggtgcggcgaaaccggtggtgtcaacaacaacaggacgatgtgggcggtgccgatggtaacaagaggctggcacggtggcaccagcggctgcagggaagcagtgaaggagcgacagagctggcggctgcgcggggatggagccaacggcagtgggaagctggcacgagtggccagtagtggaggtgtcggcgacgctgggacaagagcggccagcaagcacgacatggaggctcgcacctgatgagtgcggcgtagaggcgacggggctagtaggagcggtgtggtggagaggccgcctgggcagcaaagacggcagcgatgtgaccaggtagctcgttgtggacgacacaggcaaccgggccaaggcagcgatgatgttagtgccatgaggtcggcgttgatgactgcagttagttcctctccaagcgtttgcccccttgcagatggccacgttgggtgggctagtgcgggggagaggggatccatccttctctctcaccctctctctctccaacctgtccacgtggatggatctggagtgcgtcggaggctgagatcctgctttgatggctagccgacagcgaggtgttggtgcagtggctgcgtgttgaagggatttggctggtggtggctgctgaacctaataggcactcaatgacgcgggagtgttgtccaatcccatcttttttttcatctctttttttttgggtttgtgtggaggttaccccttgtattgcatgaggggtggctcaccttctcttttctcacttatttcttctacctcatcattcaattctatatatgtgacattttcaggtgcaacacatcaagtattatagtacttgccctaacacgtaggtgctttgctaccatcctcactcctcatatgcctccctagggtgtgtttggtagtacaggtttccaaccgggaacaatacgcgcgaaaaatggagcagtccattagcgcgtggttaattaagtattagctaattttttttccaaaaatggattaatttattttataaacaactttcgtgtagaaactttttttaagaaaacaccgtttagtagtttgaaaagcgtgcgcgtggaaaacgagagagatgagttgggaaaaggaggtgccgaacacacccctagggggtccctccctgtgtgagcagccatcgacgcgacaaatgcctccatccattgtgtgaacaggccacgtgatgccacctcttcttcccagctctcaaagctataggggttctatctcacatgacctctcctctccatatcatggccttagggtgtgttcagttcgtgaaaagaaaattttttggtgtcacatcggatgtttgaccgggtgtcagaaggggtttttggatacgaatggaaaaactaatttcataactcggctagaaaccgcgagacgaaacttttgagcctaattaagccatcattagcatatgtgggttactataacatttatggctaatcatggactaagtaggctttaaagattcgtctcgcgatttccatgcaaactgtacagttagttttgtttttatctatatttaatgctccatcatgtgttcaaagattcgatgtgatgtttttgggaaagaaaatttgggaactaaactagtcgagtggatctggtggaatttgaccattggtagcttctcgtccttccggtagtagtgtaaaatagcaaaggggttctcgctggttagcctacttatccaccatcttcgttctcctccctttcatttcattctaggacttcgtccttgcgatattcattctcctgttttcctttagtttgcctataatacttgtgtagttatggatattgtgcatatcacaagttgcgataaattttgagggttcaatgaaattgagggtaaagcctgtacaatatatccatgttcctaattttgatacatgagcatgccatctttcatttttttaatataaactagccacatgtcttattcacgtgtttaaggattggcattgaataatattttttctctttttttacattgattagctatagttgccacacgatttaatgcccctcgaaagtacctctactttcttatagagacattttataaaatgcatcttcacttctagagataattcaccaaaaggtattttgaaaaatgcctccattgcattgtagaggcattttaaaaatgtttctatagtattaaaaagatgtctctacagtgcatttttgttgtagtgtttgctggatcgataaacaagcaattcgtgtggatcaaatagcagtgcccaattccatttaaatttttatgattgttgttttataggtgcctttctagtgaaccgaggttaatagttggtcagccatatattcttgatgtcatgttattacagcacagcagatacctgtaaacttttcattgtgatattttgcatatgaaatttacaataaatatccttgtaacttgtgaatttcacagagataatatatggctggaattctgattgtttgctaatgaaaattttttgacataaatgtagaaggtccctttattttttgccaaaaataaataaattgtttgcagatgtgatttgggtggaacaaatagataatttggtggagtgcacatacaacttgacaattcttacatgccaatctattgcagcaacctttcccgtctagattatattatgtgtagttttgacctcattaatttggcggtaaagttcatttttcatcctgaactataaaactcaaatgcttttcagtggttgtgtttgaaatggatgtggttttcctattttatactcttactgtgcatatttttatgcaaatatcacttacttagatccagagtcgtgaaacatacctgattgaagttcatactatatcaaattgatcaaaaccaccatgaattatgaaatagggagtagaggtgaaaaataattggtttcgtagtttagggtggaaaatagattccaagcaaagttaagggcaaaaaatagagtttacacttaatttggtttccatgtcctgttcttttgatggactggcctcatctttccgagaaatcaactcaaccacttaccaaatggtactgattttgtaaaggttactgaattgttagttgcactgaaattgttgtaagttttgttgatgttttcttaaacatgcatttcatcaaggataggaattacctgatgagtacttagtattgtaaccatatcgataagtagaattaactacagaaggaatagttgaacagaaatctctgaatttagatttacaaaatcgctacggtgctatgttacatttgtaatatctacaaatgttttcccaaaaaatgggagaagatagattgttagttattaatatgacagtgtaactcaatttagtataattattatggtatggcctgtgattgatgttttgttttcaagctttggttctatgcaaattttaatgttacggggtatgcttatgtgtcgcaaatgtagacttttatgttcaataaaactagtcatcttgttatgttagcttttttgtgttattgattttgatttaagttgcacatataaacaagcaccactgtcttttttttttacaaagttacagggtgttcatggtctatttgttgcccactggaatgttttcttaaaagagagaattcttagagacttcttgaatcatatcacttcaactgcaatatgatattccagcttcgattagtataaatgacaatcttgttcaacttcttacaactgtatatatggcgaagtattacacagatacggttacagtcaagagaaaaggaaggagaaaatctgggatatatataggggctggcagctatagaaagcccaaatcatatcagccatgcattatctcttatcacaggaagattgctggttattaatcctaactctacttcatacatagctttagattataaagatgtagggaacaacaaacaaagctactcaaatcagctaaagtactaatcaaactttcaaactttaatcagttgaaaaagaacgcatatgcttccttcaaatcagctgcagcaccagcagaatcagcagacgaaatggacgatatggtggacgtcagccggacccttctcctctcggattcgccgagcccttcccgggccatgagcagccaggcgaaggtgatgagctcccctccgctggccagctccgccgcgtgcaccttaccattggacctgccggcggcgaagatgaggaaccgcagccacattgctgccatctcctccactgcaccccagcttggttggacatcctcttctagtatcatcttgtacatttcctccattgttccttgccttgacacaccatccttattctgctgtataatgttgtatagctcatccagggtcatcttgcttccttgttgtgtcctagacagttcctctctcgatttcgcaaactcaaccacggtggcttcggagctggcattgagcggaagcatggaagggtggttgacaaagaggtacatcatgtagttggacagttttcggcacacctccaccatatcatctgcatctccccctccttcgtctcccgctgccgcggcttctactgcattcaaatatacttgagtgaatatgtgcatcaccacaatagcacatcccatatctgcgacaaaacagacccgtatctttttcagcaatgggccaagatgctgccattgttgttgctcggagacttcatcgctcaagctactaatcccctttacgacaaactccatcgtcttttcatcggcctccacatgctcagtgtccaacgtcttgctcagccagaacaaatcttcttttccaacaccgactaaactcgacaatcttctcactagagccaccactttctggttgtatgatcttggctggtctccaccagaaacccagttcagcaagttgtactgtccgatggaattcgaccaccgtggccttttctctggccagccaatatcactggaaaaaaggaaccaggacaagctagccagccggtcgcatttctgagccttcaaccacgcccaagtccatggagacattatgaagataaacactgcagaaagatcaaggaaaaagcctccgataaacagcgaataggtgatcgcaacatcaactccgttgtacctccgtttgtcacatgtaaggaacagtgcaaaagcaaggagggaacatgcgtgagaggtgcatcggagaatcatgcctatccttgttctcagcacaagagcctttgtgtagaggtcatcgtacatgattgcaagctcaagctccaccaccttgagcatttttttggttccctgtaccgtgtctcgagcaataacaactggggaattagattctggaccattaacaaatgggttacgcgctgcaaagacattgtggacatttagcattgaacatagagcatccaaaactaccttagaatagccatgatccgaatcgtttaattccggaaaccgtttcttgtagtgatctccagttgagctctcgagacttttaaaccttccatacttgagagacagtgtcctttctccatacttggtaactccggcaatgaacacaaggacacctgaaactagaagctctgcactgtgccttgctggcgatttccagaaaacatatgcagctaggactacttgcaccaccaagttcaagagatgcctcagccacaagttgttgtctgccattgaaaatgcggtgatgctgtcctgcccaccaagatggatgaggaggaatgatgcccaaaagaaagctagtggctgggttccccctgacatttgcctctgaatatcatcgtgtcgtgagaggtaaccaagagcataaactgctgtgaagtctgctcccaaataagctgtccagatagaaaccctgaggaacacattggtgttgcgcctccgaagactgccggtgaaaaagaggaacatttggagtgtgaagctgaggagcacaagcagctggatttcccgctgatgataaagtttcataaaatccttcattattataaatttaagagcacctgtgttggatattccagtaatcatttagtacaagttttaaaaagaagattacattttcgacgtactacaacccagaaacgtaaagaaaaagaagtcagagtaaattctttaaaattctaggtatatattatgatctaaattgcataaatccagaagttttggcacgtggcatataacactggatatattatagtcctacagtttcatataaccgcactgtttattaattttacttgctactattgtgtcaaaacaaaaacaaaaaaaaaatgcttaacttaatggctatcaaactttttatacaatagatcaaataattcttcatatatttcagaattaatttagaacccacaaatatggtcaatcaaataacaatttattaacagcatgattttatgaaactataaaaccatagcaccaagaataatcatatgctccgtgctaaaattccatttttttttgcaaacagcaacaaatcgattcacaatattaaagctcgatgcatgtatgtacaacaagaaaatagtaaataccccggttgtttgtgacagtttttgcccagtgtaattaattagttatacctataatatatcctatctacaattccctccgtttcgttccgttccacgatataagacgttttttatctaaatatactagcatacatatgaatttatacacatctataaacatatatatggatccatatatgaatctataaaatcccaaaacgtcctataatgtgaaaaagagaaaaatacatctatttaaaaatatagcaatcgaaagagatacaacctaatactacgaatctgaacagatatattggtaccatgattgtattcccatctaatcctagatttactatattttgcaactaagagaatactattctaaactcatttctctctctctcctatgtcggccggctttgctgccatggaaaggaaggaggagaccgacctctgcacgaccggcgtctcccgccaggaaccccagccaccggacgacggatcagccgtacgtcgccgtgtccaggaggtagcagatcgagtggaggagggacacgggaggaaggatcggatcgagtggacgacagagagacttgttgttgacgaggaagtgatcagatcgtcagggacgaggaaaactctgtgaaagaccgtagctaggctttgccgattttttctcaagtcaattctactatggagtttggaccacatgacactcacagcctagctaccacggaaaccccaaaatcctactcactccctaggatttttttttaaagaaacatggtagtacacttgtccctataaacacacgtacactttattcatatttataacaattaatgtattgaagttggttgatacgaagaagagaacgcggaaaaattaaataaaagatagttgtgattgattgagataatagtatagatactagagagtctatatttttacaataaaatttaaaagtatggagagtatcaagcatatatcacaagtactagatggagagcggtaagaggccagccggttgcttccctggccacgtgatataatgatataacgtacggtaaccttttcagtttttggaaaccacggtaatcctcacgataacagcatggttcacgataaccacacagtttctgcacatgataaccaccttactgtgggttaaaggtaatctcaccaagacggtttggcgaatcctgatactcaccaggaaattctattgtgtagtgtcatccaattgtgcaaccatggtgatagtataggtggtttcaaagtgaggttgtttttttaataaagatgcagtacccaccatgagttggtacggttattaatcattggctgtattagttttgcttttcatagggctgcatatgactagatactttaaaaaaagtacaatggcactccaaatactatagcgataagcattccacgttggattgcatgctgagctgaaaagagattagtgaagagagaaggcaaacaagtgactaagggtatgtttagcagagcttcaacttcgaagtttatcttcaagagctcgatttgaagtgaagttgtagagcagtttaaaccgagcttcaccttcttaatttattttatgagagcattctagtcagtttcactctagctccctttttaggtggagttgaaactgtttggttgggccttagctccagaagacatgtagttggagctagagctctgccaaacataccctaaatagtcgctcgctccatgcgcactccaagagcgttgtatagtagctttcctatcgcttgctcgtagccgatgccgacaacacccccatgtggtaatgtggggccgtataattagcgacatccaacgccagggagatcatggagaaacagcagcgcggccacctccagggactacgagggggaataggcaccagagaaagacggtggcgcgatatagagcgacggcgacatgtcagttaccatgacgacaagaaaaagaacagaaaggagttgatatagaaaaaataactagtgaaaaaaaggtagggaaatttctgaccataccgatattgttttcataaagaaaagtaagatattgtttttagctttatgtaaaatttggtttttttaatttatgtatgaattatattgaagtcatcactaaaatgttagttagatttataaatataaaaagttcccaaccatagtgataccattttcataaaattttagttattaatatcgtttccaacaattttcatcctaaaaaatccaatcagagaaaggaataggagctcccaatggcagtggtagtgtcctggtcagcaacagcggcggcattccgggctccgcgacacatagttcactgttagcttttttggctcccagggctcccttagagcaagtttaataatatagtccaactactagctccaaaaattaaggcaccatctatagctaacctaataattcactcatataatagttagttgttagttgtatatatattgcatcattaatacttattcacatatatctcttatattgtttattggaacccatgctttagttggctataaatttatagcccattttttctctctcgtcttctctctcctccatataaacacaaatatgatgtgacaaatcgtacatcccgcttacatcattctattatactcggttttatggcagcaattctaaaggaaagggtaggtagagggagaagatgctggaatcttaacatttcagctgatgtcgtggcagatgagcgaattggactctcaactttatcgcaaccagcaaaaccaattaattttacagaaaaactagaaaacgggattctgttcaacgggataacctagccttcacaacataagcatacatgtagcggcttgccggcttacatggagagatcaaccaaactctatacaaaaggcaagggcccacatgcatgtactatccttttttcttgtccatccatgcagctagcttatgggccaacgtgcatgtgcgtacatgctcgacattttactcctgcatgtacggtgcccacatgactttggcagagaggtcgatcagttctatgcggtagttaatcatcaataatgaatacacttattagatcactagtacagaaatataatccctcatacctaatatgtattataactgaaaaaatatagtgcaaaaaatggttccttggatccaatacctacatatatcgtaactgatatctcacaagtatcatcactagtacccatgtatcatcaccaatacctgataggtatcatcactagtacctacgtatcatcactgatacctcataggtattatcactagtaccagacaggtatcgtcattggtacccatgtatcatcaccgatacctaacatgtatcatcaattggcacctatatgtatcttcaccgatacctcacaagtatcatcaccagtacctacatgtatcatcaccggtacctacatgtattatcttcgatactgggtatcgaccaacccagattgttccaactgatatcataggtaccatcgagatacttggtacctagatcaacatgattcccatatgtaccagatctagtactgggtatcgggtatttgggtatcaagtacctggtacctagatcggtctgatacctataggtaccatacctagtgctggtatcaaggtacatgaggtatcatatacctgataccacctgagtatcgggtactaggtgtacctgaattgatgttgaacgatacctgttggtattgggcctggtatcagatactagttttagtatcaggtatcaactcacatgccacgtcacatgcatgcatgcagctagcaacacagccacgtcacatgtatgcatgtagctagaaacacagccatgagtaatcagtagaatgctacgtgagaggaagcaggtgggggggggggctagcgacgcggaacggaagggtatcccgttcccacgggatcctacggtctagctatcctcttaattttatgttatttgagaccattcaacaactttattttgttaacgtacaatagagttagttgttggctcaaggctgagagcaggagcatggcggtggcgcacagtatgagggatggctcttggaggataaggaaggagaggatcattgtaaaagcattataggtgttaaaaaattacaaagatgagggtttttttttcttttcttaagggaaaaaagaagtttgaattaccccaaactattacagttgctcgaattacctccttaaactcaaatactagatatttaacaccccaaattctttgaaccggatgaattaccctctcattcaatctgaagcggttttttacaacatggcgtacacatggcagtccaatcagcaaaacaataattaaaaaattgtgtggtcccaactgtccaatatttctctcttctccagctcaactctagcaggcagacatggtgaggagggcgctaccgttgctgcccctattcctctcttccctctcttaccagtatctcagcaggcgaggctggctccagcgaggcaagcggcatccactgccacccctcttcctctctttccccagatcgacctcgggaggtgatgcggactccgggtatcgacctaaggaggcaataaggaatccggcgaggcgggcctcgaccacctattgacgaaaaatctgcgctcagtcgatggtgccagaactgtgttggcgcgaactaagtcaacgaacacaacagactgggagattagcttagctccagtgaaggtccaaaggttgatgagatgtgggcgtgtcaatcagtttgatcctgcaactgacaagatatacaaatagcatatcaatgagccgatcggctgacaagccgatggaataattccagccgatgtcgatagggttttgaacaatcgactaatggtaatgtaattaaaccataataatatccagtagaaatcaatcggctaacaatgatatgatagaataatcaccgatccgaaggttaaaacatacatcggctgaatatccgatgtcatcaaatccacaagattagacaatgaaacatttgttgtgatcggctaaatccaacatgtatgcaatccttgtaagccgatgcaacgtccagatacctcattggctgaaactctgatgaaacccttattggcaatcaagaagcgggctagagattatgattctaagcacgacttagtagatcaaacttaactgatgctgcactaagtatgaaaagaaacataatatctagacaatcaagcctttgactgattttcagggtggtagataccttagctaatctaatatggtaagcgatttagccgataccaatataaaccctaaagcgaatgtcagccgatacaagtaaatcgagctaccaaactagattatctaagatgtatgatagataggtgcttagattgacaatatcagagtgtcgaaaccctagccccgccgatgcaaatagccatgacaagtataaactcgtcgaaaaattagaaaagtaaaaaggtggcgatgcgccgaagttgtattgatcgtggagatagtttacaaaaaaaaacctcgggtgtacatatttatacccatgggtagatactagtcgttgttggataagaaagaaacttttctaaagatagaaggaaaacataaagtctttatgggacactaaacacactttcctaaagataaaagaaaactaacaaactcttcctaattaatagataatttgacatgccgcatcctctttgaattcagtcacttctggataagcttcccttaatatattaatttccttaaccgaatcctccaagaatccgactgctagcgacttgataactcccattggccgattccagaactctgaagccgatactgattttaggtcgataatgtcttcagggcttaccaaatttcactgttaacaccaccgcagccctctttcccaggatcgacctcaggaggcaatgcaggcttcggcgaggtagggcctcagacgccaccaacgcccctcttcttcggcaccgacgagctgagcactggcacatggtcctcgcagagtgcatgctacctccatggttccaggtgacagagctcaaggttgtgaagaggcggcgaccaaaagaggagcttgtgcggaggcggcggtgagctcctggccaacgagcgtcgctgcgcccctcccccctcccccctcccccctcctcgagccctcgccttttgcatcaccctcccaccagccgccgtttgcatcatcttcctgagcgaatcctgcaaggctgcaactctgtcgccaaccctgcctccaacgcccttccctaggaaagcttgagctctgcccgtagccacagctccccgccgtcgaccagagattcttccccgccacgcccgccgttgactagaggcccttctccttagttttacatcactagaagcattgttatttatttcaacttgatctgttgtagatgtgttggaggcaccgacagagccaagctcgctcggggaggaaattaatgggaagaggaaatttatctttttctcccttcatgtgccggccttttgcttttatagttaattggatccatgccaaaaatatatcaattcagaaaaatgccactactatatattcaacacatctgttacgtgccactggaaattgggaaaactagaaccgtgccactccatcatgttatccgtcaaaaaatttgttagcctcaattgcaagtgggacctagctgccagttcctctcttttctttccccttcctctctctccaccaccgtagacggtggtctcgagctaacggaggaggacaagatcgagtgctctgacgacgggggcggcatcccggcagccgcctcgggctcccgtgacagctgcttcggactccgatgacaactacgaggaggacaagatgcagtcgccgtcatcaaccccctccgcagtgggaggcctcgggacttcctctctctccaccaccgttgcagccgccgtcgttgaccacctccacggtgggaggcctcaggagccactgccgtcgacgccgtcgtcttcgaccccatctgcggcgggaggctcgggagccaccgatgtcaccgtcgtcaacctcatctacgggggagagctcaggagtagccgccgccgtcgctgtcctcgtcgtggtcatcagcgagccgcaccgcctccgcccagatcaggcgaggagggccgccggcgttgtctatggcgatagaggaggatggaagaacagctccgcactgctgatggaggaagcgtcggtcctcgagctccgccgcgtcggccttgagcttcatcaccaatgctgccgacgcccaacgcccatctcgtctctccaccgggattgaggaagaagagagatggaaggggaaggggcaaaagtgacatttaacagggggcttagacataggttgagagataattggacggcagtggcgtggttctaattttcccaaattttagtggcacatagccgatatcgtgaatagtatcggtatttttctaatatgccatatttgcagtggcatggatcaattaaccctaaaaataataggtttatcaatatgttttcttttaaggttgttaacataaactaagttcttggaggcttaaatgtaacaaatactgaatatttgggagatgaatcagataaatctggaaaatgtgtcatgcatccaaaatatattttttttcatgtaaagtcggaacgtaattcatcattttacatgaaatctgagaattcacttttaggcatagtagtgtagaattttaagtgaactaaaattaatttagaataatttcaatctgatgaatttgctcatgcgtaaaaatatattgagactggtttctggccgggccaaacaaatacggggagctacagttagccgaccatagataagccaaaaaataaaaaactgactctataggttagattaactaggtgattccccgtgctttgctgcggaaattcttaatatattttttcgacaatcaaactaggagtgcaaaggaaaaaatgatgaaacctcacatatatgccgtacttatcaagaaataaacaaatgatactcgcactttaatgtgaaacatattgataagtatgtattaaatattataaaaataatagatttgttaaagtattgtgcaaatgatgtgaatgtgatgattggatatgtttgcatgttgatttgtggaattaaataaattgtagataatgtaatatgcttgcgtgagattaaatatgtaattattgctagtgggtgatgataacgcatggttgtatgttgagctttagatttagtaggctataacttttatagaaagtcaaattaggagtacaaaggaaacaataatgaaaccttagatatatgcagtacttatcataaaataaacaaatgatactcgcgttttaatgtgaaacatattgataagtatgtgttaaatattataaaaataatagatagatttgttagagtattgtgcaaatgatgtgaaggtgatgattggatatgtttgcatgttgagttgtggaattaaataaattgtagataatgtaatatgcttgcatgagatggaatatgtaattattgctagtgggtgatgatgtggtatggttgcatgttgagcgcttagtaggctataactttatagaaagtatagattagtcatagaagcccgaaatcaaaggtcatttatatttatattgtgtgactacatgagtctagaattgatgaggataggggcacatttataattttttatttagtggatcgaagaatgaaaaatatttaaggatgaaaatgcaatagtgcttgacaaatggtctggcagagccagggtttacgatttcgagatggccttctgtttcgggctctagcggaatgacggttttcacgaaatctggtggacaacctgtagattccgaacaaatttcacaaaccaaaatttgaatacaaattttctgagattaccaataagctcgcaaaaaccggtcagatttggcaaaattccgagcaaaatcatcgaaatttcaatcggtaactagaaaaagaggtaagtatttttttaatttcattattcttttctttcctactgtaaattaatacattattttttaaaaaaaaattatcccaataggttctatgaagatcatactatttataagatttttttctcttttttatcaattcaaatttaaatttggatgaaactcattcaaatctcaaatggtttctacttttgagcctcgtcgaaacgtcgaaatttcgtgaaattcgactggttttcgtcggaattatgaacctgggcagagccgttccatctattctccatggagacgttttcagaacttttcccgtccttaattcaacatttatctgtgatgtgatgtacgccacgtggtccaatcagacccaatacaatccgccggcttgagaaggagggatgatgatatgtttagttgaccgaaagctaaacaatgcaaaaaaaaattctaaaactatattttataagttaaaattgaccgcagctcaaacaaacgagtccaacaaattaaataatccacgagttcattatcatcatgtaatgaatcatcatgaatccaaaaatctataaagtttatcctcactatactaatgttatttttctcttctattgtaaagccatatcaacttagttgttcttagtgttaaatgattcatcaaagatgcaaattaattctcttctaaaaaaacatatcatgcatcctaaccgtttataacattcaaatatttttttaaataagcaaataaattttataactcacatatactatttatcatgtagtttttttttaataacgcgtgtgatttctatctagtaacaataattcgctcattcgctgtgccctcgagaaaatataataataattcaatgtgcgacggtgacgacatgagtgataggactatttcatccccctcatttctctgaccaaataaaaacatgattcactccatccatctaaccaaacatcctatcacaaaatttagagaataatccaatccatctcagctcgatctcacaccaaacacgtactaagataagaagtgggtagatgctggcagaacaagttgacaaaagaagaggacaagatcgatttaggccatgttcagttctcaaaacaaaatttttcacgctgtcacattgaaatgtttggacacatgtaaagtattaaatgtaaaaaaaaataactacacagattgcatgtaaattacgggacgaaccttttaagcctaattacagcataatttgacaatattgtgctacagtaaacatttgctaatgacaaattaattaggcttaataaattcgcctcgcaattttctggcggaatctgtcatttgtttcgttattagactacgtttaataattcaaatgtgtgtccgtgtatccaaaacccaaaaattttccccaactggacgaggcctttacaccccataattctcgagtggcagagtgaagaacaagctagacaggatcgatcgatggccggcggcagcgagtttgatatccaggaagccgcggcgtcggcgtcggcgtcggcatcggcgtcggcgtcggcgtcggcgacggcggcggcggcgccgttgctggagaagaagatcacgtactgggaaggttgccctggctgcgccgtcgagcggaggaaggcggagaatcccggcgtcccctacctgcagttcttccacatctggatcatcatcctcgtctcctgtacgtaatttcatatgtactagctcagttagcttaattaggacactaatttaagtaattaggattgtttttttttgtcctggaaaagattcctcctcagaatttgttgattagcacgccttcttacttaattagcttaggtggaagttgcttaagagcaagtttaatagtatagccaactactagctccaattcatctatagccaatctaatagctcattcatacaatagttacatactacactattaatatatagtcccacctgtcatacacacattacgtcttggagttcgtactacagctggctacaaatctgtagtccgctgctcttctctctcctcatttatcttcttaaaatatgtttgcagctggcttatagcttgctattgtacctgctctaaccgatgaggttccagctggtttcattcggcagtttattattattaattactttctcttttcctgaataattatcatcgttgactaaggttgtttttactttgattataaattaattttaaattattatattacgataaatgaaagttgtatggttatatttgtatcgctacactacaataatataacatatgtttaaaaaaaatatctgtattttaaaagaaaactagttaaaatttaaacttgaacaatgatcgggtcaattattcgataacggagaagagcactgcagagcagagtgagtgatgcctaactgttatccgtccgggtcagtagatatataacgtgcgcgctaacattatctaatattccctccattacaaaaatcctaggctgtttagcaaatactatgatcagatcaaaattaagattactttttactcaattttttgaacttttaagtgtttagattatgtttccaagcatggctttagaatcattgaaatgacgagaataatgcaaattagtctaggaatgcttatatagtggtacaaaatttaaatacaagaagcccttataattaggaacggggggagtatcacagtgtcgtttctagtagtacatcagtacattagtagtctacacgaagatgttcaagtgttaacagatacatcaatgtgatattgtttctttttgctgccctttatttcagtctttttttttccatatgttcagtttagttgttttgtaattgtagcacgtttgccgtctgctataaaaggtggatttctaatattttttttctttttattctaggtttgccaataacatttatatatcccttcctgtatttcatggtaagtgcttctcattttaaaagatcaatagaaacaataattttcttatccacgggattgcattgcaatgtagttaggagcttaggtatcatagtggctctgacagccagctaacagccctactcacttcttcccataaaaaataaaccttgtacgagatgtgaaatatcataatactacaaatttgaacataaggttatctagatttgtaatactagatttgtaatactaggatatataacatctcgtactatgtgtaatttttataggacggaggaagtgcttgtctcagtctcactgactaaagaacgtagtagagggcaaagaggacagtggcagcagcatatatgcaaagggaggctagggtggggtgatagggaggcgaagtagagtgtagaagaaaagagcccaaggagataagggagagggttctggctggtggagactagagacaaattagggtttaagggtggaaagtatgttatataaacttttggacaacaaatatgataacacttaaatggggacaaaatggaaaagattattatggatacgatttttgcttagaaccttatgtgataatattaattatggttttcaataaaaaccatctaaaaattatatttttaattatgttttttgaatagctcatgtgggaaatcccattgcatatgatgtttaagtagaaccatctataataagtttgtgtgacagtgttaagaaaccatttgcaataaggtgtccctacgacttctttttaggtagtggatgttactcgattctcttttttaatgttgtcacaacccactaaacaactaaaactcaacatgcaagcatattaattattattagtgcatcctaaagactaacatgcaagaatgccacgtcaactcaataggtacctaaagctcaacatgcaactatagctattacatatacaattttattacatcctaaacctcaacatactaggatgctaaaatatcattcctcacataatttttgtaatattaaatttcaatccgaaccaaatctatccatgtc

SEQ ID NO: 7487 - DNA, 14442 bp, Oryza sativa
gaacacatgttttaccattaatcttatttaaaaaatttatccaaatatattagatataaatcatgcttaaagtactttgagtgataaaataactcacaacaaaataaattgtaattatgtaattacgtaatttttttgtcaaagacgaatgattacacgtgtgagccttttgttgtctaaagcaaattcttgtgataaactactctaacagtaataactccagtatgtcaagtactagtagagaaaaagagatattgtgtgtgatatttttctttatgtattatatatccatattaagttatccaaatggaactttggctaatcaccttaattacgagtgtcatacaaaacgaggtactcgtgtccattacttcgtctgattggaagatcgtagtcctccattatcgctactacagatttggtttttacatgctgcctgtaaaaacgtgttttccacataaggcttagcttttctgctaccctcctatatataagaaatttgaaattttgttttcccgtcaattgttaaaaattctcgccaaattaaaattttcaaattaagtggcatagaataaaaaggtaacatatatacactaacaacttaataaattgttttctatccacaatatttattaaagtacgtttttatgacagttgagcggtcttcatcctcggttgttacgcaacgtggcacacagtactacctctatattaatacgacgctgttgacttttttctaacgtttgactattcgttttatttaaaaaaaatatataattatcatttattttattgtgacttctcatcatccaatgttctttaagcatgacataaatattttttttactgaacatgacataaatattttcatatttgcaccaaaattttaaataaaacgaatggtcaagcgttggtcgaaaagtcaacggcgtcatacattaaaatacggagggagtattatattacccatcttctatattcatcaactctagcaagtaaccctcgtggatttgtgcacaaagatcgagggtgcttttagcccaaattgcattttgttttaccttttcttttgtgatgactgccaagccaattttttttgtcttgtagaaactagaaacaaaaacagaaagaaagaaatggaggatgaattcagcaaaatacagaaggaggtgagcatgcgaaaaaatagtaggcataagtaggtgtttctgcaaacagagttgcagatataggatcggtgaacacttatgcgtgatggctgcttggtacagcctatacagcacatcgtatccattacttcctccgtttcgaaatatttgataccgttgactttttaaatatgtctgaccattcgtcttattaaaaaatttaagtaactattaattcttttcatattatttatttcattgttatacttttatgtatacacatatagttttacgtatttcataaaagtgtttgaataagactaacagttaaatatgtgctaaaaaattaacgatgtcaaatatttagaaacggaggcctatttcagacataaatcaactgaacaggctgcctccgttgcagccataggaaatgcagcaggccctatacttaaagccactagcctaatcctactgtgtatactatgcagcatcatgaaaaatctactgccttgtggcaaggaaaaagaggagaattagttctagtgctccaacaaatatagtaaattctctgtatacacttgaaaattaactcactcaatctctctcatacccctaaaatatatacccggtcccttctatatttccgaaattgcaacttgatccaacgatgttggtttgaatacaagcttgaaaaacgattgaaaattttgtttgaatgcaaaatatctgtattttatgaaactaatggaactaaataactagtgcaaaagattttcaacataaattttaaaaataaaacaaatgtaataaattgaaatttaacaggacaatggattttttttctagagtaaattacacccacggtgcaacaacttggcaggtgggtgtaatttggtgtaataacttgaaaaatgagcgttctagtgcaacaacttggcaagaaggtgcaatttagtataagaactttataagtgatcgtataaatacaacaacttgcaaggtaggtacgattttgatacaataaattaagaagttgtgacaacttaattatttggagcatttttcatataaattcaaaattttaagtgcttgacaatatactagcgtggatttgtataaacatatttatatttttatcctaataactaataactctaataactaataactgagtcaattaaactggatgtagaaattattatatttcggttgatatttgagaaggtgaagaaaacaaaatattcttaaaggtaactgtatgtaaattgtatgtgcaatataattcttaaagattaaattcaatattataaggtaatatccatagaattattgtgtattggcatattgacatcatgaaaaacctcacctagcatatgcttagccaaattgattcaccaaaatactaaattgtcaagttcttgtactagaaagcacccacttgtcaagttgttgcacccggatgttcaattgtcaagttcttgcactatatcgtacccatctgtcaagttgttgtaccgtgggtgcaatttactcttttttctatggggagcattcatacaaaaatgagaagcacctaaaaaaattatcatgagcattaatagccccttctttatatgaatgctcctcatttttatgactttttaataaataaaaaaatatattttgtttttctttcattatctaaaaataaattttatcataaataatgtgtcacacaataaactcataactataatagtctcatgcgataaacttttatatttttcaacaatgcaattcataaatttctatgttcgtccatgtataagggtaaaatggctatttttatagatattagatgatcaactaacaatcaactgacggaacaagcatgcaaatgatcaatttgaaatttcaggggtatggaaaggatcgggcaaatttcaagagaatgagagggatcgagatttcaatggtatacgaggaatttatattgaagattgaaatattctcgtcaggcagtacaaaggagtagcaaaagttctcttcaaaaaaggagtagcaaaagtctaatcatgcattgatcttgttgttgtttggttccagcacgtgggaacgaagaacattgcctggcctgctattttccgtgttcactaccatctggtgagcatgttcagcttcgctataatctgcatttccatgaggccttccaagacaaagaactggagctcaccataggactaaaacaacatgtgggattgcatgaagctgtgtagatctctacactttttgtgtagtaccttctatgctgaaatataattttaaatttttgctttatttgtaaagaggactattgagttccaaattttcaatgctggaaagaacatgagcttccgcgaggcctgagtatactgtaataaagtgctagagtaaacaggctaacattaattatatatggtgaaaatgggtttacaaagcgttcgatcgagaagcgactagcagttatatatggagtagatgcatcacgcacatatatatctctagcttcattttaactccagacctaccattaatatacactttaaagatcttgattacagagtacttttctgagttgcaccctagcatttcctcgacatattttcagacggacacgttaagtcactatgcttcaattctgaattaaaaaaaaaagatccttccatataatgtcaccatgacatggctgatgcatggcccatgaaattgaagcggcctcgcaagctaaaattccaaggtgcaatgcataacattatgttttactccaatgcctgcaacaaaaattcatgaagtattggagtgctcagctggttataggattcggaggtgttggtaaggcagcttcagctggggatttctttgcaacattattcaggcagggctcttgccctagtgaccagcatatcatgtctatgatctcaagcagtagcggcatgctagagtttgtacaccattggagcaagaggtgttggaaatttaattagcagcgtctcttcttagagcattgctagtatagtacaattgcaaggtattgtctagtaatgccatcacatttagttatagtaaattggttgctgggttggtaaactgattgttgaaaaggtgaatccatctccaatgtgtctatgtagaacagttccccttagctacttcatagtatgtgttaaatctcccagtttggcagttttatcttatcttcagctaaatcctttcatggttcgaatacatgcagctgtggattttttttttagaaaaaataaactaaacagtccaacggtagaaaaattgggcgacaaactatatgtgtcgcgcacaactagatcctcgtcaaacatatagtaaagcaaaataacccttaaatgtagcctgtagaaggcccaaaaataacctaacccagcaaaatattgagatatataaaaaaaaccctagctctagccttatcctctccagtctccttgtctcccctcccgttcgccccatgcaaccagccacagagagaggcggtgcatgtcaccaaggcgcaccggcaccgtgcactcctctagatctcgtcgtcgtcagtcgccatctctcctcccctcctctcccctctggcctcatgtcctctccagtgtcccctcaccctccggtctcccgacaacgcacgggcggcgtgcggggaggcgcatagtcacggcgcagagcaacggcacggccgcgcggcaagggcgcggcgaccggcgaggatatgtgatgtgttgaaccttgaactcatgtctgtgtcatgtgtttgcttggctggctgagtgtgagtggctggcagcttgctagactatcatggtgaatggtgaagtgttgtttgtgtattgaatgtcaaagtatttgtggactttgtggaattgtggtcatgcatgcatttagttaatggatggaatgatggatcaatatgtgtttttgctgagttttttatgatactatttaaatattcatgctatttttgatagtgtgtcaattatatatgtacaatatttgtcctgtgttgattggatggagatgctacccctgcatctccagttggggttggggtcgggggcagggctgttttcgtccaatccggccctgccccgctccgttgccatccctagtgcttgaacatctagagccatcagaatacccgggagcatgattggcagcacatatatgggtagcaggaaagacgccatgtcccaagcacatcctcaacacaatctgttcgtgaatccggtttccactgaagcctcctaagccaaaagtattactgatcctgctaaagttaggaaatgaaatttatatataattggaaatgtcatgcatataaaaaaaatatcttcatttggaagtcatacctgttaaagtttgatgtagtaccctcttttttttattcatgtcctacgaagtatgaacaatacaatagagaacaagtgaacaaccatgcaatcagctactccaccatatgttccattcctttcgtatattacttttattgtgtgcaatatatggaaagggatcctctaacgtaaagttacctctgacgtcccgagagcagtggggcccacatgtcagtcaccacgttcctctgactttacgtcggaggatctcaatccgccatatatacagcctctagtgcaagaatatatttgatggcacctcaaccagagcaagcaaaagcaaagtagctatgctaacagagatatataactcgtggaggaaaaagattggagaagcatactgaatttgagaactactagggtagtattaacgaaggcaagaatggcccatttgtgagtagtactgttattgtttttttttaggaaaaatacctaaaaattctcttccaaacctgcaagagcattctcttccagatcttttaaattccaaaacatttttcctgttcaattaaaagtacgacatatctgttacgtacgtaaggagggaagttcaattaaactaatgagaatgtccggttaagctagaacgtgtggctgtacagccacagtgctgctgtagttctagtagaaatttgcttgctaagtcctgttgatgtactgccacagctagctgctcctaacacgggcaatattcagcatgttcttttgcgctagctatctgcatattgtttagcaacatgtaaacacgaaacaatcgatgcctacgttttgcagaatgatactctgctgctcaaacatagccacatccgcagcaaaattatgaaggcacgttagaaatcttgaaaaatgatggccgccattcctcaagtaagtgcaagtggaggaattcatgaagatagtctgcaactgagtgggccaaacactcattggagccatgccttccgtttctacctgatacctcccattcccaaccactcctgtaaatctctcaatgcgatgaaaatatctgagctcctgagcatacaaaatatactgacttgctgctgataaagatgttatttgtgctaaactagactagagggcagaaaggcaataatagtttggaaagatagaatatatctgttggtcactcttttctttcagtgcctatatgtatgcatagaactaaggatttgagaggagaacatgtatatgtttgtcttcaggggtttccatgtctttatagatataccaccacatcacttcatgaaactttgggaggcattcaagagtgttatatctccatttaacacaatgatggaatattgctggctaacttagccgacgtgtaataacgatggaaataatggagtccaactttggtaggttcaaataattatctcttgttaggaaacagtaataatacacacactcactccctctgtctctaaaaacaaatctacaccttttatttttagggatggagggagtatatatatataactacagaaaactattaaaatgtacctccagtacctcctcgcagaccatacaatcactgttcgtaaacttggcaaagacacgcagcatgttttgttatgtgcaagaaaaaatacgatattcaggttgttgcacaaggccttaaaataactaattgaaaaaaaaatgctgagtagctagatagttgtttagtgggtgcgttttcactcataaatatgattgtggatcgcttattatatgaatctaggatgatagaatgtgacgttgcttaataagtcaatctgctctacttgtagcaattgctcttcaattaatgcaattgcatctcaccatgagattctcatgtcatcagagcaggtacaatagcaggctataagccagttgcaaacatattttaataaggagataaatgatgagagagaagggcagtgggctatagatttgtagccagctgtagcacgaactccaagacgcagtgtgtatgacaggtaggaccatgtattaataatgtagtatgtaactattttataaatgagctattagatcggctatagatgaattggagctactagttagctatactattaaacttgctctcattccttctcttatctccaaatcaggacaattgtgaccctgtttcatgcattttctgatcaacacaaaatcagttggccattgtgaaaattcaatcaccctggcaaacatgactggaaatcagaaaggagtgcaaccaattgtgatgaggactgatttgggcttgggtggcatgaggacagcattgcgaacagtaatacattgcttttggacaacgcttttgggctacattcttcatggccgaagacattttccagttctctacagcgcacttgcggaagttctcgattgcactacgaattgattgattcaaagtttgattcattgtccaacacagagaaacattaaacaatataatcaggcctgactgctcaacaatggcccagtgtgtccatggagagatgtacgaaactaaagcatcaaatctgggcattgactgtggatagttaagtgatcgaagtccattgcaggaaccctgaggcctgatcatgtatacatgttcctagcattttaattcattgttgtcttttgtacggcatgagtaaaatacaagagatttggatataagcaaggctgagaggatggtttttaagagttcttttccgcaagtcacaattttttcatttttcattagcacattttccgaactgctaaacggtgttttcatgcaaaaatttcctatataaaaatttcttaaaatcaaataaatatatattttttaagttttcaataagtaatactcgattaatcaaattgttcttatccatctggccccaccccacccaccgctctctctccctctctctctcttttcttccttctctttcttctcctccttgatctctcacactacctcccatcggctctcttgcgcgcccaccccacccagtgtcggcgacagcctaacggtggcgcctcccctccgccagattcgcccgagaggggaggtgtcggcctggcgcgaggtgtagcatcgccctccgccagatctggccgggaggggaggcgtcggcccggcgtgaggtgcgacggcccagcgacgccatcctctctgccaaattcgacgggaggggaggcggcgacggcagcatctcccctcctccatatccggtcgggagggaaggcgccggcccagcgcaagatgcggcggcagcctagcaggagttgtgtgcttgctgttcatattgttcttcctgttgattgatgtgtgttcttgtatgtctataaattaaattgttgtatgcaatatttttcatgttcttggatagccttcaatctcagggtttgatgaatgtgcttgtggatggggaagctgctgatggggaacacgctcaatgcatcagctcgatttgagtcggtgcatcgagcctttttttggctcacgtacgcctcaaaggtgccgattttgaaaccagcaccaatcactcagagtcatcaatgccgccttcatggtgccggttgggaaatccgacaccaaagggggttttccaaccggcaccaatagccctttctgtagtagtgaacttgttagtctttaatttaaaatcgatgcataattgtttcattatcgccaggaaaattgtgccgtgaatagttttaaggccctcaaccggcggtctgatcggccaacatatggcggtcagaccggcccactccgaggaaaccggtagacttccaaactttggcaatttttcctattttaatccaaggtgtcaaatttgggtgtaaacaatatttttggccaaaaatttttgagatccaaacatttgtagagctctctctactgaacctacaacgtgcaaatcataagcagcttatgttaattatggcatcattcagtatgagacacgcttagggctgagaggaatcaggagaatgtgacaaccatttgcataggttcctagtacgagttggcaaagtaaaagccctagttatcattccagaacatacatgggcatcgtctgatcctctgcggtgcatggtaaaggaggaagtcgatgcaggctcatatccaacgtgggtatcgagtcaagcactgaagacgagggatacaagcgggccaacccgcgagtttatttatatgtcaaattaatgataattcatgagtattcgcgtcatggtccggtttaccgcatcaagatatgcaaatgggtcgatccataaactcatttataagttaaattaataggtaacccgctgatcaaacccgcgggttacatactaagtttacctataagcaggttcgcggacaagctcacttacacctctactgaagagacttgttagtacatgtttctgcctttctgctacttgaaacatgatcatatctgctaaattaaaattcgaatttaaattggaacaatgcatatcaattttcctccctgtgtgatggatctggattatataatgttgtaatcgctatgattgtatatgatatagttttatgcctataaatgaaaataagagatttgtaaatacattatttgtacatcaaaatgttgttgagttcacgtagctcaatcattttcccacttgcctgggaccacaaaatcaatatagtgctatcatatcgatggtataaaatgaagcaggatagcgtgtgagaaaaaaaagtatattatctccgttctaaaataattgtatttgtagtacttagaaattgtcccaaaataattatctctacagagtattaattatcccatcaatcacttctcattcaaattcgttatattctactgttaatcactctcatactttcaccaatggctctgttatggcaaaggactgaaccacagaatcgccaatggcccacatgactgtccccattcaatgtatccacatctctaaattcaacaattaatataacttaacaacaacacttgtgttttaaatcgctaacggtgttgtcaattatccaaaagtatgttttttctagaaactttctacatcactaatatgattttttctaaaaactttctatattagtgttacttagataaccatttctaagaatttttaggtctatatatatacttaattcatgagcaatttgctgtgtctatactctctgcacagttatcaagttagaatatactcatgacttcatagagttcaacggatcattttcatacatgcttgtgaccacaatgctaagatgccactgtaatattaattgatggtattaattgtttttaatagcatcaatcaatatacccaagtggtgaagccaccggtgtattcacttgttgctgtaaaatcaaagatgtttttgattgttattctgtgatgaacaattgccattggagattattggttttgatatttggaatttatttacgaagtggttttgaagatgattggatttacaggtgagtaacaggtgttgttattttatgtgaccagtcagaccgggcagtgtgtgtcagtcagaccggcgtgtatcgcgcggtcagactagcgcagcctgcggtctgatcggccgactctgtgtcggtttcggtttcgggttatttgtttggatatctgtgattgtttcatgattatggcttctagatggatactatgcgtatgtaatactgttgtttgctactaatgagtcaagttggagatagcttggtctcgggatatggtttctttgtttatttcatgtgtaggtgactcgatgcctcgggagagtatttgcggtgatggaccgggagtcggcttggggataagacgacgtctgtggaggtcagagatcatgcaagatatatacttaggctagagttgatgcacatggttgatgaagatttcatatggcatacgatggacgtattgtgtgcatatgggatgcggagtcgaatttggaaggagtccaaatttggtatgagtggttatgtaaagtttgtttcttgtaatagagggtttcctaaggtttttaggacttctagtatgagtttggttcgtggctttaggctgcctacctcgggtataaatagagggggagcgtgaggattcccggtatcgcttttgagatcaattgagttgagagtttagttagggtttcgagtttagtcgaaatttttgtaaggagtgctgttggtgcactttgtaagcacagagagaatcaataaagtcgtcatccactttaagagttcttcgatttgtgtttcaccgggtttcggcggtctaaccggcggtgcactggcggtcagaccggcagcgtcacagcggtcagaccggcggggacacggcggtcagaccggcttcggcaacaagcgacaagagctgatctcggcggtcagaccggagatctaatcttagtcagaccacggcaaccaggcagaccgcgatccgtcgaattcgagggtaacttttatttccgctaaaagttttcggtttttgggtataccaaccattcaccctcccccctctggttggcttagttcttgtgattcgatcctacaagtggtatcagagccttgttttcttcattggattttaatcgatctagagtttttgccatggctgctcgttttacaactaagcctcatgttttcgatggaaccgatttttctcattggtgtagtaggatgcaatcttacattgtggctgaagattatgatatttggagaaaagtttttcatcctgaagagattaatactgctgctttaaaaattgaatttgaacaaaattgtaaagctcgcaatattcttttcagtgggatttctcgtttggattatgatcgtctttctcatcttcaaactgcctatgagatttggattgctttgagtaattttcatcaaggaacaaataacattaaagaacttcgtcgagatcttttcaaaaaggagtacattaaatttgagatgaaacctggagaagctttggatgactatctttctaggtttaacaaaattttgagtgacttggatctgttgattcttcttatgatgctaattatccacaatctgagatttctcgtcactttttgaatggtcttgacatgtctatttgggagatgaaagttacatctattcaagagtctgttaatatgtctactttgactttggattcgctttacacaaaatcgaaaacacatgagatgaacgttctttctcgtaaagttgattctaagtcgagtgctttggtttcttcctcttcttctttagatgttgatgcttcttcatctaagccttcttttcttgctttatttaatgccacatccgatgataaactcgaacagatcgaggaggaggatttgactttggttgctaacaaagttgctcgagctataaataatatcaagttcgggaaaagaggtggtccaaatcgttgctttgaatgtggttcgattgatcaacttcgttcgcattgtcctaagcttgggagaggcaaaagagaagacaaagatggtgagaagaccaatgacaacaagccgaagggtacattcaaagggaggaagatcaaggagaatctcaagaaggcttttgatcaagtctacgccgcgtttgaagcactaagcgatgtagatggagagagtggagatgaagataagggaaagaacatctccggtgtttgcttcatggcgtgtggtgaatcggagtcagagtgtgaagacaatgaggtaagtgcttttgagaaatctattaatattttgagtgcaaaaagtaagaagtgtgagaagatgtatagaaaacaggagtttatcattgaatctcttaattctgaaattgctagattaaaatatcttattcctaatgatgatgattgcaaaagttgtgaggttttaatgaatgagatttcaaaaattagagatgttaatgctgcacatgatttgaaaaatagatcttctctagttcttagttttgctttgcacacacgcactttggatgtgttgtttttaactaaaaagttgttgcaaaaatatcaaattgcttttcatgctagtttgatgtttaacttgatttgtgctaaaaagttcaaacaatctcatgatgttttggattgctcaacatgtactttgaataagatgaaactaaaaaatgctttaggttgtgttgagtacatggaagatgttgtgaaaaccaatgagttgctttcttgccccaagtgtcgtaaaagcaaaggtgtcatggtagattgtgaaaattgtgctaatttggaaaaagagatttcttatttgaaaaattccttgcaaagattttctgatggtaaaaagaacatcaacatgattttagatcaatctaaggttagcacccataatcgcggtttaggttttaatccttatgctcataatactagacatcctcgtgttgtgttaggtgttggtgctagaagtagtgagattttggttaaaccttatactaataaaactgtatttaaatctgctggtatcatgtctaccttgggtgcatcttcttcaaaatccaatgttgtgtatgcaaaacgtcatgttgttgcttgtgtagctaagtcttctgattctactaatgtgtctaatcatcgtgaaaaatatacttgttctttttgtggcaaagatggacatattgttggtttttgtttcagattagctcataaacagaaaaaggagagagagattgcttttgcaaaatcaaagtggcaaaaatctggttttcccttgaggaaaccgatcagacgcagtgggtcccgcggtaagaccggcgaccggtcagaccggctactgagcggtggtcagaccgggcaccagtcagactggcggtacagacgcggtcggaccggcccccggtcagaccggcagtaccacctcagtcaaaccggcctcagagaaattt

SEQ ID NO: 7488 - DNA, 6165 bp, Oryza sativa
ttactattatgccacactatgaactgaatttcacacgtgccgtcttaggggcgagggctctccttttggcgaaacataggtaacaacatgaaacccttcgtcctttctattcacgcttctctcgccccttcttttcttcgcctttgctgaccgttcgcttttctttgagccggttgtgttagctgggacctcgtcgtctttcgacggatcttttttcttgggctgccgttttgatcgtcgtggcgccgtttcctacgagaaggcatataccaaatttactattagctcgggctaatagttatcacggtgaacagtttacatattaagtttacttaccccttctttagggggaatagttatcacggtgaacagtttacataccttaacaacaagactaaaggtaccttcatagtctacatactataacgctacttaaacccttttgcaactaagcgagctttatatctatcaagactaccatcttctttcctttttatcttataaacccatttgcaatcaatgacatttctacccttctgaggaggaactaaatgcgatgtattatttttaatcaaagccatatactcagcatccattgcaagtttccaattcttatctttcaaagcatcttgtaaattttcagacacaccagttgaggtcaaaagaccccattttactgtaccatcagtgtagattttctccttgcgaattccactttgcagccatgtgcgaagacgtgctgctgcgtcagactcctgattccgatctgcaattccaagtccgcgcctcgccgtcggatcggcggcagcgataattccaagtccacgccttgccgtcggatggccaccgctgccaccgctcctccaccggctaccgtcgcctcgttttcctctctcccgtttgtgcgcgtgcctgtcggtcccttgccgcgtgcctgctggcccttcccgtgcaccgctaccatgcaagtcttgccgcatattgccgcgccgtgccggtgcctgccagccgcttgccgcgcgtgccgcaccgtgccggccacttgccgtgtcgcccgtccgttctgcttgccgtgccaacgccgtgtttgcctcagctcggcagccgagccgacaaaccctagcgttgcttggtcggtttcgtgaccgacccgagccaccggtttcgtggatcggcgttggaccgcacacgttgtcccgaaccacggtaggtcggctccttgagatgctgacctatggggcctatctgccagtgccgtttccccttgttgtccaccctcgggcgtttaagtataataattgaataaggatttttggtttatagtaagaacacagtgaagcttctaaaattcatatgtacttcatctgtattccgttttaatccattcaagattcagtaaattcataaaaacacctagaatctattaaaaataattttgtttcctgtttcaatagacttctagaaggtttgcttgtgtgttttgtttgttgtatagaatgcggcagttccgacactcatgtctacttcgaattggtcgctgaagcccctccaactcaagagcaaggcaagtcatacacaaaccattgatcatattgaacctatttttacaaatccctcgctttctatttaaattgcattgtttttataatgtcatgtgggatggattcctattgtacttagcctattgttatcctatgtcatttatagcttgggaaataattttactggatgattggtttaggtgatgcttggatcaattagcacactatgggtttcacattaactttagtccttaatttaatgattgattaccaccatggtaataagtaaactaaaatatgctaaaatggtgtattgtgggtgcatggttttgatagtcgcacccatgacaattaaggaccggttcccgggaaacactggaagaattactcgtacttaccacaagacaacatgagcaacggctggatttggagtgtagctttttcctagccgacgtactaaggcaagggtgggtgtgatggagtaggatgggtcctatgacgacctctgttgcttccagattcacctaggcatgagggggctgcccactgccggtaggggtgggggcaaaacctgaggtgggcacgattggttagggagggttatacaaagggtcctatcacagtctctttccgaggtaccttggtggtattgaggcgtatgataacatgtcgtggggctgtgtcttgtgggtaaagttgtacacttctaatcagagtaaaattattcgaatagtcatgcccgcggttatgggcagtcaaccagattcactattattagtctcacctgaatatttggacttgttgaatggtttagttcaggtggtttgcttgggcctgtttcaacgtggtttagcattggatagtgatgtttaatattgattaatttatatctagtgttttactatattcaacttgtgattttaaaatgccagctttatgaaaatatcctataccctcctttggtactatcttgcatcatgccttctattggtatggattgttgagtacggtgggtagtactcagtcttactttatttttcccccaaccctcaaaagcaaagtattattcagatggagattattgggaagagtaggcttgttgcggacgtcaaggatgcctgtggatttgtagacgctatgttttctcaagagatcgatgattagttaactcgattatttatttccgatgcatatataagacttatttatatttttgtaagacgtggacctgtgtatcaatattatcgtcaatgtaccctggttggtcctggacagatattttaatacacattctgcttgaaattcgtgttaacgaatttttaggcgttacagacatcacatttcatttcattatatgcaggcattgacagtcagatattatgatttaagaaccatcaacagtcgccatgatggcagcgcaccggttttgccgtggttggaggggtcgttaacgtgaatgaccttggcggcggcggcaacgaagttggcgaggaagaacggtgccagggaagtcgtggccgagggtggagcgtgaggagtcatatgcctacggacgctggcctgttgacggtgaagttgagagctccgaagcagaattcggcccctacagcgaagcggagtgtctggacagattcgaggacaccggggcccacctggacaagttggccggagttgttggcgaaaaatttgaaggagttgaaggagaaaagtttggcggtggggaaagtggcggtttcgcgaacgtggccccgtgaaatgcatgccatctcctcgaagaaaagacgattgagtgccccctaactagcatgccaattttcgatttctaggatcgagaatatgaggtgcgctagatcaaggagagatggtgacatagacgattatcctggtttaggcccttagcatggggtaataccctacgtctggtgatgtagattggatctatgtcaactaaaaagacaagagtgttaccgcttagggttagtgccagcgcccttatagagctagggcaaccgacgacatgcttcgtacagtatccctcataatccgggtacctaccatctgcttactagggacgagatagacttccttatctcttatccctttctatatatccaaagtattacatgggcctaggacactcagcccaccctatgtagtatgacccaaatgcctgtccttgggtatccgggtaccgtgtgccccatagcatgcatgacggtggaaggaggtgacgacgcgcctcgccgtgatcagcagtcgacgagcgggatggttgcctggttggcagctgcctccgccggtacaccatgcaatgatagaaactacgtcgctgctggtgtgttgagaaggtccagcgagagcaaccaatgggtttgcattccacacttccccagcggcgcgtcgagaacctccagccgtggttgttcacattcgctagtggcgggcggggcagcaacgacgaccaccaccatgggccacagtggcgggggcggcgttcgcgactacatcatcgccaagtgcacatgctcccactggttcggactcctctggtgtggccggcgcgacgactgctacacgaggactcatacacgcggtcaatgttcgacgccatccttgccggctacgtgacggcttcttccacctggatttgcacccaacaccattggtagtgtggcacctgccgcgcaaccacaccgcatgcatggtgagctcgccatcgctcgatctgcttccatggcggagctcgacaaggcttcaagggcggcactattggtatttcttacgatcacagatagaatccgcaagcgcacggatataccaatgtagcacttcccctacggagtattccaagtgtatcgaatccaagggaacgtgtgtgattatcttctcgtcaggttcatccaaggacacaaagctaatgtgggcatagggcagagaggatttccgaatgagaaacagtgtctagggaaagcttaactttaatcgtaacgcaatacttcaggcactggcaacccgctgttcccagatgtcgctctactatgtaccaggacagggaggacttaagtgctcttgagggctgtcaccacctctacacccacctcaaacatactgtgggatacgctacacccacctcaaacatattgtgggatacgcagcaaccactagagattaattacccagacaccacgtttacgcaattaataactactctagtgccgatcaaacactaaagcaatcactataaataaatggactataatgaaccatgatcccgtatgctaattaggaactaaccaagaagtaattctcactaagcaaaccttaattactcacaatgatattttctattaaagcagagtaattaacaagatacaaaagtaagaggagattgccgacaactccgggattcctccgattacttctaccttaatgtaataccccatatattaaaagatttttaggttttttttgtttgggttgatgtcacgccctgaagttcccctcccttgctctaaattcataaaataaatcgtccgaagaaattgtttaatttaacctagagatgaatccctaattaataaatgcaaataataatcggaattggcatgtggaatttttcttgagttctacatgtcaaaattcactaacaggatttttagtggaattttcagagccttggaaataattttaaccaattaaaatgagcaaagtgcaatattaaatccctggaaaatcttttcttctttttctttttcctccttttttctctcttcttgggccgtcggcccagtccgttcgcctcccgcgcgctcgccctcctctcagctgggccggcccactccctccctcctctctccgggtcaccgacaggtggggcccacctgtcggccccttcttcctcctccagccgacggcaccgccgccgccgaaaccgccaccgacgccgccggtttccccgtttcccgcgcccactccgcccgtaccccacgcccacgtcgccgcccaccttccccgcacctcccgccagctcgcgcgcccgcaaacggcgggggatttgaaatttcccccactctctctctcctcctccatttcccccacgtcgccggccaaatcggccacctttccggcctcgtccgcccctcccgagcccatataaaccatccccgcactcccctccacctttttcctctttccgccgctctctcccgtgccctccatcactcccgcaccgctacacccgccgccgccgccttttccactcctccggtcgccgctcgccgccgctggagccgccgccgagccaatttgccaccgccattagcttcgccgccgccaaagctaccccggccgccgcatccccatccaatcccgccatcggggcccgcttctctccgcgcgccggtgagtaccaccatagccgccgccgtcggccatggctctcgctcgtcgtgggcaccctctctccctctaacccctcacacttcctctcttagggtgtcccggagctcggccgccgttcgccgtcgcccttcggtcgctgaccgtcgccgtttgccgtcgtttcctcccgcgccggccgaaccccggtgagaactccctctctcttcttcccgcgcgcgccgcc

SEQ ID NO: 7489 - DNA, 7280 bp, Oryza sativa
gatgcaccgtcgcccgcgtcgccggccacagtcgtcttctcgccggccgccgccgtcggaggccgcttgccgccgccgccctcgccctaaccggccggccggcttgaagccgagccgagccaggccgccttcctcctttccccgtgagccgccgcccggtgggccccgcctgccagtacccctccctctccccttgtgccgctgaccagtggggcccgcatgtcggcgccgccccaccccttgctgacgtcagccctggggcaatattgcgcaataaatcgattaagggtttttcttttatagtaaaaacacagagaatcttctaaaaatcataactaattcatccgagctccgattaagtccattcaagtctcagtaaatcaagaaaaatgcaaagaatccattaaaaatggttttgtttcctgtttcagtagtcttatagcatgttttgcttgtgtgctttgtttgtcgcgtaggtttcggccgttccgtcgatccgcagtttctcgaagacgttgctgaggtctcatcagttcgagagcaaggcaagtcatgcaatacaattgatcatattgtacccaatttacaaatatcccgcatttctattaaatattgcattgttttacaatatcatgtgggatgggtcctattactcagctatatgttgtttcccttatgccattgataacttgggtattaaaatgactagatgttggtttaggagatgcttagccatgcttagttcaactagtgcacaaaaggggaccacattaaagcatagacttgattattggcatagctttggtttagtgccaccgtaatggtgttggttaattaaaatacattacatggtgggctgtgggtgcatggttttgctagacgtgcccatggcgattaaggaccggttcgcgggatgccctggaagaacttatcgtacttaccacaagccagcgtgggcaacggctgggcttgtagtgtagcttttctctagccgacgtacccaggcgagggtgggcgtgatggagttgggtcggccggggtgtccggttgatcggcttccggattcaccgcggcacgaaaggggggctgcccgttgcctgctggggacgggggcgaaccctaaggtgtggtgcgatcggttagagggggttatacgaagggtcctgtcacggcctctttccggtatgtcgtggtggcatgtcggcgcacgggaacgtgtcgtggggctgtgtcttgtgggtacagttgtacacctctgatcagagtaaaactattcgaatagccgtgcccgcggttatgggcggtcgaccagattcaccgtgattagtctcacccctagtttagcttaatgaactgattagttcaggtggtggtttgggcctgttgcaacgtggtgtaacgttggacagtgattggttaatatggattaattactacaactgttttactgctttcaactactgctttgaaatgccggctttatgcaaaagaacctttagcctcccttggatatatcttgcatcatacctcctcttccggtatgacttgctgagtacagtgggtagtactcagtcttgctctcttttcccccacaccagagttgaagtccttctcagttgaagatgtctcgaagaggttggtttcgtcgctgccgtcaaggatgcctgtggaatggagtcgcccgctgcaggagtcaagtcttcaggcttagctcgcttttctctttttccgctgcatttgtaatcttttatatttttgtaagacgtggatctgtatgtcaacaattgtcgtttgtgtaccctggctggtcctggacaggggtttaatgcacattcagcttagaaattctggttcgtgaatttctgggcgtgacaagttggtatcagagccgaccttgaccgtaggacaagccaaatggaaaccctaagagccctctgaaaccttttcatctgcatatgctttttgcacttggatttgtttcgggaaaaattttggggttttgcctctttggtttgtgggaaaaatcttggtcgttcattcggatcggatccttaaaattagctcggtctagggttttagaaaaattttatttggagtttatttgacagtcagtggggaatttatcgggtgatatgcattaggtcgtgtctatattcgatggggcaatgttacgcgcatcatttttcatgcatctagtttatgcattaagctatagtttagtcagtcgcattagtgtctttatccgggttcatgaaaaatgttctatgcataaaaatcatcatgcttggctagttgtttgggccatttgttgcttggtttaaatttggatttgagcatgcattgattcctatcccttgtctaccttagaagtcagacatgttcttcgatcgcaagcgccgctccaagcttcagagtcgccgcccttagctttatcgtcttcttagttttgtttgcttgctagtttccgtgcttaggtttgttgcttgtgggttagtcggcggtcgatatcatgtgtgagtggtatgacagcctttattaggagttgtgtgcctctttttcagtgttttaatcaagattaagataattgcacttaatcttataagaaagattagtttccgagccgtctgttttcttcctttctcttatttctacctatcctcctccagatggtgaagacaaggaatgatccccgtgactccaacgacgccagtggcagcgaagagcagaccgatggagctcatgtcagtggtgcatctggcagcagatcatctccaccgcccgaaaacccaacagtcactcaaatgatgacaatgatgatgcaacagatgcagcaacattaccatcagatgttgcagcaggcgcaacagaaccagcagtttggtcctccaccatcacacgtgtccaaactgttagactttcttcgtatccagccacccactttctcaagcaccaccaacccaatggaggccaatgactggctccgtgctattgagaagaagctgaacctactgcaatgcaacgaccaagagaaagttgcttttgctacacaccagttgcaaggtcccgcttctgcctggtgggataactacgtggcgacccgtctagatgcaacggaggttacttgggcagagttttgtcaaagcttcaggaaggcacagattcctgaagggattatggcacaatagaagagagagttccgtgcgctccagcaaggaaccatgtcagttacagagtacttgcatgagttcaaccgccttgcgcgctacgctcctgaggacgtgcgcaccgatgctgagaagcaggagaagtttttgtttgggctcgacgatgaattgaccaaccagctaatctccggagtctatgaggactttgagaagcttgtggacaaggctatccgccaggaagagcaacgcaacaaaatggaccgaaaaagaaaggcagctcagatcagctttcctcaggggaacaatcagaagcctcgcttcatgacgggacagctaggtgggccttccaccctgatcgtctgtcagcaccgtccctatcacccgagtaacttcgacaacgactacaacggtggcagtcacaacaacagtaagcagcacaaccacaactcgactccacccccactaatggcaccagctcagtcagatccgccagctgtgtcagctcagtcagaacaacccaagaagagggctgtaggaaagccaggaccctgcttcaactgtggcaagcacggccactttgctagcaagtgtccgaagctgaatcgcactggacccaggttcatccaggcccacgccaatcatgtgtctgcagtggaagcacaggcagcaccagaggtcgtgttgggcacgtttccagtgaactcatatccagcaacagttctctttgattcaggtgcctcgcattctttcatttccaaaagatttgctgggacacatggattatcggtagtggaacttaaaataccgatgcaggttcatacccctggaaatgatatgaggacagcacactactgcccctcggtgactatagagatcagaagatcaccgtttctatccaacctcatccttctcgaatctaaagacctggatgtcattcttggaatggattggttgaccagaaacaagggagtgattgactgcgcaagccgcaccatcaccctaaccaacgacaaaggggagaagatcaccttccgttccccagcgtcgcagaagtccgtagcgagtctgaatcaggctgctattgagggtcagacagaaacagtggagaaaagtcccaggaagttggaggatattcctatagtacaagagtatcctgaggtgttcccagaagacctcactacaatgccaccgaagagagaaatcgagttccggatcgatttggcacccgggactactccaatttacaagaggccgtacagaatggcagctaatgagctagcagaggtcaagaagcaggttgacgaacagctgcagaaagggtacatccgaccgagtacttcaccttggggtgctccggttatctttgtggagaagaaagacaagaccaagaggatgtgcgtggattatcgcgcccttaatgaggtcacaatcaagaacaaatatccgttgccaagaattgatgacctgtttgatcagctaaaaggagctaaggtgttttccaagatagacctacgatcaggctatcatcagttgagaattcgggaagaggatattcccaagacagccttcaccactcggtatgggttgtttgagtgcacggttatgtcctttggactcaccaatgcaccggctttcttcatgaacttgatgaacaaagtgtttatggagtttcttgacaagtttgtcgtggtattcattgacgacatacttatttattcaaaatcagaagaggaacatgagcaacatcttcgtctggtacttgagaaattgaaggagcaccagttatatgccaagtttagcaagtgtgacttctggttatcggaggtcaaatttctgggtcacgtcatttctgctcaaggcgtggcagtggatccatcaaatgtggaatcagttacaaagtggaccccaccaaagacagtttctcagatccggagttttcttggacttgcgggctattaccgtcggttcatcgaaaatttctctaagattgccaggcccatgacacagttgctaaagaaagataaaaaattcaaatggtcagctgagtgcaaccaaagttttgaagaactcaagaagaagttagtctccgcaccagttctaattctgccagatcagacgaaagacttccaggtctactgtgatgcatctcgccaaggattgggatgtgtgttgatgcaagaaggcagagtggtcgcatatgcttcgcgacagttgcgcccacacgagaccaattatcccactcatgaccttgagttggcagcagtggttcatgctctgaaaatctggcggcactatcttattggcaaccgctgtgaagtttacactgatcataagagcctgaagtacatcttcacccagcccgacttaaatctccggcaacgaagatggctggagttgattaaagattatgacatggggatacactatcatccaggcaaagcaaatgtggtagcagatgctctgagcagaaagagctattgcaatgcagtatgtaccgaaggcatgtgtgacaaattgcagcaagatcttgagcacctaaatttgggcatcgtagaacacgggtacgtagctgccctagaggcccggcctacgctcgtggatcaagtcagagcagctcaagtaaatgatcctgaaatagctgagctgaaaaagaatatgagggttggaaaagctcgagatttccatgaggatgagaatggcacaatctggttgggagaaagattgtgtgtgcctgacgacaaagaactgaaggatctcatactcacagaagctcatcaaactcagtattcaattcatcccggcagtactaaaatgtaccaggacctcaaagagaaattctggtgggtcagcatgagaagagagatagccgaattcgtcgcactctgcgatgtttgtcagcgagtcaaagcagaacatcagaggcccgcaggactgctacaaccccttcagatcccggaatggaaatgggaagaaatcggaatggatttcataacaggtttgcccagaacatcgtcggggcacgattcaatctgggtggtcgtggatcgactcaccaaagttgctcattttattccagtacacactacctatactgggaaaaggttggcagagctttatctttcaagaatcatgtgtttgcatggggtacctaagaagattgtatctgatcgaggaagtcaattcacttcaaagttttggcagaaactgcaagaagaattggggactcgtttgaatttcagcacggcttatcatccacaaacagatggtcagaccgagcgagtaaatcaaatcttgtaagatatgttgagagcttgtgcacttgactttggtggagcctgggataaaagtctaccgtatgcggaattctcttacaacaacagctatcagtccagtttgcaaatggtaccgtttgaagcattgtacggacgaaagtgccgcacaccacttttctgggatcaaacaggtgagcgccaactgtttgggacagaagtgttaaccgaagcagaggagaaagtcaggaccgtcagggaaagactgcgaatcgcccagtctcggcaaaagagttatgctgataaccgccgaagagagcttactttcgaagcaggggattatgtgtacccttcgtgtcactccgcttcggggagtacaccgcttccaaaccaaaggcaagttggcaccacgctttgtgagaccatacaggatcttggaacgcagaggtgaagtcgcttaccagctagagcttccacctaatatggttggtatccacgatgtgtttcatgtgtctcaactgaagaagtgtttgagggtacctgaggaacaagctagctcagagcacattgacatccaagaagatttgacctacgtggagaagccagttcgtatccttgagaccagtgagagaaggaccagaagcaaggtgatcaggttttgcaaagttcaatggagccaccactcagaggaagaggccacctgggaaagagaagatgaattgaaggccgcccatccgcacctcttcgccagctcttccgaatctcggggccgagattccgtttaagggggtaggtttgtcacgccctgaagttcccctcccttgctctaaattcataaaataaatcg

SEQ ID NO: 7490 - DNA, 18373 bp, Oryza sativa
gaacctactacctattatgaagcaatggtgggaccagactctgagaaatggcttggagccatgaaatccgaaatagaatctatgcatgtcaatcaagtttggaacttggttgatccacctgatggtgtaaaagccattgagtgcaaatgggtctttaagaaaaagatagatgtagatggaaatgttcacatctacaaggcacgattggtggcgaaaggtttcagacaaattcaatgtgttgattatgatgaaactttctcgccagtcgccatgctaaaatctattcggattgttttagcgattgttgcctatttcgattatgagatatagcaaattgatgtcaaaacaactttcctcaatggaaatctcgatgaggatgtgtacatgacacaacccaagggttttgttgatccacaatcagctaaaaagatatgcaaattgcagaaatctatttatgggttgaagcaagcatctcagagttggaatattcgttttgacaaagtaggcattgggctttgtcaaaaacgaagaagagccttgtgtatacaagaagattagtgggagcgcactcgtgtttctaatcctatatgtagatgacatattattgattgggaatgatattcctatgcttgaatccgttaagacatcgttgaaaaaatagtttttcaatgaaggacttaggggaagcagcatatattctgggcataaggatctatagagatagatcaaagaggctaattggattaagccagagtacatacattgacaaggtgttgaagaggttcaacatggcattaatcttggcaagaatcaatgtcctcaaacgactgatgagcgaaacaagatgagtgtgattccatatgccttggcaatcggatccatcatgtatgctatgctatgtacacgtccagatttttcatatgcacttagtgcaacaagccgataccaatcagatctaggtgagagtcactggatagctataaagaatatcctgaagtacttgagaagaactaaggatatgttcctagtctatggagaacaggaagagctcgttgtaaatggttacactgatccaagcttccaaaccgacaaagatgattttagatcgcagtttggatttgtggtctgcctgaatggaggcgttgtgagttgaaagagttccaagcaagatacagtggctgattctacaacagaagccgaatacattgccgcttctgaagcaacaaaggaggctgtttcgataaagaaatttgtttctcaactaggtgtgatgactagtgcttctagccctttggacctgtattgcgataatagtggtgccattgcgcaagccaaggagcctagatcacatcaaaagtacaaacacattttacggcggtatcacctcattcgcgagatagtgggtagaggaaatgtgaagatatgcaaaatacatacggatttgaatgttgcagatccgttgacaaagccactccctcagcctaagcatgagacacacactagggcaatgggtgtaagatacattcatgattgactctagtgcaagtggaagactgttagtgacatgccctagagacaatcatagagatgattgtatcacatactatgtttacatatttatctgacattgttccttgaaatagataactccttattggttaatgaatatgtgattctttcatgagactctttatgttgtttgttactatttctaaaggatccctgatcaaatatcatatgtggaacaaatatgtttatatgatcagcacatgtattaattgatgatcatgtctcatggatcatggtatagagataccaaattaataatgtggacacatgatagtgaacatgttgttggatagacccaacatgagacactgcaagagccatatgtgttgtgtcatcagtgatctcatttagtgttggtgttgaatccttagacctgagattatcatggttctcaacatgtgtagtagcttacttaggactgctaaacgctactccgtaattggatagttataaaagtagtttttgggtatgctatgaaacatgtagtgggatatgaataatcaagatgggatttgcgcttcctatggagagatatctctaggcccctcgatgttgtagattatggaaatgcatggccatgccaaaggtgattgaggaatcaatcacaagttatataatctatcaacaggttcgagtggatgattgagctattagaggatggcacatatctagccttgagtttaatcgatatcgtgaggcaaaggggttcgtacaagtatacactagagattcagccgatatgatctttatgtaagcccggtgggtcaatacgttctgctaggggccgttgttgatgcgtggaccaaaaaggagttttcgggttacagcggagtatatatgaacctacagggtcgcatgcttaatgggccggaataaggggattggatagagatgcaatataagcttaattcggatagggatccgaataggagtcctacgggccttggaggcccgagtgatggatcctatatattcgtgaggggtgtgaccggcggaggcattgcatcacgtgagaaaccctagccatcacttccctctccgagcaaaaccctagccgcgcgcgggtgctagcagatctgcgcgtggcgttccgtccctatacgtgtggataccggtagaggcgccgctattttgcggtgctgattggcgtgggagtacggcgaggagaacgcacgaggaggacaaggtcgagccggtgcgatcgactacttcctctacatcgacgcgcgctacttcgcgatagttcctttgacttctcagcgtcttcttccgctggacagcacgtcgagtggtaacgatctatgatctaatacttgcatggttcctggtttacgcgatagaaaattttgatttatgctatcgtagcctacgcgtatcccaacatgaggaggcgcggcccaccactggaagaggcggttgctgcattgcgagggcgttggcggtggcggcaccgggtggtacttgtggagcagcggcgttggtggtgggagcaaggacgacgttatggacaacggaggcggtggcgcagccgcgacaccatcatgtccttcatgtgtcgccgccgcactgtgtagtcctgctccaccttagacgttgtgcaccctatcaacccccgcaaactggtgccactactgccaatgccgacccatgcactacataccgccgacggtgctccccgcatcctcctcccgtgcctcacttgatctacaccgtaactgttgtgggcgtcatcgcacggtgtccctactccgccgctgtcctgactgtccccgttccttcgtcatcgtcgcgcactccacccgctggtcgcgccactgctcgtggcttgcagtgctcactggagaagagagaaaggagggagatagaggatgtgataaggaagaagatctagaggatgaggaacacaaaggatggacaattagtggagtgaagagatttaaaagtaaaaatagaatgggacttctgaaagctgatcagatcaagctttgatctacgtaccttaagtacaaacaggtctatcttctaaatgaagatgtaacatattttcgtatatggttgccatgcaaagaaaggggtctgtgcccaaaccacatattttcctatatagcaaaatatgagtaatattgatctcaatttatttgtttaattacaaattaaataacagttttaaaaattaaaaactggagattttgttcagtacatgatcacttttatacgtacaggagggagggaggtggggatggtcgtacatacgtacaggagtgagggaggtgttggtggaagggatttattttttaaaagatttgatctaataactgaaaatactggatccaccaaattgagtgaaaatcaacgattagatatttttattttcttagaatttttaggatttcctttaatttattagaatgccacttggtgacttaggagcgttcgtaggatgctacgtggtggtgtaggagcgtttgtagaaagtttaatagactaaaaacaattgtttatttatagtagcatcgagaccgctcctgtacatgaacagctagtgattgcacgttcactacccgctaaaactccgtggaaaaacagatctaattatttatggtaacaaattatggtgcatatctttgaactgctttaattaggaaagaaaataagagaatgagggggaggaacgggatagatcgtgcacatggatggagggatttgtacgtacgtacacacgtgtggggccggccaggagagaagggtgaaggggatttagttttgatctaatggttaatattattgggtccacctttttaagtgaaaactgatggttagatgtttttcttttttacagatttttctataaattattagagcgccacatggcggcttaggagcgtttgtagaatgcttcgtggcggtgtaggagcgtttgtaagaagtttaatagacttttagtatataatagaagatagatagatagatagattttgtatatataataaatgaagctcctagtcttgtactaggaaagaggttagagaatatgggttgtgttggggttttatgaagagaaaaggaaagttgggaccattgttgaatcaaagttgattcctttgttcccgagaaggcaaattaattaatcaggttacttgagaagagaacctgattttctacaagaatatcacatggtaagttactttataagataaatcgaagtgtgctaaaatccattatgccttcctgagcagaagaaaagacctgaaatcccatactgatttgtgagttgtgaggaattcattaacgactggatgagaaggcgattctctcattagcatccttaatacatagagcaatgaggttcagaacacacattaacccaaactctgctcacggacacatttcatcacaacattctattgggactttttgccatgtagtctaaaaaatccaagtagctccatggtccttccagatccatccatgccaaatttacaaccacagctcatcaaatatatagcatagtattgttgggggagtgggttcaccctcaaagccaagaggccttatgccccccaccattttcttggtgtgtaggagggagcctccgggaagaatccctttgaaggccttgccacaggtctctctaggtgagctctgggagacctccaggggcaccttcaagaccggtcatccaggctccaggggtgctattggcacaagcaagtagaggagggcagcattgatggcgcattcaaggcaaccaaccacccctgacttcaatggcagtagcaggtgaagcggggccgatgcgcctcggtatcacgcctcgctctcgagccgcacactccgggaatcacaggacccccagcaatgctggtttaatgggtgaaatcccatcctttatcccctaaggttttacctcgctaccctcgagctggaggccacctgccacccttagccaaagggctagctagctccataagggcaccgttgtaatctcccatactgctgtaagggtatataagtataatcctaccccccatgaggggacataatgaatagagaaggatactaccatagactggtggttgaccttaatttgatgaacttggttccaacacatacttaaaattaaattagagtatataagtgccagatggactcaaagcacttaaaccgaaggacaaatccaatagctccaacaacctgtctctaaacaacaagcaaaagcaacaagtagaataatatggaaacaaaagtggtaggtgaagatgaccttgcacatatatagatgccttagagaccactatggcgatggagacaacatgtggtaagacggtcttgccaccaaagagtaaggaacacctgagatagagctagacctagtgctggtggcacttgtactagaaagaccagcgactgtgatgtccgagaaaacacaggagcactagcagccacgttagaattggagatcacttaagcctagctggataatcaactaacttctccagatgaagatagaagcaatcataggaagtatgcccaataacttttggtactgccctgacattgtgagtaatcaataggagtaaatgtagtgtctagggagcaaagacgtgtatcctcagcgattatatatatctacaagaacctctggccatggtaggatgtgcacgtcatccaatcaactggacttgaatggactcaaattgggagggaaattgcatgacaaattggtacagtagattttcctggtcgttctcctctctcgccttgcattgtgcacaacctgaacttggccagacaactgaataaaaccatcataaaattcttcaatggactattcttgttgtttaattaatagccacctatacactcatgaatatttattccataacaggatcaactgcatgttctccatgccttaaccttagttgcatctgttcgatcatcaggaggatcatctgcgagttgacatgcttggccaattaacattcgaagcatataaaccgaaagttcccattcttgaaaatttttaccatttagcttaatgtccatggagagctagcagagatcaacctccaagaaaaggttcgaatgtttccatcaagaaatgcagaggaaaaattgataagttgagtggagtgaagcttggttattgaacttgatgtagtgtctcttggatgaagatgactttgtattgaaaattttgtggagcctctgataagtatatagtatactagtatcattgccagcttaaatcttatgttactataaagttcatgcccactaacatctaaagcttaacacgcaaatatgccacatcaccctcattagcaattattatatagattattttaaatcacatgcaagtgtgccacatcatcacctactaacaattattatctatattattttaaatatcaagcaaacatgacatatcatttacaatttttttatattttaaaacttaatatgaaagcaatgtcaaatcattatttccacatcattttcatattatttaaacatatacattcaccatttctagaatgtatgacatgcatttgacatgcattcatctagacatctcgtagcaaagcgtggggtatcaactagttgattcaaggtgggaatacgaactgaaacgtcaattatatactaacaacgtcggttcacagcgaaccggcagtggtgacccttttggggtagtgatgtttcctaggagatatttaactatttgccactcttacaagtggcaattaagaatttagcactggactcgcatgttatacacacatgaggatccaaatgtcgagtggtaaatccttaattgccacatcttaaaagtggcgaaaagttaaatgccccatttttaaaccctagtattaatgcgcaaacttaatttggtggagcctctaattagttaagataacgaaaaaaataggaaatgctcctgaactaaacatgctgcatcatgttagaataagcgttcactacttaaaagatacacatagaggtcggcactataggtgccggaagtgttaaaattggcacctctagaccttttcccactcagcgggacacctttaagcaactataaatggtggttcaaaagaaaaaccggcccctatactatagaagtttttttaaaaaaaatagaacctttaatatattataggtgtcagttaattaaaaaaacaaaaaaaacaacatctaaaatcgagccgaaccaaacggtgacctcccgtccttatcatctcctcctcctcctcatctatcacgtcattatcctctcatttctcctccaccgcactctcctctctctctctctcgctcttggtccctctctctctctccctcggctctctacccggtgttggcgcgaggaggcaacggcttgcagccgctggaggggaggcggcagcggcaggcagcgacctcgcctccgccaagtcaggctggaagggaggcgacagcggtggcatgcgacggtgggagggaggtggaggcatcgactggtggcgcttcgccagatccgtcgggaggaaaggctgcgacagcagagtgccaccgcgggtgggaggcagaggcagcgacgggcggtggcctctccttcgctagatctattttttagtgattttagtgctcttagtattctagtgttcccatgttcttggatgttcttgattggtttgggtgaaggggagttgctcgatgcttgaattgaatcgagccgatgcatcgagcttgctttttttttattcgtggaacctcaaagtactggttctctagcacctattctcttttcatatcagtgccgacttcaaggtgttggctgaaaaatactgcacctttgtggggttcacaacaatgtcactttctgtagcattggttgtatatactagccctagtttagtacttttcggttacagttggacttgtaattgtaataggtcgtaggagatagagttagagtcggactctataacacggcaaccctttaaataaagagcaaacatcacaatgcaaccatgacaactataatgtagcgtagacacgtatggagaggatgacggcaacgccatggacctgtagcttctaggtgctatattgattgggatgagcgcccataatcaaagccccagagaatatgtttcagctgaacctctcgttaacaaatattgtttgttcaggtgtctccatctgacgtgtcttaggtgatcgatgactgaagtgatcgggaatgttagttgtagttccgctatatcggctaaattttataacacatcattccatctagagcaaactaaatccaaaacgaatgcacatcatatgattcaattgccaaggcaattagcaaagcttggtgcagtgtatgccgagtgaggacagaatggttggaacacgtcacaggaaacaaccatcctactgtactcctctgattctgactcttctattcttcctccaaggctccaccatgacattacagcttgtctaccttccctgaataaccactgtccgaatttctatctacccgaaaccaaatacatagtaggctgcatcatcagtcagtagcttggagcaatgaagatcattgtacacttgtcagttcaactccaactttattttttcctctttaatttgcatcgactttcctgatgcccctcatgccaaaactccaatgcattctctaaccagaacacataatttgtgtttgcaggagttaatatctaaagccgaagtagaacaacaacattggttgttgtaatctcaaagaagttgactgtgatataacttagtgagagcccctgaacacgaagggacataataagataaattgaggcttcaaacttgctatatggatgattacggtttatcaaaagagagagcaatataagtacaaattaagtagttcagcttgttagtttgtattgtacgagtagtttcttttcataatttcaccaaaaatccaatcttgaaataccgaccatatacatgtcctaagatagcatttgtatattcagcctgcttcaactcacctaacgtacattgtttcgttttacatgatttttcattcctattttgtgagcttatgtcggagaaatataataatctcttgtaaaaaaacaatttaattctaaaatgaggaatatgatcatggcaccagtacaaaaccttccatctgtgacggcttctaacatgtctggaattagcgtaccgtcacaaggaagtcatctcaatcgggccaaaaaaaacaccttattgagattggtcgcacagacatgctagatggacgtaaaactaaggcccgtcatggatgacacctatccgtgacgggccataacttagacccgattgagataacattccatatctcaatcggccctcaatttggcacccgccacggatgaccatcatttgtgacgggcaccaacttggagcctgattgagataacaactaggcccgtcacagataactcatccatgacgttctctatactaatgcccgattgagatcacttaatctctatctagttttaactaatatctctatctagttttaactaatgcccgtcaccgatgagtattttttcatttttcatatgacatgtttatatttgtgagttgacttgtagcaaaataattaactgcaatataataatttattttattagtcaataatttttcaggtagtaaataatttcaaatagaaaaattgtcaacaacaaagttgtataacttatcaagatttacaacttttattttggttattttttatataacttttttgaacagtttgaatttgaatttaaaaatatgacaacttcaaacagcattttgaaatactaaatgatttcaaatggaaaaattgttaacaacaaagttctatatcttatcaagatttacaactttcattttggtcagttttctatataaatttttttttgaatagtttgaatttgaacttgaaaatatgacaacttcaaaacaacatttcaaatactaaatgatttcaactaaaaaagttatcaacaacaaagttgtataacccataaaatctgtaactattattttgatcattttctatataacatttttttgaatagtttgaatttgaatttgaaaatatgacgacttcaaacaacatttttaaatactaaatggtttcaaatttacatatctatgttatagtttataaaaccagatgagagatatgtgaattttgtgaacaatgttactatcactttgtcggatgaagaaatgaccaaaataaaagttataggtcttgatgagttatacaactttgttgttgatgacttgcagttgaaatcatttagtatttccaaatgttgtttgaagttgtcatatttttaaattcaaattcaaattgttaaaaaaatgttatatagaaaaatgacaaaaataaaagttatatatcttgataagctatacaactttgttgttgacaatttttccatttgaagtcatttactacccaaaaattatttgaatttcttatattttaaaatttaaattttatatagttcaatcaaactcggatggagaaatgaccaaaataaaattggtagatttcaatgagttctacaactttttcatatgagttaattcggtatcataaaattcaatttgaaattcattttcacctagaagtctgatttgcctcctcttccctctcaaccttatcttctcttctcactcagtcctctctctctctctcaaccttatcttctcttctcactcaatcctgtctctctctctccctctcttcatttgggcgaagagtgggcggtgagccagcgacgcgggcggcgcctcagtgacttcaggcggtggcgccactgccatattctcctcaccgcagccgccgctgccaacgaggaggcgaccagctccatcccccccccccccccgatgtcgatgacaacaaggaggaggcggcatcagcggttgagtgcggctgttctggccatatattttatatttggcttgtcctgaagatcctaccgtaatagatgggttccattggttttctgaaagttcccagctatacttttttcgtaattttctcatttcttacttctactgaaatgagaaaatttaattctagcagcatacatgacggttaagctgatttctctcccatatttgctacaggacatccaaaaaacgtgtaattagagataccgtaaaaatgcgtatttgctgtaggacatcgcaaaaaaatggttattagctcctggacacccgctgcattaatttattatttttggaggaataggagagagaaacggttgtataagtacggttctacccttattcttctctctctcattctttctctctttctctctctgctatttcttcaagtgagcccgagggagagggagagcgctggtgatggcatgggccggtgtagcgccttgactgtggcggcgctgcgcggtcatgcgggagatggtgccagagctagagggcaggttgtgccggcgcagttgggcggcatcggcgcgcaggcaagggcggccgggctcggcggagcgaccacgccaggagctcggctgctccaggccgacttccggaggctggaccggatggcgccggcgccggcgcggcgaggctcaagccgtcgttgcgggcgctcttctcatgtgggatgttcagcacctgcacacacccagcactcagcccaatggcaacgcccaacaacaatgttgtagcggggatgagtgggtctaagggcggatcgagcacgccataaggttggttgtggaggcggcgtcgtcgctggttgtggaggtggcggcagaggtgacggtggatgcagcagcgggcagcggcttcgatgatggtcaacgagcccgacggctgtggtgatggaggcagcggcaagcagcgctgggaagtgggcaacggtgatagtttcgatgacgatcagcgagccggcggcagcggcttcgattgcgacggttggcgagtggcgctgggaagcggctgccagcaatgggggttagatagggctaagggcaattttgtctttttgaaatttctctctcctctttttgataagaaatgataaaatattatctcgggtgtcctatagcaaattatacaaattttgtggtgtccatcaccagcgacacgattttacagtgtctcccagccaattatataatttttggatgtcctagggcaaattttgccttgaaaaaaataggccaaatttgtagtctagcattttggaagacacaaccctccacaacaatttgtgtgtgcatgctttaggggtgtttttgcctcaatatcatatattattaatacgaaggtgcaggtatcatattcgaaaaacataaaagtacaaaagcagcaatccaagaattttcctttggtaaacatggcatttaaaaaccacatcctagcgcataaacaggtgaggtttttacattcaaatttaaattccattaattgacacaaaaatagttcagctgcttccagtattttcagttagaaatatttccacccaaatagcatgagttgtcccaaataccaccgatatatgaaaaatacctggtaattgataacaaatagcatgagttgtccactcttagggaagtactggaagctgaatgtaagaatcttacaagtcagttgaatctagattcagatctgggataatttggatggtcagtcttgagcaattttatggttgttgaggaggtaccaaatttatgatagaaatagtcgtacctcatagtattttctcaaggactttaaaattcctcagcagtcttagctatgattttcctactgatggggcccttactctaaaccgtgtactttgttcacatataattcgctgtcatggaaacttaactagccctgacagccaaaaatcgtcaggaaaatgcataatcacgtaaggaaaatacatcctgacgtggcactgtcagaaaaattccatcagaactgacctatcggctggagcggagctagaacgaaatggagagaagtgacacttgcttaacttactctactttatatcgagtttaagctgatatgggtgcctaaatatatattgagggtgatgcatacaggtgaaaataggtgagttatagctacaaaattttcttaatcgggttcgtgggcaccctcgtcaataccctaactcagctcctgcctatcggcaaaattttaatttgcgtaatgtgtcaccgtcattggtatgttcactgcaaaccattggtgtatttagttcgataagcctagtatgatctttgctttgagttctcaatcgccacaatatttggggctcaaatgtttacttcactatccttcatcactgtgtgccccgttgcatcacctgtgtgtcaattttgtgtttggatgaatattgtacagtagatatacatgattggtttgaatgagaaagcatgtcgtagactagtagttacgttggtttaattgtgtcgattttgtgcaacatttacatccatccaatggaaccaacagcatccacgcgagtttgaactgaaaagcgtcgagttatcccgtttgaatcttctaaggatgaaattaaaagcaaatacgtgaaacgagataaccatttaacgcatgacttaaaaaatagatttatctaatattttaaaacaacttctatatagaatattttcggataaaatacaccgtttagcagtttgaaaaacatgttaacggaaatcgaggaaaaatatgtttctttatgaagtcagaatggggccttagacaaagaactagatagcggactaatttttcattatggacttttctgaggcataagatcagcactacgttttaatttaattagccagctcgacttaattttaaattgtcagtttgaattaactgaaacgtctctcaacttttcatttttaggaatgaagcatttcttgctttgcaccgtgggagattgaattggaccagagtagttcagttttcagaatagtggattggattgaaagcagtatgctagctagatttaactttgcacgctctatgtacatcgtgcagcacgactgtttccctcatttgctaaaatagtacaattctggcaaataattcaaaagccagcaagcaactgattaactaattaaggtttatcaaaggagacgctgaagaagcaacgctaggaaaaatggagcccagagatgacaaattttatcagacaaggagactgatgctgagtagaagagtacaacagattattcgtagaggaagcacgggacaagatgccatagtcaagtgtagtttacttgctttttttttttaaggaatcagcaggagactgtgctatttctttgaatatagaggttaaagaaaatacaacctctgaaggtaaagaaaaaaacatacaaaataataaaggcctatatttagttaggtaaaaactcctgaaacctccttgcacatgctatagcctatgtttttgcctcctcttttattttcgccatcaggctaggtaacacggtctctttgagcctaaaaatatattggttcatttccttccaaatttcccaggcgaaaagtaggattaggattcacagtcctttcttggacgcttcctttatgttggctagtctttcccacccgtcttgaacactgtgacatgggtcccattggttcggattcagtttgtttgagaaactgtcagtgcttcctctgcagcaagcttcttggacaaatcattgatgcagaacgaagcaagacacgagttcaactttccaataggtgaccctcttctgttttgctgattactcccaagccaataccattgggtttatataagaacaaaagaattagtgatctccaaaagtagttttcatatgtacagaaaggtgttgaagaaactagaatcatgggaatgtatatgtgatgctccttttatttttcctacaatgatgtggctatatattcggtatggatgtggacagggctgacaaacaatggaaccatccatgtagcctgcaactttggcactaactataattaatgctaattacttttattatctcttatgaagacatatcacacgaattatttgtagcatttggttaattattctctagctatacacacatattctcatttatacctagaactttatactatgccatccctaattatttgtagtctttgatctcttatgaagccacactatcaaatctatggatggtgtgacctgtgtaaagcagatgaacttatactgtttagtaacaaagtaaatccatttcacacttcatatttactaaaagtccataaaacttcctacaaacgctcctacgctgccatatggcattctacaaatactcctaaaccgcatgtgtcattctacaatccaccgtcgattttcacttaaattggtagatccgttattttagaccgttagattatatccactgggttgtacttcctatcggtactgttcgtttgaaaaaaaaaacaactaacgtacgtatacgatgaaaaaaagctatcaagacaaaaaaaaacattgagatataccgttcacttgaaaaaaaaaggaacctgcccatgtttgctgtaagccccataaaaaaaaactattaaaccctaaaagtaaatatcagtacggtgctaaaaccatcggaaacaaaatagatggcctttttaaattaggattttctatactataacaataaaattcaaatatagtcacgacgcttctacaagccctcttactatttgattggtattcctaggcaattattccttaatcaattatcatatacatttttttctttgccaaattggtttaataacaaattactacagcattaaaaacaacattaatataacatatgcattaaactactcatgatatattttataatttatattttcctatagctaaggaattctaatatgtcgggcatctatctatctatctatcttctatcttctatctatctatctatctattatatactaaaagtccattaaacttcctacgaacgctcctaaaccgccacgtggcgctctacaaacgcccctaagtcgccacatggcactatctaatctcaccgttgattttcacttaaattggtggtcccgttagtctacaccattagattagatctattattaaaaaataataacctcctcatgatctgtacgtatgtgtttgtacgatactactgctgatctttccatacgtacaaacgtaatgtacattatctttcctaatcttgctcgaacccaaaaaaaaacgtacacatgaaaaaaaaagacagaaaaaacatacttccataaaaatcgatggttttaaaaatatgattttagataaaatatattacttcacaaatataaatatatttagttaaataatgatctatataaatatccaatcaatgttctcaaaaccatattctaaatctatctatctatctatctattattatatactaaaagtcaattaaacttcctacaaacgctcctaaaccgccacatggcatgctacaaacgctcataggctgccacttggcattatcaaatctcaccgtcgattttcacttaaattggtggacccgttattttataccattggattatatctattattaaaaaatttcaactttctctgtatatgatttaagagctactactgttgtcatgtacgtacaggtttatacgatgtcttctcccgtacgtacttatgtgcacaaaaacaaaacaatagtttacgtactattcgctggaaagaaaagaaaaaaaccatgcgcatatacataaaaaagacgacaaaaaaatacatcataaaaatcgatgatctttaaataaaatatgattttctaaaatatattacatcacaaatataaatatatatagttaaactaagatctataataataatataaaatatccaaccaatgttccttgaaccatcttctaaattatttttaaattatatatctaatttctgattccgttgttttcctttaattaaattataagttatattgtggtcttaaatatatcacgacacatggggctgatatataatagttagtttttgataatctattatatactaaaaggctattaagcatccttaaaacattctcaaaccgttatatggcattctacaaacactctcatctcaccatgtatcactctagaaaaattatagaaaaaataaaacatctagccatcgattttcactaatatacggtgcacccgtattttctaccctcggatttccttaaagaaaaaaaaaagaaagacccacaccccaccgcttccatccattacgttacgttaggtatatgtacgtagttacgtactccctctgtttcacaatgtaattcattctatcatttctcacattcatattgatgttaatgaatttagacatatatatttatctagattcattaacatcaatatgaatgtgaaaaatgctagaatgacttacattgtgaaacggaggaagtatcatatatccctgccctcaccctaatatataagggcaacatgccctcctattttcaagcattttcttaattaatattggaaaacatactttgtaataaattattttaaacaactatatcatctaaatagctattttttatccgtgcatgggacgagattatttacaataaaatttagaattcaatacctacattaaatatattttaaaagtaaaataaatgtatttctttgggtcatataatgctagagactacctattggtcactcgatatatattaagaaaaatcatatagatttttaaaccatatga

SEQ ID NO: 7491 - DNA, 30367 bp, Oryza sativa
  unsure (1)..(30367): unsure at all n locations
ttacaaattcatcttcattcaataaagtggccgacaggatgagtaaagctatgagtaaagagacttacatttacgagatgagtagcctgattaagcgtttttgcaagcagagatacttcctcgtcttctttctgcttatttattacaatcccttgtggctgcatttcatcgtcccatcatttaaataggataggtgggcgagaatcttcagctgaccggatccgaagagcttcttcttcgtcgccggtcattggacctttacatattcgcggacgatgatgaagcaatcaaataaagtctgtcgagtcaaaatggatttagaagagctgattacctgttatgatttgtagtcaaggacgagcaggtccttgtactttattggatgaactagacttcgggtcggagtcggtatcattttggggagggctgcttgcttgagcctttacttctgggatgtcttcattttgttttgtgcccgactggtttccagtcgggggctcctaatcagcgctggctttagcttcggccgactgatttccagtcagggtatcattgctggcctctacattatcagttgctggttgattactactcgggcgatcttggtcagtcggcccggtttctatcgtaggaccaatctccgtgctagtcagttcaaagtcttttctagaaggatcaatgtcagatggttttctgcagattcaagatatgctatcaacatcatcttaatgatgtgtgtttgacaatatgggagatattgcgagaggacttatacctggatgacttcctgattttgggtattggatgactggatgttttcttcttcgggttggcctgttttggttgtttccagtcgcttctttaccgctagcttttctagcattgtcgccctcatcgtcgctcaagactagtttcctctttcgagagcccgactgttgagtcgactttgggtcgctcggctgagtagtcggctggatctttggtcctccattggcctgaccagtttgtcggcgaggagagcggcgttgagcgagtggaggatcagatttcatcagagaaaattcctatgcaagataatttaagctctcagccgataatacaaaggataaaaggatatcttgagaaaggccggattatttgatacataccggtggaggagggttgaaggcgttatatggtaccactggcagaaggtgtgagtagctaaccacgatagcatttgagaagattttatacattctctccttcataatcctgaactcaagagattctagatcttcacgattagggtcatttttgccatcaaactcgaaggcagtgtgggatctctccttaataggcgccagtcggctcttgatgaagtgtcgagtaatctgttccccttgcagaccttgctcttcgattttagcatgcgttccatcagagtaagcgcttgagcagcttcatctcccattggaagcgagttccaggtttcttgaaatgtcggaggaaggcaggaatactcgggaagcgctggctcaggattttgcacataaaaccaatttgcatgccatcctttgtttgaggttttgaaaggcatggagaagtatttctggcctaaggatccccttaactgaaaacctgccccaccaacgacgcacggcttgctcttgtttggttggggtttcaagaagaagatgcggcggaataaggcaaaatgaggcataatccctagaaaagcttcgcaaacatggataaaattggcaatatggactatggaattggggtttaggtgatgcaagctaatcccgtaaacctccaaaattccccggaagaatcttgaggttgggagagagaaaccaccatagaagaaatgagagaacactacgacctcgtgtgtgtctggggtcggaaatgcttcgccgcatgccggacaccactagatgatctctttcgctggaagaacaccatgcgccaccatctccttcaagttttcctccgttacatcggagggcgcccactgactttcgaagctttctctctcctcagccatgagtgcgagttggatgatgcgatttgatttggaaatggctaggaatggaggggaggttgatgcagtggttgcgcggaagatttttgtgggagatgtgaagttccggcgaggtggattgggatggatttgcgaaccctagctatcgccggtgtggttttgcactgtagcagggaatggggaaagtggcggaggtttcggcggggaagacgaaacggcgctttgctttagcgtatgtttcgctagggtatcaggaggtactaatgggcctgggcctaaacagtactttcagcccaattttattatcagcgtggctggttgtgatccttagggacttaggcatttgtttttgctttggcaacacttgctcacgacagaatagcccgatgctgttaaaatcctttttggcgcagttagataattctttggaattactacaatgcaaataaaaagatgcccaacagaaaagtgttatactaattttgtaggcctttttagactgcaaagctattcgggtcttcttgagatgactgattttaaatgttcattctctcggcatgttatatgcttgctttggtaatggcgtgagtcatggcttaggctattgagactcgtcattcgtcatgctttataccacatttgatggatcttttagagagattttactcggatttttatcatgtgtgttgatttatagacctttagagtgtttctcactcgggttttctttatacttctttggcacattaaagcagtcggtgggaggtttatcagatgccgcatatgcttagccatataatcccttgggagatttggttggaaaaccactcggatggatgtttggatgcactttgacatatgtttagtttttatttaactaatcacatagtcggggctacacctaattaactaatcacctgattttttctatttttcagcccttcacagtctttgattttactactcgggagaccaagactgaggaagctgaagcactcggattgtcgttttggattgcgagagaagattatttcgtcgactgtaaaggtctcaggggctactgtggagattatggataccccagacccacacggcatgtgtatccgactgggtatgggatgccatgtatagatagaatatctttaaagggactcgggttaaattctaaacttgtatgacaaggaaatacccgggatcctagtcgtttacgattgtatccaatctgtaactaccaattccgttagagatatgggctttattttgtaatacggaccccttcccttatataaggaggggtccgggtgcctcaaggggcacgattttgctcccagatcatacgatcaataatacactcgacggatcaatcgttgtacaggagtagggtattacttcttattaagaaggtctgaacctgtataaaatttcttgtctctaaacccatccacttttctagcttgatagccactccttttagtattgccgaaatcttgtttcgacaccgttcaaccttcctaaagatatctgagttgggcagtagcgacgttaatgtcctaggggaaatcgttttgtgcctgtgatatgtaatggaagctagtgtccctagcgcaaacatggatgtttagtttctgctgttatgtgttttttttttctgttttttctgtatcagactatgtttctgttctgggcctgtgtttcagactgggtgagtaaaattacctgctgtcaaaaaaaaaatccatctgcagactccactgaaaacgttaatccacatgttgccagtatcccacacaaatgagttactctgtgttcacagagaggatgtccttatagtgtaatatatggtttggcatgcaaaatatttggtcatgtggacattcagtgggataacatagtatttatgtattgtggtctgtgtagatctttgagtccatgtagctaataagatgctacatcttgttcacaatactttcccatgtgtgtacaacttatgcttgtggcttgtcggctaccaggaaattttaatgcaaaattcactttcttcgaagtattgtgtgtcacctctcgcagtccctgtgtggtatatatgggggatcataaaatttcttatgtcagatctgtggatggaattctttataaggaacaacgatgttagttttgataaagtctctctactaacaactactagcatgtgaatgaagaccggcccttactttcctgcccgggaaaagccattcagaaaagcaagtatctcttctttatgtgcattctttctttagtaccttgtgtaagacactatatacactccttgtacaagtgaaattatattaggttatgggcagtcataatcagttctggtatataagaatctcgagaaaatattttcctagttcatggtcattgtaagcattcctttctctatgcatgagcctcttttcaactttctctttcctaggagatggaatttagggttggaagacatctggaatggaagtaaaaccatatgtggacgaggggatggatggatacatctatattggatcagcaaggggtagtgatggagcatgcctaaaaaaaattggtgggtcaggcatggcgcaacagtcaatggtgttcctaaattcatgctagttggtacaccgtacaccaggtagcacgagtatttctaaatgttttaggctataggtcgtagcatgtgtattcctaattgttttaagctatataattatagtattacttgatattcgaagtactagtatataccttacccccggtaatttttgttataggttcgtcattggtggaagtgtgcagctagcgctaggggctaaattcctcgttgcgatggtgggcggctcagtggttgcgttgatcgttgagctatttgagttggaggctcttgagataggcagagcatctgtagtatatcatgcatgcatcggtactaaaggtgggacccatgtcagatatagcacctcgtgagaactgatgcgatgtataaagttggcaaaggtacttattgtgggtcccacatagattaaaataagataaagaaaacccatcatctctctcatacatgcagaccaaagacacaatttgactgatgcgtgggccctgtcatatgctctttctagtagaatcgggttctatgactagtacccagctcttgcttgagaccggctaaaaaacatatcataatgtgtggatgcggctgtatccttttctctctcttctagtgcctcctctaagtgaaacactgtgtatgctctcaggagcctgtcgatggtatcacactacaacatcaagccattaattcaatgtgatgctcaccaagaactagctaggaagccctctttctctcagatacagggtttcccaaaccgccggggccggggttaccgcgccccggcggtaagcacggttaccgcactgtaaccgtgaaaaccgtacaaaaccgtgcaaaatttatcaaaaattcaaattattttttaaatttatttgaatttaaggaggttaccgcggtatttatattactgtaccccgcggtaagcatggtaagcatggtaaccgcacggttgccggcagtaacgtaaaccctgcacggttgccggcagtaacgtaaaccctgctcagatataggaatttatgtgtagccactgcacaaataccacttaatttgaaacttaattggcaatagtttcagcaagtgattgaatttagctcatgggagatggcatgtctaaggtttcgttaagtatcaataactgatagatcaatgagattaggtgccatgattgaatttcagtaaatcgccaggaaagatgcacgcatgaacagaccatcgttcacttggttatgttgcaactagacaatagagcaaaacacaccggggtggggggttaagaacattacgttcacaacttcacatattgaagcttcatttcacggatgataaattacctttctcaactatttaaattgatgggatgaatcgacaaatgggatatatactaatactttgttctccctgtgattattcactggataaataatttagttggcttttaggaaaatttgtagaaccgcactagtcaatgctagctaaactatgatcttaagaacctttacatttttctaccgattcataagtgggcaccacaacaccagaattacatttatctaaaaacaactatatatactattccccgtgcaaaaaaataaaaaactatactatttatcacagcatcactgcagcacatgatgtggtaggcccaggactaccctagaatttggcctagagaagaccaggtattcatttttcttggcccatgaaaaaagcctggtccaacaaataaaaaaaaccgtaattctctctctcccgtgcactctcccctcccagcctccactccctcccaacagacaagcaacggcgacggcgctcccacgacctgcatggctggcgcgactccggcgctcccgccgtcctgcgaggcccctatgcgcgccgccactcctcccgtccgtccggctcccactaggcgctcgcgcccagccgtggcgcccggcggcgccgctaccttcgcgtgccacactggcgccggcgcggccgcgccctctccacgactccgcgtctccggctcttcgcccctggccagctggccacaccctctctgtcccgcgttcagccgtcacccactcgcccggcctcctgggctcccggctgaccagctcctggcctcccggctcccgcggtctcggtgtccggcccgacaacgctagtgcccagccacccaagccggcaggccccagccgccgtccgcccgtccggccagtgctagtgcactagtgcgccactccctctccggactccggtgaccaattcctcagtccctcactccctctcggcctctcccccttctagaatctagagttctagtagtagtagaccagttgatgacaattttgcatggtttgatggttgtcaggagattgaggcatggagaagtcaagcattgcgttgctttttcagaagcatgaagcaaaaaaagttgcatcttgtgatataccaatcccatatatggatgaagggtcgtctgttcgtgctgtagatgatgctctaattgatgaagacgtaaacgttgttgacgaaaggtcatgtgaagaacaagaacacctccacctccaaatgttcttcatttaggtaagattcaaacttatttgttattttctacttgtattgaaccatttagaattgaaccatttagagttatatactgtaccatttaccacattttatatcgaatcatatcatattgcattcggaattttttttttttgctaggcctaccctgagttcaaatcctgggtccactgagcacatcagtttctttcctatcacgtgagattcatctttgataccctcttaatggcattactgcacaccatagctatctactccctccgtccctaaatatttaacgccgttgatttttctccgtccctaaatatttaacgccgttgtttttcctccgtccctaaatatttaacgccgttgatttttttaaacatgtttgaccgttcgtcttattcaaaaattgttgtgaaatatgtaaaactacatgtatacaatgaatcaaataataggaaaagaatcaataattacttaaattttttaaataagacgaacggtcacatatgttttaaaaagtcaacggcgtcaaatatttagggacggcaggggtatttctttggtccatttatcatcttctttgtacactcatttataatggacaacttgctagcatgaacagtacttgctagcatgatggaaatactgaaaatcggttttaattaatagattgacagctcactccatgacaaacacttgtactatatatagattctcctggagtgagtttggtgtctcggctcgtcttctcttcccttgatactcacgcacctcttttctcgatccacctttttctttcttcacttcatcaccaaactctaaatacgaagggaacacatttttcctggttgctagagttacaattttggactgggagatgtcaggaatagccggatagacactgaagctatattatgtacatcctctggaagccaaatgtcaataggatgatgtgttgtcatctgttctgtaacagtatgtcgaagtgatggaggagattgtgatgtgtccatcactgctcacctagtacatgtgctaggccggaagtggttttcaattgccacgtataccaaaaatttgcccaaaagtcgcatttcagtgtacgaccttcacaaaaaaaatccccaaacatgcacaaacaaatagctctggaggtctttatcttccaaaacatttacactgtataaactgaattttagcttaacttttttggttttttgtaaaactatgaaaaaagcccgtgtacatgcgagagcatattatttaatgttttataattgtaattactccaaatatgtgaatatttaattttgggaaactttttaaatgaaatattgtttaagtctatttcaaacttatcattatgtttgggaatttctgaagtttgttttgattttattataaggatcataataatgcataggctctaaactaaaatttttcgaacctttgaaagctttgttaaatactataatcaaatagataatccacaccaaaggtccgctcatgtatgtcaaaaggccggttggagccggattttcaacaagttaagatggcatgaggtccaatgccataatttatttagcactgaaacaaatacttctttattgaaattacttaaaatagataaaatatataattttttttacgtgcctcaatccttttctgccactgtaacccacccttgtttacttgcatgcttctaattttatatcacaatgctatgatctatatcgtcaatttttttattatttttcactgacatgcaaaagatcaggacatgacctggaataactttttttgatcataagggatatagtgatgtaagtgggtaaaatgatttaaaatttataattgtttaatcgctcccgcccttatcgtcatcgttggccgaggacgctgctctcgtcttcgacgtcggcggtggcccgccgccggatccgctctcccctctggctgcaccgccgccaacacccctcccctccgtcggatctggggagggaaggaaggggagcctccaccaccggggagccgcgggggagggcggccagccgccgcccgctggatcccgcgcctccaccaccgccacgtggaggaggccaacgcgcgccaccatcgggaggagaggagaggagagaggagtaaggagaggaggcaccgcgcggagagacatgagtgaggagaaaaagagatagagaggagacgagagaaagaggggaaaatttaaagtgggtaagagggaaaagagggagtgtgtatttttgcgtgcgactctcttgataagtccgcacgcgataaaatcgaccacacgaaaaaatcgatttttctatgcggtcctcttaaatggtccgcatgcaaaaatgagcctatttttccagacgcgaccaattatggcccatctgcaatctaaatgggtccctgtacaggaaaatcattttttagtagtgtcatttttggatgcaaccaagttcaataattctcctctagcatccattccacgagtgtataaatatatctctagaacaacattggcatacttagaccacaattcatcgaatatgtgccccctgtagaacaaagggcattttgcaaaatctgtttgtcgaaacatgatttcggcaataataaaacggggtagcgcacgagacctaaaagtggatggatgtggagacaaaggatttagacaggttcaggccctctcaatgagaggtaataccctactcctgtttggggatttgaatccgccggatgtgtattgatctgacgattaggttgtctcatgccccctagagggcctcctgcccaccttatataggatggggggcaggattacaagatagaaaccttaaccaatacggtatcggtttcctaaatctattttacaatattatcaaaccaggactttaggctgttccgtaatatataaggaaacgtaatacccaagtcatgatctgttacatattccatacatataagttatcccctataactagtcggataaccatgccgtgtgggtatggggtacccataatctccacagtagcccctgagaccttcacagtcgaaaagataatcttctctcgaactagattactccaaagccgagtgcttcaatcatcttcgccatgatctcccgagtactttttccaagtcagaagactgtggagggctgaaaaataaagtcaggtgcatcgactagatgcacctaataggtgtagccctcgactatgcggttaagtaaacaaaccaagcatatagtcaaggaataaataatccaaccaaccgagtggcttccataattatagttaaccaagcgacttgatattaatatgtagcatatgcggtgtaaatccctgaataacatgatccgagtgatataccgaccgctttgtaaaatatgatgagtgtaacctaaagttggctacattattgaaaattcacatagcaaaacagctataaaaaagcttgtatgttgtgaataaagaaatttccaaagtattgggcatacgccatgcgcacactgctttaacagatgtgcttaagtccctagaagacacatggttccaccacacctggaaatatatggcatatgtggtataaaatccgagtaaataaactcataaaggatttaccaaccgcctgaaagatgaccacaatatataatcagcctaagccataatattggtcaataaaaatgcacacttacgtggcaaaaagcaacgatattgtatccaatcaattgcttaaaaacccaaacagcaccttgacttatatataaaaaagtcagcgggacagctatataaagctttactgtttgacaccttttaagatgcattgtaccaactcctaaaaagttaagtaactgcggtataaaaggattttaaggtattgggcacttgatcacgcgcactttggcctaagcaaaaagtgcctaagtccctaaaagaacgtgacaggccacacctgaaaatatgggctgcagacatattaggcctaggccaaaaaatatgccttcgacaccctttaaaggatgacgcatgtaacatgctcccgagtaataaatcttccgggtaatatagaccaagtgtagctcatatgaatagcttctgatctgaatgattatcccttatgggatactccaaaataaatataataattgaatcccgactggcgcaagtattcggttgatagcccttacggagaataataattggtccagtctttgagcatagaaaataaactcatgactatgaatccatgtggaatgtatccggaacaagtccaaattggagatataatcctcacgcttgagttgatgagcccctgagcatatagcttgtccttctgtcatagtcaaaattgtctattggcaatagctgacgcagtcggcatggagatgaaatgaccaacatgaagacgaaattgctcatcagaagtaacggaagatgtcagtggtagtaaagatgccaccaatcaaatgtaatgaagttgtataaccatggaggcgaagaaaccagtcagcaacagtcaggtcagctagcagtgaagatgtaggcgcccaacaacaacgaaagaacagtcggtggtgacaaaagcaaaccgacgatgaagacgtagacgcgcatcaacggtgatggcgaaatccaccaatcatgaagatgaagaaaataatcggcggcgacaaacgcatccgacggtaatgatgattagcggcaacagagatagccgactatgatgacgaagtttcccatcaacggcagcagagtaggctatgttgatgaggcttgacaagatgttgatgaagatgacgatgtcggtgatccagtcaatagcgatgtagcagccgatgataacgatgagatcctctatcggcagttgcgtagtaggccaaccgtgaagacaaataattggaggagagttgatgttgttgcccaactcgtctaaaccgaaatatttgaagttgttgaagtagaatgtctgttccgaagcaaagatgaagataatgactcctggagttgactcattggctgattaattgatttcttcagcttgacataaaatttgtcaaattttgagccttatatttgtgtagcccccgactctttggttagttgggaaacaactgaacatagagtcgagaattatagcttcttgtcgtcgaatagtcattacttgattgaagatatgtgttgaagatgtccaggtagaaattctgaatattggagagccacttgttgtagtaaaataacatggcattgcatgccgagatgtcgaggttcacaaagacgtcgtggttggtgaagtagcaaaacttgtgaagtagcagcaatagagtttgctggtaccgaagataataaagatgaagtcgctccaccatgatgacaaagttgtgttgtcgtgatgaagtgaacacgagtcggcggcaacagaagcaaaccggtagtgaagacgcgcagttgtgaagataaaagcaccagtcggcggcggcataaccagtcggcaacggaagacgatgatgtccatcagtagtggtagctgtctaaaccagacgtagaggtgagggcactagtcagcagcagatgtagacagcttgcgttgaagatgatgatgcttattagcagtgatggtgatgtagccagccgtgaagaagatagcatcagttggcgtcataacaggccagccgtgcaggcggtgacaccagtcggcggcggacgaggcagccggtcggtgaaagcgtagacgcccaacaacggcagcataataggccagccgtgcaggcggaaacaccagtcggcggcggacgaggcggccggtcggcgaagacgtagacgcccaacaacagcggcataataggccagccgtgcaggcggaaacaccagtcggcggcggtcgaggcggccggtcggtgaagacgtagacgcccaacaacggcggcataataagtcagccgtgcaggcggtgacaccagtcggcggcggacgaggcagccggtcggtgaaagcgtagacgcccaacaacggcagcataataggccagccgtgcaggcggaaacaccagtcggcggcggacgaggcggccggtcggtgaagacgtagacgcccaacaacagcggcataataggccagccgtgcaggcggtaacaccagtcggcggcggacgaggcagccggtcggtgaagacgtagacgcccaacaacagcggcataataggccagccgtgcaggcggaaacaccagtcggcggcggcgaaggcaagccggtcggtgaagacgtagacgcccaacaacggcggcataataagtcagccgtgcaggcggaagcaccagtcggcggcggacgaggcggccggtcggtgaagacgtagacgcccaacaacggcggcataataggccagccgtgcaggcggaaacacctgtcggcggcggtcgaggcggccggtggtgatgttctgactgatccattcctggagcgtaagagataagcttaaagccatgaatcccttttatgcatatctggatctggatcctgcagaacaaacatataggatgagtagtatctgatataaatataatactcgagaaaaaatcaagtattttaaaatatttataaatatgtatttctcctcttgtcaattttgatttccccgagcagatgactctgtacgtttaaacactctgcccgactagtcataaccaccaagcatcgggagtcggcctaggcacttcccaaacatgcatatgagtgatatgagttcgtcattaatggaacaaagtttcacggattagaatttactactcaggtacttttgcaattattaagagcagaaaataaattatcttatctctatgcttttgatttattccgaataatacttagcaccttgcgttattcggtccatccaacgagcccccgggtgctaggaatcggcccaaaggcaaccatccattggcaaaccgaacggaaagcataggaagatagaactccataactcgataggtacttttgtactcagattatgtcgcaagcaatcaagataaatattatgaaaaatatgatataacatctgtagcccccgactcactactcaatggaagaccaattggtgtagtgaggcagaggaaaaggaaaaatatcatataaagaataaaataaatgatgacttagctttgtaatattccccttggtgatggcagaagtggccaatgtgggaacaaagtcgtccatcaataacaatgaagacaccagtcggcggcgacgaaggcggtcgacggtgaaagcgaagatgcccactaacggcggcataataggccagccgtgtaagcggaaacaccagtcgacggcaacgaaggtgagccaacggtgaagatgtagacatccaacaacggcggacgaggcggccggtcggtgaagacgtagacgcccaacaacggcagcataataggccagccgtgcaggcggaagcactagtcggcggcggacgaggcggccggtcggtgaagacgtagacgcccaacaacggcggcataaaggccagccgtgcaggcggaaacaccagtcggcagcggcgaaggcaagccggtcggtgaagacgtagacgcccaacaacggcggcataaaggccagccgtgcaggcggaaacaccagtcggcagcggcgaaggcaagccggtcggtgaagacgtagacgcccaacaacggcggcataaaggccagccgtgcaggcggaaacaccagtcggcggcggcgaaggcaagccggtcggtgaagacgtagacgcccaacaacggcagcataataggccagccgtgcaggcggaagcaccagtcggcggcggacgaggcggccggtcggtgaagacatggacgcccaacaacggtggcgtaaaggccagccgtataggcgatgacaccagtcggcggcgacggaggcaggccggcggtgtagatgacgatgcccatcaacggtggtgtgaccaaccgaccgtataggcgaggacaccagtcggcggcgacggaggcgggccggcggtgaagtcgtggacgcccaacagcggcggcataataggccagccgtgtaggcggaggcaccactcggcggcaacgaaggcaggccggtggtgaagtcgtggacgcccaacagcggcggcataataggccagccgtgtaggcggaggcaccagtcggcggcggacgaaggccagccggtcggtgaagacatggacgcccatgaacggtggtgtgaccgaccaaccgtataggcgatgacaccagtcggcggcgacggaggcaggccggcggtgtagatgatgatgcccatcaacggtggtgtgaccaaccgaccgtataggcgaggacgccagtcggcggcgacggaggcaggccggcggtgtagatgacgatgcccatcaacggtggtgtgaccaaccgaccgtataggcgaggacaccagtcggcggcgacggaggcggccggcggtacatgtataaaataatagatcaaataataattagtgatctgtgaattaattctaatttatataagaaaatttagaacgataaaccagatccagatagaatttttggcgacgaagaccctgcccttttgttgagaggatcacggccaaagacaagagtagcaccgatgatgccggcacagagttccatcgcacttctcgacggaaaactcgacgcaacccctacctggcgcgccaactgtcgaaacatgatttcggcaataataaaacggggtagcgcacgagacctaaaagtggatggatgtggagacaaaggatttagacaggttcaggccctctcaatgagaggtaataccctactcctgtttggggatttgaatccgccggatgtgtattgatctgacgattaggttgtctcatgccccctagagggcctcctgcccaccttatataggatggggggcaggattacaagatagaaaccttaaccaatacggtatcggtttcctaaatctattttacaatattatcaaaccaggactttaggctgttccgtaatatataaggaaacataatacccaagtcatgatctgttacatattccatacatataagttatcccctataactagtcggataaccatgccgtgtgggtatggggtacccataatctccacactgtttatcatttatcaacggagcctagcttccatattcaacaggttgattgcttgcatgcatggtacattctttgaagcctcaacttagccaatggaaggtattgggaagattcaggagacattgcgccgtatggtagtttcatggctaaagaacaaagtttctgacgatccatcggcctgctttctgtcataaattcaactatattatggacaggaagtatggaagggcttaccaaaggcatgcaaatatgaaaaaggaagcggcagcgggtggttgcgggtatacattcctagtctttacaatagctatttcctagtttagctttagaccgagttctggtctagtttaactttacactacagaattagcacttttcttgtttaggaattagcctgaccagttttgtactagcagagtcaatcaatcaacaaaatttaaaggcttagcaagacaagtatcctagccaatcaataaagtttgttagagggtgcaaggttctatcgttctctagattcgttttgaccatctgcagccaaatatattaaacaactatatagcatccctgccttaccatgttcgattcagttatcaattttgagtgtgctttagtcagagaaattaagcacatccaagtctcttgcagaagaacattacgttcacaacttcacacattcaagcttcatttcacggatgataaattacctttctcaactatttaaattgatgggatgaatcgacaaatgggatactaatactctggactttcactggataaataatttagtttgcttttaggaaaatttgtagcactgcactggtcagtgctagctaaactatgatcttaagaactttacaatttttctaccgattcataagtgtgcaccacacagcaccagaattacatttgtctaaaaacaactatactattacccgcccccaaaaaaaaactatactatttatcgcagcaccagtgcagcatatatatcagtttctttcctaccacgtctgagatttgttcttgactacagattcatctttgataccctcttaatgttattactgtaccatagctatatatttctttgcttccaatatttatcatcttctttagtccgagtttatttcttataatgtacaacttcctccactacaccggaccaggtcatctgtgacgggtccaaaccctcacttttgacaggtttatcccttggtcacaaattagtggtcactgatgacttaacctcacctgtgaaggttgaaggtccgtcagtggtgagagacacctgtgacgggttacaattagcaaaccattagtggtgagagatatttctaacgagttataattagaacccgtgacagattatgccacctcaaacgagttaaagcagtcaacccgtcacaggtgtgaaaaatcaaccaaaaaaaaacctcgctgcaacaatgatttacagatccacgctgaataatccagaacattttagactacatttctgatccaagaacttacaaggatgatgttacaatgaacataaaaacaaactagtgcaacactgcaaactacttgagaactacaatgtacaccaccttcaagaaaaacaaaacacatcatgtggcttcaacaaacaaatcagtggcaacacatcagtcatccacccctgcgattaatctccagtggcaacacataatgcggcttcaacaagaacacacccggattaaaaacttggcaccgataacttgcaatatctaaaatcaaatcacaagaatacaaaacacatacaaacacatgctcgaagatggaggaggcggcaaggaccggtgctcacaggaggaggtggacactgtagcagccgccgctcggggatgaaggaggcggctagcccttggaggtggctgctcggtgatggaagaggagccggatccggtttcccccgacctggatctggcatcccctaactcgcccttggaggaggcggctagcccttggaggagccggatcaggtgatggaggaggtggctagcccttggaggagccggatctggtgttggagaggctggatttggcatcccctatctcgccgacgttcctgccgggcctcggcttgccgatggacttgacgaggtggctgcagcggccgccggtcctgcctgaactgcctgacgaggtggctgcagtggtcaccggatctcgcccttcctcggccaccggatctcgccacgccgacactcagggatgggacgccgacgcccggccacatctagccacatctggccggcgcccggcggcatctagccgcatcagcgcccgacggcatctggccgcccggccgaggaagaagggagaaagagagaagggcggaagaagaagggagagcacgggtggaggtggaagaagaagggaggcagaagaaaaaaggataagaccaatgggcgtgggttcggagcagggaggaggttatgacggcgatttttttaatcatctttgacgggcagacaaatatttggcccgtcacaggtgactttacctcacctttgacgggttccgcttttggcccgtcacaggtgactagttacctgtgacgggccatatatttctagcccgtcagaggtgactttacctcagttttgacgggttccatttttgacccgtcacaagtgacattacctgtgacgggtcgccgccggatggctcaccgatgatggcatctcatgatggcatctcataggatccgtcaaaggtgaccctcatcactaaccaacacttatgcccgtcacatatgtgccgtcacaagtgtgaggatctggcgtagtgctctctctttaattgacctatgctttcccacagacaaataaacagtacttgctagcatgaggggaatactgaaaatcggttctaattaatagattgatagctaagtgcatggcaaacacttgtatatatagtttctcccggagtttggagtctcgactcgccttctcttccctttatattgatgcacctcttttctcaatccgcgtttttctttcttcactacttcatcaccaaactctaaatacgaaggaaatacatttttcctgcaggttgctagagttacaatttaggactgggagatgtcaggaatagacactgcaggattttgtgtcatgtaacaatatgtcgaaggcattgaaagttgtgatgctttcatgactgctcacctaattcgttggttccattacaagtaagtggcatgttcggctgctttgtaccgtcgttgcgctgccacagccagaagaaacaacacactgttcttgttggctacagcacagcaaaaataagagcagccgaccagagccaagaatgaagatccatgtagaaaaagaagtacaatggcatgctggaacagaaaacgactgtaaccaagcactcataacccaacctaaattaaaaaaaaaattgccgccagaaattcttattagtgctagttctagccacgattcggcaatggtaagtgcctcatgtaacgttccgcttttcgtgagtcgttaaaaactaattcggcaaaatcctatatgtgaaaatttcgttctttgtgtgagagtataagttgtgccaagatctcaattcaaatctccattgttgttccctctcgtcgccatcaaaatcctccacctcaagattccaattccaattcaatttattccaaaggtcaatcgcctcctttgaatcatcgccaaatacttgtcccgattccacaaatatccgagtccaccttaaatccattccttgattcctccctgaaccctcgagttcggatatcgaatttgaatccaaatccaaactccaattctctccaattcaatttctctgccaaagtctgatttatctccctctggctcgttgggccgattcttcctcccttggcccatctcctccctcagcctcgcacatgcgttgcacgcgccgagcggagccgagagagagctctctcgccctcttgtttttctctctctctcccgtctccgttctctctctcttttctctctggcgccgatttcttgctgccgccatccgaacctccaccgccttcgtcactccggcgccaaatcccccgcccatcgccattcaattttcgccgccgcccatcggtttcccccccccccgccccccgcgcgcgcgctcgcgcatggtcagccgctcggtcgccgccgcgtcagccctgacgccgcccgtgaccgcgcgccgcccagccccgtctgcacgcgtgcgtccaagagacgaaggcagagcctcgctctcacgcgctctcccttctctctcagctcgcccaaaatcggcaaggagccgagctcctttctccctccccctttttgctttttcccttccatcgccaccgtcacctcctctgccgcccgtgagcgccagccgcgcccttgacagccagctgcccccttgaccgcctctcccgagtcgattccttcccatcgaagctcctcactcgccacctataaaatccgcactcccctcccatacctctcgctccctctcctccatcacaccatttccgcctcgccgtttgtcgtcgtcctcgccctcctcttccatcgtgcgtgccggggagctagcgagcacgaggagtcgacgaggagctccgcgccgccccatcctcgcgcctccctcactcttctttcccggccgcacgctctcggtgccgcgccgtccctggagcgccgcctccacgaaagccggacacgccccgccgccggctctcccttctcaccaccaccgccaacgccgttttctctcgccggtgatctccccaccgtacccatccctcctaccacacgctgtgccgcacccgccgccgctcgcctaggctcgccggccatcttgctctgtcctggaggccgcctctcgtcgtcgacctctctcggtgtccctccgctccatctgaggttgggaatgcattccctcggtcccggtggtgctcccgccgcccggaatcgagccctcgtcgagcgccgccactttccctctttcctcgccgccgtcgtctcccctcttgtcaattcctcgtgccaccaccctccttgagcctccttgactctccccgaaccgccgccacagccgctggccttctcctttgcttccgcgccgtgctgcctattcctccgccgccgcgcaaagtcgcgtgccgccgtcggccctcctctcattgattcccggcgccgccaccatccccgagccccctcaaacctccctggcgcgctgttgctgccgctcgcctcgccggccgcgcccgcgccgtgccacccatcccgccgtcgcacggccgccgtcgccagccgccgtcgcgccgcctctccatcatccaagctggtggatggaaccgcctcgaccccctctcgcttccagtgtctacgcctcactccggttcgccgccgttcgccggcgcctctcggccgccgcgagccgttggatcccggctccctttcctccatccaacgtggctgcccgcatggcgttgaccgggcccgccccgcccagtcagccggtcagccgcctcctttctctccccagctcatgggctcggcccactagccgtccccccctcggccttttgagacaaagtgagttcatatgttgtccctccttgccgagcctaacacacatgcaacaagtccatatttcctcccaccatcaaatccgctcccctacacaaaagtccatctttcccccttgttggtcccacatgtcaatgagagattaaagaatattcttgggaatattcttatccacaaattcaataaataatttcatatactccaaattccataaatcctttttctttgttccataaatcaattccttattccaaaatttccataaactatttcctttggtcccgcacgtaagtgacggtcaataatattcttgagaatattatttttataaatttcataagccaatttccccttgttccacaaatatcttccttcgcccagaaattccaattaaacttccaaaattcaatatcttctcaaccgttcatctgattgactccgttccgcttccagtaattccataaaattgagatctatttaatggcactattaattagtctaaataggatttttctttgggtccttgtttaggtttttgattgtttgcgtatagtcgcggttaccggattttcgtcaatcgcgggttttctcgaagattcatgaagctcaatgaagaccttgtgcaaggcaagtcacctttgatcatcttgcacctataatttaaatctaagtatctcttttccgcaaatattgcatgaataggattaacacgagtatttcggccacggcttgcgagatagcttgtcggccccaatcctaattgctgcaattaccctccttgaattattgaacacttaaacctcctttgtcgactgttgtgctttgatgcacgggcatcggaacacctcccctcaaatttaaaacatccaacgatgggtaaaacttggggttttgcaaaagacatggaaaacccgacacatgggtcggtgcttgcgaactgaatgaattttccaaaaccgcagaccgggggacgtaccgggagtacagtttcccgctcttgaacttaacgaccatttccttggaatttcattcgaacataaggcaagtgcgacaacatgggtggaatgtgacacccctggctgagtaattagctaatcgggggaaccatgatgccaagagacatgtggattcaacggggtggtgccggggagaacccccgggcttactggcacagtatggtctgggatctaacctgttgtcggtctgggacccctctcattggcatatggtgaacctgtgtcagcttttgaaatgccttgtcgtgaaagccccaagtcaccagacatgtctgatccacacgggctaggtgaccaaggctagtaacgtcgtgtgggtaaagtgtaccctctctgcagagtttattaaactgttcgaacagccgtgcccacggtcatgggcggatgtgaggttattcctagcgtagtattgtttgactactgctttgtgaaattgctgttgtggaatgggatcgatgtttagaaaatctgcagctgatgggatcagctaggcccgggtggccgtttgaaagttgttggccgggtgccaaccttgaatcaattcaaagactgatacattgcacatactccgaccggacgagacgcaccgtctcatccgtgtcgtttaagaagcactcacttagttgttttaagaaggagtttaactaaaatcaattgtgaaaacaagcagcctttcctttgaagcctgcattaaacacttaattcctatggcttgctgagtacgaaagtactcacccttactctatataaatatatatatagttcctctgccctgaaacttaagatgaagtgaagtgaagaatagggtttcgttctggtccccagccgtcgcctgtggtgttggatgttagaccgttggttccgctgctgttgttgttgttggtgtttcctcgtccgtgtcgtctgttgcattctcaggctgtcctgagctgcaacctaagttaagataaataagtcctctatttattttaaggattacaatgattcatgtttgtcaccgtgggtaccagcgctatgtcctgggactggtactgtgatcacggttttgtaggaagcggttcgcgccgtttttcctacgacacactcctatcaggtgctgttgtacggcggtgccagattggggtgtgacacctcaacagtgctagttttttccacgaaccatcactgccaagatcaatcaaatcagtgttggtttgtttcccgaatcaccactaatacttatcattatcccttatagtatttagggacggagcgtgtaccaacttttgccttcccagagcgtgtccagggacgggtggacaggagatcgatcccatcagaaactagctttatcatattcgttttcatatttttttctcagaatcgaaatcggaatcggaaacccggatacgaaaacggaatcgaatattatcgaatacagatacggagcgaatacaaatcgaaacgaatttggtaacgaatattaatcggaacataaaagcccctcaaattgaccttcacaaatcaacgaagaaatataactcgttattttttttaatagaacatatcaacattttcaattttagtgttaataattttgttatatccgattttgtggtcgagggagacgattcaatcaagagtaagacattacgaggctattattgtgttctaaaaacatgttctattgagttattgtgttcttactgctattattttggccatattttcttgtgactttgttttatcaagtaaaattttgattttcaaaaaatagcaacttcaaataatattttgaagcagtaaataatttcaactgaaaaagttatgaatataaaagttgtagaactcatcaagagctaaaacttttattttggtcatttcttcatccgaccaagtgatagtaacattgttcataaaatttgcatatctcttttataacttatgaaaccatatacgagatatgtaaattttgtaaacaatgttactatcgctttgtcggatcaaaaaatgactagaataaaagttatagatcttgataagttatacaactttgttgttgatgactttttgagttgaaatcatttagtatttgaaaatgttgtttgaaggtgtcatattttgaaatccaaattcaaactatttaaacaaagtcatatagaaaaatgacccaaacaaaagttgttgatcctgatgagttatacaaatttgttattgacaatttttccatttaaaatatatttactacccgaaaaattatttgaatttcttatattttaaaattcaaaatttatatagttcaatcaaactcggatgaagaaatgacctaaataaaattggtagatctcaataaattctataactttgtttttgataactttttcacatgagttcatttagtatcataaaatttaattcgaagttgagggaggatatatagacttaatatctaattcttaggcccgttggcccatttagatggagggatatataaacctaatcctagtttctccaacctcccaaactcccacaccttccaatctcctcccagccgccacccgccacccttcctccagctcccgcgactgcgtgcggcggacggcgacggtgacgtcgggggcggggcctcgtgcggcggacggcgacggcgggggctcggcggcgcaaggcgacgacgtgcggcggacggcggcgagtggaaccggccgcgccggcctcggggcggctgggtcatggcgacggcgggaactcggcggtgcgaggcgacggcgtatggcggacggcgacgccggtctcagggcggccggatccagggtcggcggccccgtagccgcgggatccgatgtcgtgaggcgatggcgatggaggggtcttggcggcgtgagtggatgacgtgcggtggatggcgacgagcggatccggcgtgcgacgtgcgacggcgacggcgggaactcggcggcgcgaggcgacggcgtgcagcggacggcgacgagtgattttggatgttgttaatttggattttgctgtttattttgattcggatatccggcaaaaaatgtcggatagtttccggccgaatccgatttccgacaggtaccatcgctattgtattcgaattcgtatccgagaaaaactatccgaattcgtatccgaatccgaaaacatccgaaaaaaatccgaccgcaacaatccgcatccgaaaaacaggattggaactcggaaattatccgtaccactttcatccctaatcccatcagtgttggtttttgtctaaccagcatggataggacaccacatttaaggcttctaggagtatgatagtggtccatgcatagcagtttgtgcggtgtgcgtctactatatgtaataaaaaaaaggtttaggtgccaatgttaaatttttcattcagtaaaaaaatgttaaaaattcttgtggacgaacgagtgaattcacaagagttttccataacaaaatcgaatgaacacagacatgcatgatttaggcttgctctactactcttggaattgttgtagtcaagagctttctgcagcccctctgatcatactgatgcaaagttgcaaaaatatggaacatgcagatatatactgggaatcataaatcattatttgcacgttccatttgcgtgggattcctaattaattactcatgatgtttgtgtcatgtggttttcaaatcttgttaggtaaagtttttcattgccacatcaaaggatgcatatggttatacgagactatgacacgctgtgtgttaaaccgaaattaagtgaagttaagacgaggcaaactgggtagatgagccctagaccatcaaccacatttctcctttcaaatttaattggttttaaaataaagagattttttatttctccaattatatactcacaaagtaggcaatgaacttcagttggatgtaaaagataaacactgtacattaggcgatttaaaggaggctgaatacaccatctaaggacatgttaattgaacaaattttaatcatttatatgggatttgaagattggatatatttggtgcagttaagggaagaaactgttctagacaaaaaaaaaaaactaactagctggtactaatttatcttctcataaaactgctacctatatagcaatgcaagctttaagcctccacttgtgttttgcatgtcactaagtacttcagggctgttgaccactaaggtatatccaactcagctcgttttagatttcaaccaaatatattttaaccaatgtagttcttctagttaggaattttttaaatccacattaactatttctcaacacgacttgtgtgtttagttaggttggagaatgcagttgttcaattttggcatgaggggcatcaggaaagttcatgcaagcaagaaaaagaatgattggagttgaactggctagtggaccaggagcttctccgtgccatgctactgtccgatgatgcacgctactacgtgctacgtttcgtgttgcaggtgattggaacaacggttattcagggaaggtagctagaccagctgtaatgtagtggagccttattagcgacaagttgcgcactctggatcagagcaatatcaaagtaggatgggaggtattaacctggcaattggtgcctagctagcaggatcgtccttgctaattaccttggcaagtgaaccacactactagggaaaagcattatcgcaatcgggcaaaaacggtcttcgcaagcgtggcggccgtccgtccgtaagcaaacgactgtgaagatcggcaggacggccgtccgtctgcgaagataattttcgcaggcggacgttggctagttcggtccgcctgcaaaaatagtaagcggccgcctgcaaaaaaaaaatatccgcctgcgaagataggtagaaaattttganatttaataataatttgcccgtanattttataatattttgcctgttaatagaaattcttgcaagtagattattatgtacatatattgaaagattatcaagcattaggtactgattaatttacatatattgcataactcaaaagtgttgccaaaatatatatattacaatatttttttacattgtcacttcaaatacgccatccagttatattatggcatagcagtgttccactcccgaagatccttgaattcgtcacttgtcactagggcaccctctgggtcgaagaaatctcctttcacatgtcagcattcatggtgtatgaagttgcacagatcacactggacatttgtgatgcctgtatcgttaaagcttgttcgacgttctaatcttggcaactgcatgcattgaagataaacaatatattagtatcataaatatgtgaagctttctagtacatagtatagatacttacatcctctgcgttaaccctgtacctctcattaaccctaaggaattcgcacgcataatacccgcaaaggacagttcctctaagttgcttgtggacacatcatagaaaaaatagttaaattttgcaattagtgaaacaattggaatacattaagtgagtggagtattactggccaataggtatgtactagcagcttctcccttgtttgggtctgttctccacccttgaacttgtagtattggtacgcactgtatggatgtcgtaccgtttcacattaaggaggatatttaattataatattcatataaaaatgtaagagtcacaatcacttactactgtaagattgttagaaattctttgtatgactggtgtctgtaatcgagtgggtctaagactaccacggttccgtctttagggtggatgagtaaacagatataatgatcgctatatattaacaacaacattgtttgttagtaccagctaaaataagacatatgtgtagaagataaatgtaccagacttactcaaaattataagcggccatgacgactctcttattttgaaagtgcaagaaggctcgtccaatgtactgtgcgacaataatcaatttctccttgtgcaagcccttcttgtatttagctatctcttttggagtcttgcccttcagctggtttgaccctggtgctagcctcacggtatgctgtgtttgacagatccgagttggatccaagaagccgataggttcttttttcttcttagcatccatgtattgcatcctacagaagaagtttgttagtaacattcacatggatttgtattgtacatacttttcatgtaattaattaaaactcatactcacatcaccaaacaccgacatagttgacgcccatcttatgccgatgatatatggtgttgagatctgagatatctagccatacgtaaccttcggcaccgaaacaatctgccggtgatcgagctgttatattgcccaagcctttcttgctcgcttccatgtagaaggtatttaaccttctcatctcccatggtccttcgtttagtgcccactccggcaagagtgctttcccatgttcgtacttttccgggcaatcattagttggcaagcatgttggcccggctagtgcagcggccttctgggggtcatcatctctgagtttggcacgttccttaccccctctgaagacggttaccatgaacttctccttgttctcatctttgacttggaatggtggctcctaagcactctaggcacctcagaattggtagtggccttctcagtgacggggtgcttgcacctcggggtatttcgcaggagaagggtcttcaaatatttctggctctgtaccgtcccattccaatcctggtacttcttctatatctgtcccgactgatgccacaaattgcacctctggctctgccactgtaatctccatgtggacatctggcactacaatctccatgggcaccttcggcactgcaatctccggtggcacttccggcactggattgtccttatgcatctcgggttcctccgccttatcagtcaccttcctcttaggttgtctcggaggttttcccaaccccggttttggcactacagattttcgcgtggcgtcggtgcccaattcaaaggatatgtcattcttgtgccaaagaattacaagatcaaccgcatccccaagtatggatacagcatcttgagtagggaagtctatgtcgtaggactcaaacccttcgtggaccacttgcggctgcactttggcatacgcattgcctatgaactcttcattatatgttctcccagtgatagcaatggctatagcggcctcaagagttttcccggcgtgtccaatgggaacgtgcaatctgcagggtgtattctccttgaggtcatcaaaggggtaatcaggctcaggttctttggtttcggggggaggcaaaagcatgtgcttgacgcagaaatccatcatttgcctttcaaaatctgcagccccttcgtctctaagtt

SEQ ID NO: 7492 - DNA, 45971 bp, Oryza sativa
cccccccccccccccccgcatgcgcgtcgccgcgatgcaccgtcgcccgcgtcgccggccgccgtcgtcttctcgccggccgccgccgtcggaggccgcttgccgccgccgccctcgccctaaccggccggccggcttgaagccgagccgagccaggccgccttcctcctttccccgtgagccgccgcccggtgggccccgcctgccagtacccctccctctccccttgtgccgctgaccagtggggcccgcatgtcggcgccgccccaccccttgctgacgtcagccctggggcaatattgcgcaataaatcgattaagggtttttcttttatagtaaaaacacagagaatcttctaaaaatcataactaattcatccgagctccgattaagtccattcaagtctcagtaaatcaagaaaaatgcaaagaatccattaaaaatggttttgtttcctgtttcagtagtcttatagcatgttttgcttgtgtgctttgtttgtcgcgtaggtttcggccgttccgtcgatccgcagtttctcgaagacgttgctgaggtctcatcagttcgagagcaaggcaagtcatgcaatacaattgatcatattgtacccaatttacaaatatcccgcatttctattaaatattgcattgttttacaatatcatgtgggatgggtcctattactcagctatatgttgtttcccttatgccattgataacttgggtattaaaatgactagatgttggtttaggagatgcttagccatgcttagttcaactagtgcacaaaaggggaccacattaaagcatagacttgattattggcatagctttggtttagtgccaccgtaatggtgttggttaattaaaatacattacatggtgggctgtgggtgcatggttttgctagacgtgcccatggcgattaaggaccggttcgcgggatgccctggaagaacttatcgtacttaccacaagccagcgtgggcaacggctgggcttgtagtgtagcttttctctagccgacgtacccaggcgagggtgggcgtgatggagttgggtcggccggggtgtccggttgatcggcttccggattcaccgcggcacgaaaggggggctgcccgttgcctgctggggacgggggcgaaccctaaggtgtggtgcgatcggttagagggggttatacgaagggtcctgtcacggcctctttccggtatgtcgtggtggcatgtcggtgcacgggaacgtgtcgtggggctgtgtcttgtgggtacagttgtacacctctgatcagagtaaaactattcgaatagccgtgcccgcggttatgggcggtcgaccagattcaccgtgattagtctcacccctagtttagcttaatgaactgattagttcaggtggtggtttgggcctgttgcaacgtggtgtaacgttggacagtgattggttaatatggattaattactacaactgttttactgctttcaactactgctttgaaatgccggctttatgcaaaagaacctttagcctcccttggatatatcttgcatcatacctcctcttccggtatgacttgctgagtacagtgggtagtactcagtcttgctctcttttcccccacaccagagttgaagtccttctcagttgaagatgtctcgaagaggttggtttcgtcgctgccgtcaaggatgcctgtggaatggagtcgcccgctgcaggagtcaagtcttcaggcttagctcgcttttctctttttccgctgcatttgtaatcttttatatttttgtaagacgtggatctgtatgtcaacaattgtcgtttgtgtaccctggctggtcctggacaggggtttaatgcacattcagcttagaaattctggtccgtgaatttctgggcgtgacagttgacttgttaaaataaagatgttaacagaaaaaaataaaagaaaaatatttttagaagtgggccaacatgagaaggcccataaacccagcccattagttctcccctaaaacctagagagaggggaaccgaatcccacctcccctcatagtgccgccacccctctccctggccggtgcctccttcctcctctcctcctgtgttcgcatctctcccatctacagcaaattgctctccctagatctccaccttcatagcttggatcaagaagcgaagtagaaaaacggaacgatgaggagaggagtagaaggaggggttagaccggagtctcccctattgtctcctcacaagttctctaaagaaaccctaggtgaggcttatccccttgttgtatcagtttttctagcatggctttagtgcattaattcgtggttagggaaggctagagaaggagtttgggtatttgtggttcggtttgttgaagttctgcatgtgggcagatttgcagtgcttcagtgtttcgatgttttggggctctaaatgttgttttcttcaaaagtgtataactaggaagttgtatatatgttcggatatatcttctgaccaaagggcgcgatttttatctcaagtggtttaggagatataatttttttagtatgactgttgtttttgtgtcataatctggatagtagtagattgaactatttttggaggggctaaacagtagaatcagcccggctgcctatagacaaagttgtagaggtttttcttagctttccatattggtaaagtacaacctgattgggcgcgtagaactccagttatggttgttttagtgtggacagtctgaaattctggacagattctaaagcttgctttcaagcgcaaattagaccatttaaatagcacaataaaaatatgctttctacatgaaagttgtaggtattgctctgtagattttcaaaatttatacattttccgtcatagccttttcatatttcgagatataaaggtttgaagcagcagtcttgtgtataatccaagtggtgttccttgttattgagttttgatgggatggggcagtaggttcacctttttattgttttatacgcatgtttgaatgtgtttgctaaggttttgtttgtgattaggtggtggtccatcagctcgtgcatgataccaatccttcgttgaaggcaagtgtatgacgaactaattgtgtgattcatggattgtttactctatctatttatttctgatatatttcaacgtgataagtaactgcttgtattcatattattgttcatgccatttagatttcaagttgatcttatgtgtacgatcttattcttgttttaatattctggattctgattctgcttaaataattcaaattccctgcttgccatggatgtgtttcaatttggttctttgattccggtttcaattattcaagtaccatgtgtagtcatggtactgcaatttggttctttattcaagttcccgtggataagcgctgatcacgcttactcggctttgccggcaaatgttaggatgtattcactattgtccggaatggaaactactatttcaattcatgtctgcagggatgggaactactatctcctttgacttggtgtttggaaatgtgtttcctatcaaagaaagaaaatcttctgttcatgctttattgtcaatgatgtgtatatgtgttttctagttccatattgtacttgctgattatttttatactcttgtgttttatttggttttaggtacgcattgagaccgacatgcatgggcgggaagtagcacccttatattcacatctacttgcacactatcaaactatattgcttaggtccataatgacacttaaattatatcctggtttggtcttataataatcttttagatttctaatagttttttctccatggattataaggatggatcgtattatgggaatgatattgttattagtttaacttataattgcctgttgtggatgtccgtatttgcaggggtgactctgccgaaatttctaataattttggaagttagtggtttgagtgtttttttggtgtggcactctaggtacgtggttacctggggtgttacacttactctctcccttatcattcccataacaataaagtacactaggtcctcttgtaattcatcttatgctttggtgtgtgtgaatgagggagaggagaggggtatttataggtggagagttgccttgggagagtggagatgctccaagcatcctatgagcatattccttctagcttcatctcctcttgacaagtgtcctctctatgacggtttccaccggtagaaaaggacacaaccgtcattgggatgaggagtacaatcgtcataccgaatatgggctggattgggccagctgcgggttccgccgatccaggggttcggccgaaccctgattggctcccctggcccacatctttcttcaggatgctgacatgtgggccccacttcatgatgctccatgttttggtccaaataattgcacattttatatgttgtagcttaaaaccatgtgagttcatgagagcaaaatatgtttccattctttatgctcattctctcccaactttggtggttgatcacctgcatacaaatatacaccaccactcgtggaaattgttagaaataaatcctaccactatgttggaagtttcacatttgtggttttatacaggtattgacgacgttattttggcacttaacagccgtcaacaggcgccgtggagctccaggcggcgtgtctcccctctttgcgttgtctgccgcgttcatcggcatcagcacttgatgccttgagctgaccaactcagtggctgctggcaggggaagagaggtgaggaagatgatgaatcagtctgacatgtcactggtggagaaatgatttgtgctcccgattggtaaccctctgtaaccccggtttttcaactaggactatgaatccgggactaaagaccactatctttagtcccgattcaaatacccgggactaaagatcgatttttagtcctggtcaaccaggactaaagataaaatcgtctttagcccggattaatgttaccaaccgggagtaagggattttttttcttttttgttttttttgcttccactgctgtttttctatttccatctcgagcacaatcgcacaaaaatcacatgcataaatcatttacaaatcacgcacaacacacctaaatcatccacaaaaatcatttacaaatcatacacaacacatgcccatccacaatccacaaatcatccccaaatcaacaaaaaaatctacacatcaattcacaaaataaaaaaaagctccacaggaccacaaccaccacccgaccacctcccctcccggatccggtggaggagagtccgccgccaccctcgcaccgccctagtgccaccgccgccaccccgccggctagctcgccctgccgcctccccctcccagatctggcggaggggaggccgtcgccccgccgcttccccggccgcctcccctcccagatttggcagaggggaggccgccacccctcgccactttcccggccgctcggctcgccccgccgcctcccctccaggaccggcggaggggaggccgcccccgccgccccgccgcttcccttcccctcccactgccggctgttgctaagagggagggagagggagagggagcggcttgatatcgagagagggagaaaaatctctccgcagagagttgagagaggacaatgcggagagatttttctaagtgttgattatataatctggttggtaacagggcggggagaatgacgcagagagggctgatccggatttttcttttgtcccggttggtattaccaacggggactaaaaatagtataagcatgacaccagcctgacaatttgtcccggttggtaaaaaagtaccccgggctttttgaaccaggactaaagatttagtcccagttcttactcaatccaggagtatagtggattttggctgaccgggcaaagatggtttctccagtagtgagtgggacattaattattttcaaatatattttattgacttagatatgattgacacatcagcgccacattggcgaaaccacaatgtttcaaacttcgaacggttttaaaaattgaggggtgtattatacccggttttgaagtaaggggtgtatttcagacaaatgctatatagttgagggtaaaatggaccgaataaaatatgtttgtccgtcgctaatgacgtgcttaatgaatttacgttgcacaattaacaaaaataatccatataaatcgagggtacatttgcaacatttttttttggttttatttgccttttcagtttttttttttggtgttgccatatttctttgacggttgcactgttctccactttttttttcggtcaaatacgatgcagcgctgcacgcttctctcctgctgggcagacgacgcctgcaggctgacggcttttgtcagcggcccaacggcgtcgtcaccatcaccttgcgtccgtccatccggaacagtgcactagagcagttgaacagtgcggggttcctaaccacacagcctagcgctgcgaaccacaactagcgaactagccttatcatttccgttagatgtttggatcaataatgaccgcaaattcatagctgttactgcagctgaccctggaggcctggacgccccatgtcttggaaaaccgtgcacgctttgtatataatcacatgaagcccccgcgtcctgctagacccttctcacagcgccagattttgaagcttgcagcagatcgagatattcgagttgggtcgccagctaggtgcacttcaccacttccccttttctcatccacagatcgagttcgattaatttatctttattagttttattttgtttcaaagctaggaggaggcgctctccagttaaaatggttagtcttttgttttagttagtttctaacggcaaaacacccaacttatttgtcaaataattttcatttccgctggttatcaaaagagagaaaatacgactatacgagcatttgcgaatttaccacttttttttcaattttgcaagcatgccgctcgaacaacagttcaagttgaattttcgcaatgttctagtgacagtcttgcaataacgattcaaaacagtggcaaatttataattaccccaaaataagatgttgaagattcagcaggtttagtgttggccgaacgacagcgattcctcatagtaagaggaacataggtcatttacatataggccttggtagaatctctattgttagatttttttttctaaaaggtatatggaatttttatattgatagtattgatgtctaattcggaatttttgttgggatgatgattatatcattgttcacgtgaaaaatcatgtacgttgctttcttatggtctagcgagaattgttaagcaattaggagtccgactttcaccccaagttagcatgtgagggttttaaaaggatttcttatatgactccttatgtatttacaaaagtgaacgaacataaaaatagacttaaatacgaacggcatatcaaagtatcacagaaaccatctttaatttttgagcactgctcccgtccagcaaacggtaccccaggtaccggtaaccccaggtacaaaacttaatctgaccattgaattagagcggggcacgatcgggattgaacttaatgtagacccccgtttttataacggaatcactcatattaatagtaccatttccctggatcaagtagtctggtactcacggttacattgttgaattatcaagtgcgcatacaaagattgtttagcgcgaattattacatcataggcccgcgggcagtcttagatcataggactaaacggtccacaatacaaacaataacagaaataggtaaggcagcagattataggcagcggctatgccattgccacaggcaacgaccataactaagacctacagagcgccgtcatcctccgcatcctcctgaagataagcatagggatcctcctcgacttcattgccatccactgattaaattttgtaatagcaagagtgagtaccaaccgtactcagcaagccatcataacaacagtgcatatgatagtgtcggtgatatgggaccgggagtatcatggccagaggcttgaggcagacacaatcgcccacgtggcctggcaccttcggggacgtcgggcccgagggtgaggtgtccgccctcctcctgattccccccgagggggggtcgggttgcgcttgccccgaccccgagggccgaggcaccccgaccccttaaggaagtctgcgccacatatatgggataagtgagcacagctgtgctcacctaacagcatttattgcggtctggtcaagcgtgtcacgctgcatgcagcgcaatacagcgcgctcttttatccggtctgtgaccagtcacagaccggtcagatcaacggttaggtggcgactggcggtctgacgcacgcctcgccccgtcccgtcaagacgagtgcctctaggcacacgtctccagccggagctagcgtgttacctcttagagatggcacgttagccctggttagatgaataccaggcttcatcctaaccattacaggcaaggtgttacacgaagaagggcaaacatgcacgttgttaatctgacgcgtggtggacaagaatgaccggtctgacactggtcgcgtcagcaacgagcagccacgatcccacgttgcgcccgtctccgccgggagtggaggtaggtgtgggctgtcccatcgaagtgtgattcggacggcaaccatatcaatctccgttcgtaaagagaaggaaagtccagtttggaaagggaagggtgcgtgtggtatccccttgaagtataaaaggaggaccttgcccacagagtagagggttgattctggcgagattgagagcctagaacaagggagagtttggctcacactttgtagctcattcatacacaaatccacaaaaacacaggagtagggtattacgcttggcagcggcccgaacctgtatacatcgccgtgtctcgcgttcccttgctagcagacaatctttccacatacagagagagcttgagatctcaccctaagcccccggccgaaccggcaaaggggggcctgcgcggtctcccggtgaggagccacgagctccgtcatctggcgcgccaggtagggggctcagcgtgtgttttctgagctctcagactcttccgtgggcgccaagtttcccttgttcagcctaatggccgagcgagcaaaggcgcacgacctctctccgagtgtgagcggcgacgacggggagctgaatccacgccgtcgagctcgtactcccccatctcctccgcgcccaagccctaagcagggggaggcgcttgagaaggtcgacaagtccatggcatcaccagtcgcaggtggtgcaggaggacggcaagatggggagcgccgcctcctcgtctacggcgacggcagcacgcctcagggtgcgcttcaggctgctggcgcgctcctacgacatccgcctgtcgtccatgacccggagtctccagcccaacgatggctggaagatgtggccaacttggtcatgacggcacagcagcgcctgggtgctggtggacggtccgccaccaccaagacctccggtgccgctaccaccggctccgtgtcgtcaaggcggagggcgcggcgagcggcggcggctgcacgtcattcggctgctactccctcgtcgacaccttcgactcgggaggatcagcatggggagccggatgcccgcctcaacatcgagcgccggcgtaatagccggcgtaccccccgtgcaacggagggtgcctcctcgtccagagtgtcacctcgacatggacgtgaggaccagccctccgtgcctccggctggtggtgttggctgtagagcctttgtggcgagtcttcggaatgtccgttggcccccaaggttccggcccaccatcaccgagaagtacgatgggagcgtcaaccccaccgagtttctccaggtctatacgaccgggatcgaggccgctgggggtgacgacagggtcatggcgaacttctttcccatggccctaaaaggacaggcgcggggttggctgatgaacctgccacccgcgtcggtccactcctgggaagatttgtgccaacagttcaccatgaacttccaaggcacatatccgcgcccaggcgaagaagcggacttgcatgcagtacagcgaggcgatgatgagtcgcttcgctcgtacattcagcggttttgccaagtccgcaatactataccttgcatccctgcacacgcggtgatctacgcgttcagggggggcgtgcggcacaaccgcatgctcgaaaagatcgcttccaaagagccccagactaccgcggagctttttcagctcgcggaccgagtggctcgtaaagaggaagcgtggacatggaactcctccagttccggagtggcagcttcggccgcccccggatccgccgctcagacagggcggcgtgacaggaggaggaagaagaggtcggaccgttccggcgatgagggtcatgtcctcgccgtcgagggcgctccgcgggccacccgaaaggggaggcctgcgagcgacaaaaagaaagaggctggtactcccagcaaggagcgccccgccggcaggtggtgctccgtccacaacacctccctccacgatctcgcggactgtcgcgcagtcaaaaatttggctgagcgaacgaggaagtgggaggaggacaggaggcaggaacgccgtgagggcaagtccccggcggttccttccggcaaacggcgaagtgaggccaagcagaaggcccccgctgttgacatcgatgatggtgatgatgacctaggtttccaagaacctggggccaccattgccaccgtcgatggaggagcgtgtgctcacgtctctcgccggagcttcaaggctatgaagcgagagcttctggccatggcccctactcatgaggcgacgcgtcgggcgcggtggtcggaggttgctctcactttcgaccagaccgaccacccaccgtgcattgcccggggagggcaggttgcgatggtggtttcccccaccatctgcaacgtgaagttgggacgtgtcctcatcgatggaggagcggccctcaacatcctttcccccgcggcttttgatgccatcaaggccccggggatggtgctccgaccgtcccagccgattatcggtgtgacgccggggcacacgtggccattaggtcacatcgacctaccggtcaccttcggtggacccgccaacttccgcacggagcgggtgagcttcgatgtggcggacctcagtctgccctacaacgcggtcctagggaggcccgcgttggtgaagttcatggcggcggtccactacgcctacctccagatgaagatgccgggccccggtggccccatctctgtccatggcgatcttaaggtcgcgctcgcttgcatggagcagcgtgccgaccgcctcgctgctgcatccaagcccgagggtggtgacgagaggcctggcccctctgcccccaccgccccgaggcagcggatcgctacatgcgacgaggtcccggtcaaggaggttgccttgggcgacggcccatccaagaccacacggatcggtggtctcctggatggcaaataggaagacgcgctcgtctccttcctgcgggcaaacgctgacgtcttcgcatggagaccagcggacatgcccggggttcccagggaggtgattgagcaccgtctcgccgtgcggccgggcgcgaggccggtccggcagaaagtgcggcggcaggccccggaacgtcaagtcttcatccgcgaggaggtggcgagacttctggaggccggattcatccgtgaggtcatccatccggagtggctggcgaacccggtggtcgttcccaaggcgaacggcaagcttcggatgtgcatcgactacaccgaccttaacaaggcatgtcctaaggatccttaccccctgcctcgcatagatcagatcgtcgactccactgcggggtgcgaccttttgtgttttctagatgcatactctggttaccatcagattcgcatggctagggaggatgaggaaaaaactgcgttcattacccccgtaggaacctattgttatacatcaatgcccttcgggttaaagaatgcaggtcctacttttcagcgtactactcgaatttctttgggtagccaaataggacgtaatgttgaggcgtatgtcgatgacttggttgtaaaaacgcgcaaccaagaaactttactttcagatctagcggaaacttttgagaacctccgctctgcccgcataaagctgaaccccgataagtgtgtgtttggtgtacctgcgggcaagcttctcgggttcttggtctctgcccgaggcattgaggccaaccccgagaagattcgagctatcgagcggatgcgcccccccagcaaacttagggatgtgcaatgcgtcaccggttgcatggccgccctaagtcgtttcatatcaaggctgggagagaaggcgctacccttgtttaagctcctcaagcgctcggggccgtttacttggacggaggaagcagaacatgccctcactcggttaaaggcatatctcagctctcccccggttctagtcgctccagagccaaatgagtccctgctactttacttagcagcgaccccccaagtagttagtgcagcgttggttgtggagcgcgatgaggacaatcctcatttcgtgcacccccattctgtgctaacttggcccgggagcaagcagggaggagaggcccccgagtcaaacggtggcctaaggcccctgacgaccggagacggccctctgcccgctcgtcagacggtgctgggtgcccccgaccctcaggaaggccccgaggccactgcgggaaggccgcacttaacgccctctgaccccgaggctaaccctgtgctgactcgacccgggaaagagcagggagaagaggcccccgagccgaacggaggccagaggcccctgacgaccggagttggccctttgcccgcttgtccgacgatgccaggagcccccgacccccaggacggccccgaggccactgagggaaggccgcccctttcatcctccgaccccaaggtcatcggtacagaagacaagtgcgccccgaaaggccacttgaacgaagaacgccccggggatacggcccctagcagagaggatcggccccaccgaagggtgcagcggcctgtctactttgttagtgaggccctccgggacgccaggacccgatacccacaggcccagaagatgctttacgctattctgatggcctcgaggaaactgcgccattatttccaggcgcatcgggtcactgtggttacgtcttaccccctcggtcaaatcttgcataatcgagagggtacaggacgagtggtaaaatgggcaatagagctttctgagttcgatctgcactttgaaccacgccacgctatcaagagccaggccctcgccgattttgtggcagagtggaccccggctccagagaccgtctcaatgcccgaggccagcacgaacccctcacagctgcctcacgccgcccactgggtgatgcaattcgacggttctctgtctcttcagggcgccggtgcaggggtcacgttgacctctccaaacggagacgtcctcagatacttggtccgtctcgactttcgagcgactaacaatatggcagagtacgagggactccttgccggactcagagtggcagctggactggggatccgccgcctcttggtgttaggcgactcccagctagtcgttaaccaggtctgtaaggagtaccggtgctctgacccgcagatggatgcctacgtgcgccaagtacggcgtatggagcgccattttgacgggatagagcttcggcatgtgcccagacgggataatgtgattgccgacgaactctcacggctcgcgtcctcgcgagcccagaccccaccgggcgcctttgaagaaaggcttacccagccgtcggcgcgacccgatcccttaggggagacggatgtgcctgaccggcccccgaggcccgtcggagtccaggcctcgggacccgaagggagcgcttcaagctcccttagattgattgcttggatctctgagatccaaacatacctcacagataagactctacctgaggaccgcgaagggagtgaacgcgtacaacgcatttccaaacgctacgtgctggtagaagggaccctctatcggcgcgcggctaacggaatcctcctgaagtgcattcctcaggaacaaggcgttgagcttcttgcagacatccatgagggcgagtgcggagcccattccgcctcacgtaccctggttggcaaggcctttcgtcaaggattttattggccgacagctctcaatgacgcagtcgatctggtccggcgatgcagagcgtgtcagttccacgccaagcaaatccatcagccggcccaggccctgcagatcataccactgtcatggccatttgctgtctgggggcttgatatcctgggaccgttcaaacgggccccgggcgggtttgagtatctgtatgttgcgatcgacaagttcactaagaggcccgaggcttatccggttgtcaagatcgataagcactctgctcttaaattcattaagggcatcacggcccgttttggagtgcctaaccgtattattacggataatggcacccaattcactagtgaactcttcggcgactactgcgaagacatgggcatcaagctctgcttcgcctcacctgcccaccccagaagcaatggccaagtggagcgcgccaatgcagaaatcctcaaaggccttaaaaccaagaccttcaatattctcaagaagcacggcgattcatggatcgaggagttgccagcggtgctctgggcgaaccgaaccacaccaagccgagcgaccggggaaacgcctttcttcctcgtctacggcgcagaagcggttctcccatctgagctcaccctgaggtctcctcgggccaccatgtactgcgaggctgatcaagatcagcttcgtagagatgacctcgactacttggaagagcgaaggcggcgcgcggccctccgagccgcgcgctaccagcagagcctgcggcgctaccatcagcgccacgtccgggcccgatcactctgcgtcgacgacctcgtcctacgccgcgtccaaacgcgtgctggattgagcaagctctcaccaatgtgggagggtccgtatcgagtgatcggtgtcccccggccgggctcggtacggctggccacgggcgacggcacggagctgccaaacccgtggaacatcgaacaccttcgtcgcttctacccctaaaggggggggggtcgggtgtcagattttggctcgggccaaccccacacccccctcgggtgtgcaggattggccgggggctaccacacatgcacatatattccctttttccttatttcagcatttcaatagaagcagtttcaattttctaaaggttgtgtctgtgccgtttttccttctgaagaatcttaacttgaaataaggtcactcgtgctcaaccttgccctagggggctcagttcggtcagctaaaatcgccaaacggggcccagaaccgagccgtgccccggggcgtggtgaactccgggggggaaccggcaaaaacccacaatcgggtcacccatacccctcggtcaccacgttcccggcctggccagtctcgacatgtggatctccccgggcactggccccgacccgagccattcgaggactgggacttgggcacgagcccttatttcaagctaaggcgcaaaaggaccatggcacagatcatcctcatcgcatatgtatagcaaaataaaactaacacaaaaatttttcatcatttcatttctgattgcagattaagttaatttgtacaaaaaagaggtatgaaggccttagaagaaagaaaaagaaaaaaagattggcgggggcctgggggctcattccaatgcgcccgggtcgccggcctcgtcgccgccgtcatcctcatcgctggcgtcgctctcctcgtcggagctgggggcgaacgcgagcagaggggccgacccctcgaagccgtcgacgatatggtcggcagcatcccggacgcgcgcgcgcgcgtcgtcctcggttccgggagggaactcctccagcgccatccagggagagaagtcggggtcccgggcctggtagctcgccagcacgagttcgaccgccccctgggcgaggtccctcgaggatgacttgatggtcttctcgagctcctcggggagtcgttcgaggacccaggccatcctgttgaggtgcggagcgaggccttccaggttgctagggcgcgtcctcgtctggcctttccagaggcccgcttgccgaccggcgcgatccatgcgggagaccgagtcccaaagcatgtcgggccccatctcgcccgccaagcggagggcctcggcctccccgatggaagaatccagcgcgcgctgcatgtcagcgacggtgtgttcggcagccgcgaggcgagcggctaagtcgctttcgcccgcagccgccccaccgatgcgcgccctcgcggccagctctttctcccgtgcctcgaggttggcagcccgctgctccagcgcggctctctcggcacggacgcattcaaggttgcggcgcgcctgctcctcttgcgccgcctcgtgatgaaccctgagttcctctcgacactcaaggttgttgttggcccgatctttcggtgagttgatgaaaactacgatttggaagaaacgttgacgacccgactacaaccgtacaagacgttgcgttgcgccttagcgatcgatacacctctccgtgggttgttgatcttgccggtgcaaatcaaccttattcctgcaagcaaatcgaagaaacaagcaagaacaagataaaagcaatctgaattgcaaataggagttaaatacgaatgataagttggggttccgaagaacaagcagacggacggtctagccgacacgcgcgctgcaagcaagtagcaatggctaaactttaatctaacaaaacccaagaaaccctgaaggggtacctaactatttatagaggtgggaggacgaccaagagggtccaagggtcgtgctccaccagattggggcgcaccccacatgggcctcacatgggccagggtcccaaacaaagttacaagcccattggcccaatacaggagacgcagcaccttggttttgtgattgcggccaaacgagatagatttccgagatgaggctggatccgttggaaggaggacttcgagagctttccatcaagtactcacgggcccaaaacggagcacgtatgtagatttggcggccgtttgaagtcagcaatgtaacacgtggccgaatcagattgcagcacatggaggacttgatcttgatgtcttcttgttgtttcatgatgtgagcaatggtcgtatccatagtagccatggtcacatcatcctccccttcttcacagaaaaccgtcctcggtttttccatatggtgctcttcgcgcagtccactgaaaacaacctgtttcttgcaatcaaaacaagacaaactcgagacaatatgattagcagtaacatgtctctctagcttgcatattttatccggaactacaagatgttctaaatctgaacaaatgtaaactctatgcaccaaaaatattcctctatcattatattcgccaaagatatgaaaaatagcattagttggacatggcaaatcagatttagcaaataatttctccttcaaattatcgagctcacaaaaatcatcaaactgaacatagcccaaagtatttaaagaagatagcaattcgcgttcctctacttcattagcaatgtgaacaacatgcttagaatcagcacacaaagaaatagtagaactaacatgttcattcactagttgtggcatggatataagtgaaacattatcacacaactcttctttatcacaagaaacagcaagtaaatcaacttgtgacaaaggcaactcagtaattgattccactaatggttgctctactatagcatgaaaagtggacaagtgtagctcaccttgagaatactcaccttcatttctctcagcaccatttaatttaccttgcgaactttcttcagataatgtagctgcatcagccttctcctcattcgcgagtgatggaagtgacatctcaaacatatcgttcttctcattttggagacttttctgaacttcctgcaaaacatcagtgataggaggcacaagcatatcttgttgctccgttggattctccaaaattttgcgctcaacaatgcaagcaagcatgaacaattggcctatatgattatatgtcacattaacaagcccagcctgaatattgaaattaagccctctgaaaaatctagtcattgtgttctcattagattcttgtaaaccactataagtgatacaaattttaaaatcatgaaagtactccctaacagttttgtcaccttgttttagatgttcccatttctcaaggagagcacgtctatagtatgaaaacacaaatctttttctcatcagtattttgcattcatcccaagtttcaagcttattccccacagtatgccaccaaaaagatgcagaaccggtacacttattactagcagccttaatcatttgagcattagaaaaatcatactcatcaaattgtttttctactgctagctcccaattaatgtatgcagcggaatcatactttccatcatagactggtaacttacatgcaacttgtgcaaaattatagtcatgtacctcatatgcatcacgtgaagaagttgtcatatctcgtcgaaggtgtagatgttgacgttgagcatgaccatcttgtttccccttgcgcaatcctgccatggttagcagcaaacaagaaacatacacaagaatatacacgctcctatcaactattaggtactggcagctcaaatgtcacacacactcaagcttttaaccaagctcttacaagatcttaccaatgcaagtggaatggtgatgtacaccgactcaaccaagcagcccaatagaggttggatatatcgatgcctcggcaaacacttgctgtacggctgcaatcaaatctgtggagctctgggtaggcttaaatatgtagcaaaggaatagcaaatgctcaaatcagagaacgcaaagttgaataattgttcaaagtcaagtaccgtgctggtcctaggctagaacgtactagagacgcgagcctagacacaaacgataccacaagatagcactaggaacaactcatgcacaactctgatatatgaagttcagctcaaacataacagtattttctcttttctttctttcttctttcttcttttctttttttttttctttccttttcttttctgttttttttttggtgcggctttttttttctttttttttgcacctttctgcctttttttcacttttttcttgattttttttaacaaaaactgactcaaggaccttaatgtaagattacagggactcaaacataaatataaaatttatagggactcaaatgtaaaagtctaaacccaaaattaaaattatacaaaaaatggaatgctgaatttatgccggttccgtttttccaaacagatctcgaaaccgacaccaaacaaaaattcgccaaggtgtttgacacaactcggaacggtggaagagagggagggagtcggactcggccaaaggggcgagtgggactcggccaggaggtggagtggatggcagccgaatttggtgtatgggataaaaaggaaactgatttttaaccaatccaatctactatatctttccaaaacaaacttgactacttccaaaatcagatatggtaattcaccttcctcctctcgtgcacgacacaggcacggccaaaacaaacacacacaaggatcggcaaactctagatgcaactcaagaactccaaaactaaccgatagaaacgtctgaaaactacaaaaatagaaccgtggcagcgagccgattccgttttcgtaggtcccgacaacaacagagacacggtggcagcgacgactgtggtacaaaacgtgaccagaactcgaaactctaaacgaactagacgctaagaccagcaacacgacgtgacgatgcaacacaaaattcaacaaagcaaaaactgaaaagaacaatgcaatggcacaatatggctaggtaaatgatacgaatttttttgtatggctattttctggttataggaagataaaaactcaccgagcaacgaaagctctgataccacctgatgaaccctgagttcctctcgacactcaaggttgttgttggcccgatctttcggtgagttgatgaaaactacgatttggaagaaacgttgacgacccgactacaaccgtacaagacgttgcgttgcgccttagcgatcgatacacctctccgtgggttgttgatcttgccggtgcaaatcaaccttattcctgcaagcaaatcgaagaaacaagcaagaacaagataaaagcaatctgaattgcaaataggagttaaatacgaatgataagttggggttccgaagaacaagcagacggacggtctagccgacacgcgcgctgcaagcaagtagcaatggctaaactttaatctaacaaaacccaagaaaccctgaaggggtacctaactatttatagaggtgggaggacgaccaagagggtccaagggtcgtgctccaccagattggggcgcaccccacatgggcctcacatgggccagggtcccaaacaaagttacaagcccattggcccaatacaggagacgcagcaccttggttttgtgattgcggccaaacgagatagatttccgagatgaggctggatccgttggaaggaggacttcgagagctttccatcaagtactcacgggcccaaaacggagcacgtatgtagatttggcggccgtttgaagtcagcaatgtaacacgtggccgaatcagattgcagcacatggaggacttgatcttgatgtcttcttgttgtttcatgatgtgagcaatggtcgtatccatagtagccatggtcacatcacctcgcggagggagaggctgttcgccagccgttgcgtcgtggcctcggcctcctcgagagctcgctcccgctcagcgagtgcatcctcgcgaaggcggagcgcggactcctcctcggcgcaggcggcctcgtgcgccgccagcgtcgtctcccggagagcagtggcggcctcgcggtccgtgaagcccttctccacggtgccggcgtgttcttccagcgccatggcacgggcctcaagggcctcctcgcgccgccgggacgccgcttcggcttccgttgcccgccgctctcgggcagcagcggagtcaagaaccccttgggcggcgtcgagcttgttcttcagctccgcctcccagctcccgtgttgaaggcggagggagtcctgcgcctcaatcatcgcggtggtggcgacaagggcggcctctcgctcctcctccacctctcgggcgatctccgccagcgccgccttgcgggcttcaagctccgagatgtggcggcggtgggccttacggcccacctccaccatggcgtccaccgagcgccgcccctcctcaacacgcgcccatgcggcctcgagctccgctcgttctgcacgcagggcctccacttgggtgttgaacccatccagcactgcggtgtttgcggcggccagggcctgcagaaggggctcggcgctcagcggggcgacagaagatgaggagaagagccgccttggagaaaaggcgacgcggcttggccccccggaagatgcgctgggctcggggatgtcccccgggcccgtttgatcatgggcgtcgcccggtgaggtaggcccaggcgatgcgcccgcggcctcgtcgcgagccgcctcggaggatgtcgcctgagggccgcccgagggagtaggcccaagtgacgcgccagcagcagctgtcgcctcagcctggcgagcccgggtggcctcctcccgggcagcttcttcggcttggcgagcccgggcggcctcctcccgagcagcttcctccgcttggcgaacccgggcggcctcccgggcggcctcttcagcttcccgaaggcgggctgcggcttcacgccggtcagactctcgcctccgctcctctgcggctgctggatcttcggcctcggactggccggacttggggtggcgggaggaatgcgacgggacatcgctgaagcagaagaaaaagccagaagacgaacaaagtgagcaagaaaaaacttctttttggagaaagatggttgcaatgagagtgagacgaacctgcgagggggtcggttgaatgaccaccttggaggggaaatcaggtttccccggcatggttccgtctcccccgtcttacggagccgcttcttcttgcgcaccccctcgggctgcgatgtcggcgcggccccctccgggcgccgactgctggcacgcaccgccccgccccctcggggaggagatggcggaggtgttcctcccagcttcctcttcccctgggcgacggcagggcggctgctccccgagcccccgacgcggggcccagaagcacgaccccctcctggggcaggttgttccccccggcggcgctcgcccgcgccgtcgtggcccttaggggctctctcctctgaggccccgacccccatcataatggttagaatggagacgcggtcgggatcgctgcagagggggaggatctcttgaggaaggcgagacgcctccgcggagctaagattcagcaccctttggactacgatcttgaagtcctcgggagcccaatcccatctggctccctggtgggtccgcatgtagtcttcaggcccagtgtactcccaggcgctccgggcgcgccgttggagcggcgcaatccggcgacggagataatcgccgtacaccatggccccggtgagcccctgggatcgcaggcccgccaggcggtcgaggacggcgtcgtagtcctcccccagatctaccggcgcccgccagctggagacctgcgccgggggctggcttggaagtcggaggcgcgcttcgtcggcaaggggggtgtagaaccggtcgctcttccagtcgtcccacttcttgcggaggacgcaggggatgtagcggttcaacactggcccccgcggctggaagtagcagccgccaaccgctgacggcggtgacaccgactgcacggtgaagaaccaccggaacagctgaagagaggggcgcaccccaatgaacatctcgcacaggtgtgcgaagatggccaatgtcatcaccgcattgggggtgaggtgcgccatctggagatcgtagaactccaggacatccatgaagaaatgagaaaatggcgggaccagcccagccatcgcgaaggggaggaagaagatggaccgccccgggtagtctggtgccgggcgcccctcgcccagcatcactatctcccgaccggtggcggactccggcatgaagcggcgcggcagtccggcgtgcctctcgttcacgatgcgggaaggcggtagtacactgccatcgagcagagcagagccccgtgccatggcggtggaggaagagatgattgggaacgagcgcgtgtggcgaaagtagggcgtagcagagaaagagttagagctcaggcggcaaaggcaagaggaacaatggcgaaaggaagggagcaaatccttttctcgatgcttttatacccttgccatcgctgggcctggctcctcgtttctcgcgcccactacctcgctccctcgtatctcgctatcccgctccctcgtttcctgtgcccacgcttccactaatcccattcgcccgcttacggcgcatgaagtggatatgcggttgtggcaatcgaaacggattgtatcgtgcgcgcgttaattacgctcgccaaccgaagcggcgttaccgtatctccgagcgagacaaatctgctcacccagattcgcgcgctgctcaagtgatgtggcagtcttgaatagaccgcccattatggacaaccaaagttaccaataccaatgtgcatggattgagaccgttgggtattttgcccaactacggagaccggtcccacctgtcaccaggctttaggggtggcgtcacacctgaccgcttcccttgggaagggaaattgctctggcataacgccgggggctactgtcggtgatatgggaccgggagtatcatggccagaggcttgaggcagacacaatcgcccacgtggcctggcaccttcggggacgtcgggcccgagggtgaggtgtccgccctcctcctgattccccccgagggggggtcgggttgcgcttgccccgaccccgagggccgaggcaccccgaccccttaaggaagtctgcgccacatatatgggataagtgagcacagctgtgctcacctaacagcatttattgcggtctggtcaagcgtgtcacgctgcatgcagcgcaatacagcgcgctcttttatccggtctgtgaccagtcacagaccggtcagatcaacggttaggtggcgactggcggtctgacgcacgcctcgccccgtcccgtcaagacgagtgcctctaggcacacgtctccagccggagctagcgtgttacctcttagagatggcacgttagccctggttagatgaataccaggcttcatcctaaccattacaggcaaggtgttacacgaagaagggcaaacatgcacgttgttaatctgacgcgtggtggacaagaatgaccggtctgacactggtcgcgtcagcaacgagcagccacgatcccacgttgcgcccgtctccgccgggagtggaggtaggtgtgggctgtcccatcgaagtgtgattcggacggcaaccatatcaatctccgttcgtaaagagaaggaaagtccagtttggaaagggaagggtgcgtgtggtatccccttgaagtataaaaggaggaccttgcccacagagtagagggttgattctggcgagattgagagcctagaacaagggagagtttggctcacactttgtagctcattcatacacaaatccacaaaaacacaggagtagggtattacgcttggcagcggcccgaacctgtatacatcgccgtgtctcgcgttcccttgctagcagacaatctttccacatacagagagagcttgagatctcaccctaagcccccggccgaaccggcaaaggggggcctgcgcggtctcccggtgaggagccacgagctccgtcagatagtgatattcaaagtatggccgttggtttatttgcataaagctagtttcacaattcttttcacaagcttattatctagcatagactagtccagttttaattccagtatttattacacagcaacggttcttttcaccatccattgtcttcccaaagatggcttcccgttactggctgtaatggttttctggggtttactccttctcgtctctcgagaagatgatccaccagtataaaatcatcatgcatatcccatctcattcaatttaagaatttagagtctagccaagtgtaatacatgtcctgatgctcaatatccgcgagcacggctattcgaatagattggttttactcacactgcagtggatgtacactttacccgtactccgcgacttgcccaacacatgagcctacgtcccaacgaatgagacttgccaaggcaaaacctttcaataacctcacgttggcagtacccgctccatgaacttgcatcctcatgcactccatgaacttgcatcctcatgcactctaggtgtcatgagtttctagcagtgagaggagttctggcgctcccgggaagggaagactcacacatgcattaagttttagttaaattaaatttacacatggcagtcctaccgatggcggcaccactataggcactcgcccctcgcggccccaccaatggctgtcccatcgtaggccctgactcccacacaccaagaataaccactatgcagggatactgccttcgctcggctacgtactccgctaggtctatacccatacgagaagtacggttgtacgagggtcgtttcatgcttaactttacggctcggtccttaactgaccagggacggcactagccttttctggacaccacccaagtaccccagccgccccggtcgaaaacagtgtttagttttgtttctcttttcacaattcatgttatccttgtcatggcaatgtggtgcccatgcctccacatgccgcatctcaactaccttccttaaggtagttgcccaagcatatagcacttgataaatatgagaatgcatgattctaattagcatgactaagcatttgttcaatatcgactaagtacacacgttagcagggtttacaatggtcatacagataatcaatatcaaggcatggcatatttaacaagtagggcattcatattcacatatgtatagcatgtaattttatttaaatcaacataattttcgcaataggttcaacatgctcaaagattagtgatgacttgccttgatcgcagtcttgctatccctgctcctcaatcgactcaacaattccctcggaatctaaatttacgtgcgaaagatcggatttgaactcaattagaattcaaataaattcaccaaaattcaaacagtacaaagcatattgagaaaatgttatcaccagatagatcttgattttagatgaatttaggttcaagtttcattcaattccgagttaagatgagtgagttatgcttgtttaaagattcaattttgaattaattcaaacaattgtgaaatggcactgtgcagccgagaggggcattattacagtggctgacatgtgggccatccccctattttatttctggtttttatttttttaaaggaaatcctattgtgtcattgacaggtgggtccggccccctgttgaatctcctgtgggacccgcatgtcattgagacattcacttaaaacctaatttaattagatttctaagcatccgggcctacatgtcataggttcataataatatcattagttttagggattactgtacactaatgaagtggggtccacatgtcataatctctccctctctcgtgccttctctctctcccgtcgtcttcttcctcgtgctcgcgacgaagcagaggagcggcgcgcgacggtacgacggcccgagccggaacggctcggcgcacggtggggctagcggcggcgcatcaccggatgcccgccggcggcggcggcgaagcgcggcgaccgtccggcgcacggcgcgacggcgcgcgacggcgccgagatcccaaaatcggcggcggcacgatgaggaccaatgtgagcgcaaccaacaacgattcaaccatctagggtccacatggagtatatagaagcaaaaatctagcctaggttgtattggaacgaagtccccccacggtgagctcggccatggcgcggcggcggccggagtcggcacggttacggcggcgcacaccccaaatcgagggggccgttggtttctaggtgaccaggcgggactacaggcgcgagggcttaccacgaagtggcggaacggcgaagttcgacggcgagtggcgcggtgcggtcgaaacaggggcagacggcggtcggcgacggtcgcaagtgttcgatgctcgtactccctcgcgtagcggctcccggctccctccaacagcagcaacggcaacgggcacacctcctcaacacaccccgccacccacaccggccgagaggccctgcggcggcggcgcaacccccgcccaccaggtgttcgacacccggcggcggcgcgattttgttttctctgggatggagcaagaactccgggaaaggggagacgaatgagggttcgattttggataaggtcgagctaaaggcgagcttataacagcgagagggagggcgattcctattggataagatcactcgatgactcagccatgtttcgatctctcctaggttcgattcaatgccttgggccggcatgattgcctagacgatagggtcccaggagagggatcattagctgtgggaggaaccccccctattatccagcggtctcggtggggtgcgacaggatggcgacgcgacggtgacaagagcgacggcgacggacagagataacgacttggatagggggcgccgggctatgccctagggtgacgcggggttgtcgtggcggccgttatcactccatcccgagggcgacgtgtgaggggacgggatgacgcgggcacccgtggcggcgcagcctttggcgcgggcttttggcggcttggtcggcggcgggcccacgcggcgtggcatgacgcggtgcggcgcacgggcacgactagtgcggcgcacgagtcggaaagcaggcgcgcggcacggcagcggttggagagggcggcgtcgggtgttcggtcgggttaggcacagatcgaacacctggcgcgcaatgaacagtagcgccaggaaaagaaaaaggaagagaagagaaaggataaggaaaaaggaagggctaatctgcaaaatggcttggaattgagttgtaactctatctattttggattcaagaattcaaacatttgatttgaatatttatttggttattcattagtccccaaatgaatttgcttcccatcatcccaaatacaaatattttaatttgcatttttatttatttattcatatctctaccaaatgatattactctatattggattattccaaaattaacttaaataattggggggttttgatagtcctaaaattaattaaaatattcaatgggtccattattaatacaatagcacattggttgaacttatttgcataacaaggtattcatgtaaattgtaattattatttagatgcgcgtctttactttgatttttccattgagatgatttatagtttggcaagcaatatcaaccataacatccatcatgatgcaaagttttaaaaagtttaaaattttagtgatttttattatcgaggatttttaggatgttacacttaatctcgcgaggactcagtctcctgccacgcgttgcatccgcatctgaagtctacgccgcgtcaccgccgcaatcctttcgccctactccgacgcggtgtccaagtgccgtcctcttccggcctccgatgcggtgtggcggctcctcctttggccgcagcttttcccctcccctcggtcccctcctcccctacgcctctcggctgcccctgtgcggtgcggcagctcgtcctttgtccatggccacaacttgtcccctcccctccgtcccctatgcatctcggctgctggcacctacgcagtctccggcacaggatcacgataccctgagtttctttatggaagatgtatgagagagatgaagtatttctttcctgctggacattgctttgctgctatattcattggaagaatctgctatgttgatgggagaggctgagtttgatttatgttgtgtgccaagttctggacctagttccttgtcttttgatatatgtaatgaacctacttgattttgctgaaagtatgaatgtaataatagtaaaaaagaagtagatgttctgaaagtttgtagtttcttgctctgatgtgtaaactgttctttcgttgtagaccttaaacttactgtttcatcttaaacaaaattaacatcagcggtcattgaacaaattgtcaactatcttgaataaaatggacactattacaactagtgatcccacaaacaaacttctgaaattcttcgatctcttttctttgcttgcccaatttcttcttgcttgtgcgatccatggccaaaagcctttcagccatctcaatatctagcttcgttttttcttctttctgtcccctccttctagggttgctagtgctcgcgatccaatgcataccacagcgatggcgattccacgaacaaaggcttgcgatggcgtcggcggacgagctgccgaggccatattcgccacgctgagctcgtcgccatggtcacctcttcttgttggcgcattgaggttgtcgtcatccagggatagaacgactcccagaagtcggcggcggccagacctggaccggctataggaagggcaagttgggaatgggcaggttggcgacggctggttgcagtgagggaggaagcgaagtccggcgagattggctgcgccgctgctagggatgacggaaggggatcgggaagagacagattaccgggttggggacttgtaccgtctctacaaaaattgactaaccacgcgaaaatccaattctgcccttccaccagttccatacacgtgaacaaagggggaggtaccccgcaccggattcccgtaactcgcggtaccgacaattgtgggtcgtttgatctggctgaatggacggttacgattgcagtaccacgcggtaccaaaaattctgctggacagtaaaaattctcttaatttttataattgtagataagtagagatagagatagagattgaccggtctaacaaaaggtgtagacgtggtacacttgagcgcgtgaaactccatgatgataaggttcgattgttaaaatcctaaggcaaccaagattactatttaatatctattaaaagaaaattacatataaaaattttttgaaaattttatatagatgtagctgtgcaatttctcaattggttagtttctttacagctaatccaggccacccatgttcaagtcctaaacttattagcatttacggctaattattttttcagtcgtagtcctaaacttattagcatttacgggtaattattttttcagtcgtagtggtaggtgatctaccgtcgatagcaagatatccgtggtgacgtcatcaattttaaaatatgttggtccggtatttcggaggtgctcataggggtagggtatatacctgtgtatgtttatagggatgagtatatgtgcctgcatttgtattttgtttcttaaaaacatcatcaatttcgagatatgctggcccgatattttgtagatgctcatgtattcatgcgggtagggtgtatctgtgtatgttcgtatggacgagtatacatatctacgtttttactataccaatcaggttttgccttcaaacctataccaataccaatcagcattggattcgtcagcagatgtgttgatttgcataggtgaccgtctacacggaggagttagcactagtccaataacgaatttcccgtgcggtcgaaagtgattttcgcgtgcggatcttccacccgtctgtaacgaagtgcctgcaaaaattgctatttttgcgtgcgggtggcgcacccgcacacggtggttatgttgcccgcacgtaaaaatgaaaaaccgaaaaaaaatccaaaaaaaaaccctaaccctaaagttgctgccgccaccctcctcgtggtcgtcctcgtcgttgtcgtcatcgctgttgccggatccgccgcctccccaccgtccgagcccgcccacccgccgttaccgccgtgccggccaccactgccgccgcatcctggcaggggacggctaccgccgccagatccgggttgggggcaggtgcctccgccggatccgggcaggggccggtcgctcgccaccgtgcgcacgccatcgagcccgccgctcccggttgcctaccgccaagcccgccgctgccggagccgaaggaggcaaagaggtcggagccagaggagaaggagaaagtggcgctggcgccggtggtgtggcctgcaggatgcgaggtccacgcagccgcgtggtgctagcttagcggaagtgaggagaatattgagcggaggagaggaaagtgtggagaagatggagggggggggagaggagaaaggaaatttgattttttttttgaacaggttcatagggaatgagtatttttccgtgcgggtctattaggaggcccacctgcgaaaattgatttttgcatgtggttttcacacagaaccgcacacaaaaatggaggatgattttcgcagacgcgactagttatctgcaatctaaatgggtccctgtacaagaacattgttttttaagtagtgtagcgaacgtccttctatcaagaagaagtgggaagactataagttacccatctatgctctaaaaatactataagtactccttaatttattacccatcagctaaagatttacgatgttaatagagtcaccaaccatctcgatctagagaactctaaatcaatatggggtttgggataggacaaaggctgtgttcagatgacccttttcccaacccctctccctcattttccacgcgcacgcttttcaaactgctaaccggtgttttttttttacaaaaagtttctatacgaaagttgcttaaaaaatcaaattaatccatttttgtaaaaaaagcaaatacttaattaatcatgcgctaatggattgctctattttccatgatcactgttccggatgggaacttgttctagcgaacacacccaaaatccactaacggagccaatttagagatcagaccaacctctaggtcaatttggattgatttgaagttaaccatctgtctcgtgggcgaatcagaagctttttgagacaaacctatagagcgtatatcacttgtcgacgagctatatctatctatggtatttgtagagtatgaggattgttagtgctagggtatgcacaagattgaggaataagagacagaatatatcgatttttatataggttcggaccccttaactgacaggtaatagctcttctcctgttgaccggagtcattgttgcctttatatattagtctcacacgagtacaacatttgagttgacctaatctagtccctatcgatctagcagcatggagctctcacatgtgatcgacgacttgtgcagtcttattcctcaaacatgaactcgacgaaattgaatatatctctagatccctcatgtccacattgggtttgtctaaatttgtcctcgtgtctctttccttctagggagtcttgtatttatatcattgagtatcctcttatccaagtagaactaggtaactgatacaaacacacccgcaaggggaggctcgatcttcacggtagtaggttttgaaccaaagagcaccggtgtaaaccgtgcacaagaggataactagctttatacctgcaagggttggatgcgaccaagtggtgagggtgagaacgatccgaatcctcttggattccgacccatcaaaccaagcaatcacagaaccataatccaggactaatccacacaagagggggtaagacacttatgcaatcttcaacaatcgtctctcatctatgctttttataaagttaaagcccactaagtataaagctcaacatgcaaacatgctaccttatcattcactagcaacaactaattatcaaatagttcatacaaacatgcaatatcatccatactttatttaattctacaaatcagaatgcaaatagatccaatcatcacctctctcatcatttccataatatttcaacaaatatatccatcattttttataatacttaacatacatacatccatatattctgtatcaaagcgaagatattatttagtttgtttcatgtttactactaataaatcctaacttttcatttctttttcccctgtcttccgcttcttgcgatacaaattttggccaacaacataaatttcatctataatcctctacaaagtctattaaatttatttctcttcaaatatggcttgaaaaaaaatcagttttatttgttgttaataattaacatcatacttacttcttgctcgattgttgaaagatatatatgttagaaattacttagtaattcttgcagtaaagcgcagggaatcacctagtatatctataaagttcatccccactaagtgtagttaatgttatttctctcttctctcttgaagccgcatcatctcaattatttttagccattgtgtcggtgacatgggaccgggagtatcatgactagaggcttgaggcagacacaatcgcccacgtggcctggcaccctcgggggacgtcgggcccgagggtgatgtgtgcgcccacctcttggtctccccgaggggggggggtcggaccactcctgcctcgcccccgagggccgaggcgccccgacccctcgcgggttctactccgcgtgcatgggttaggtgagcccagcagggctcacctaaccgcatttattgcggctcggctaaacgtgtcacgccgcacgaaatacagtgcactccactcgtttatccggtctgtgaccagtcacagaccggtcaaatcgcgggttaggtggcgacaggcggtctgacgcacgcttcgccccatcccgtcaagacgagagcttctaggcactcgtccccagctggagttagcgtgttacatcccagagatggcacgttagccccggtcgatatatgccaggcttcatcctaaccattacaggcaagatgttgtgtgaagaagggcaaacatgcacgttgctaagctgacgcgtggtggacaagaatgaccgatttgtgatcggtctgacactgctcatgtcgtcagcacacagccacgttcccacgacgcgcctgcctccggcagaagtggaggtaggtgtgtgccgtcccgtcagaaggatgttcggaggacaaccgtgcaaatctccgtccatttatgaagagaagaaaagtccagtttagaaagagaggggtgcatgtggtatccccttgaagtataaaaggaggaccttgcccatagggaagggggatgactttttccagattcagtagctagaagaaaagggagaggttggctcacactttgtagctccttgatacacagatccaccaaaacataggagtagggtgttacgcttctcagcggcccgaacctgtatacatcgcttgtgcttcatgctctttcgataggtcgcgatctttccacatacacagagagcttgggatctcaccctgagcccccggccgaaccggcaaaggggggcccgtgcggtctcccggtgaggagccccgcgctccgtcatctggcgcgccaggtagggggctcagcgtgtgtcttctgagctcttgcgctctttcgtgtgcaccaagcctttcctgttcagcctcatggctgagcaagcaaaggtgcccgacctctctcccagtgtgagtggcgacgacggggagccgaacccacgccgtcgagctcgtactccaccgcctcctccacgccaaagtcctgggcgggagaaggcacccaagagggctgaagggtccgcgacttcggcatccacaggagctgggaaagggcggcgagatggggagcgtcgcctcctcgtctatggtgacggcagcacgccccagggcgcgctccaagctgcgggcgcgctcctacgtcacccgcctgtcgcccatgacccggagtctccagcccaacgatggctggacgacgtggccaaattggtcatgacggcgcggcagcgcctagacgctggtgggcgatcctccgccaccaagacctctggtgctgctaccaccggctccgcgtcgtcaagacggagggcacgacgagcggcagccgctgttcgccgttcggctgccactccttcatcgactccttcgacccgggaagatctgcgtggggagcaggacgcccgcgccagcatcgagcgccggcgtaatgaccgaagtgctgcccacgcaacggaaggcgcttcctcgtccagagtgtcacctcgacacggacgtgggaatcagccctccgtgcccccggttggtggtgtcggctgtagagcctttgtggcgagtcttcggaatgtccgttggcccccaaggttccggcccaccatcgccgaaaaatatgatggcagcgtcaaccccgccgagtttctccaggtctacacgaccgggattgaggccgccgggggtgacgacagggtcatggcgaatttctttcccatggccctgaagggacaggcgcggggttggctaatgaacctgccccccgcgtcggtccactcctgggaggatttgtgccaacagttcaccatgaacttccagggcacatatccgcgccccggtgaggaagcggacttgcacgctgtacagcgaagggacgacgagtcacttcgatcgtacattcagcggttctgtcaagtccgtaataccataccatgcatccctgcacacgcggtaatctacgcgttcagggggggcgtgcggcacaaccgcatgctcgaaaagatcgcctccaaagagccccagactaccgcagagctttttcagctcgcggaccgagtggctcgcaaggaggaggcctggacttggaacccctccggttccggtgtggctgcttcggccgcccccggatccgccgctcagacagggcggcgtgacaggaggaggaagaagaggacagtccgttccgacgacgagggtcatgtcctcgctgtcgagggcgcttcgcgggccacccgaaaggggaggcctgtgagcgacaaaaagaaggaggccagtgctcccagcagggagcgccccaccggcaagtggtgcaccgtccacaatacctccctccatgaccttgcggactgtcgcgcagtcaaaaatttggctgagcggacaagaaagtgggaggaggagaggaggcaggagcgccgggaaggcaagtccccggcggttccttccggccatcggcgaagtgaggctaagcagaaggcccccgccgaggacatcgatgatggcgatgatgacctaggtttccaagagcctggggccaccattgccactgtcaatggaggagcgtgtgctcatgtttctcgccggagcctcaaggctatgaagcgagagcttctggccgcggcccctactcataaggcgacgcgccgggcgcggtggtcggaggttgctctcactttcgaccagaccgaccacccaccgtgcgttgcccgaggagggcagattgcgatggtggtttctcccaccgtttgcaacgtgaagttggggcgtgtcctcattgatggaggagcagccctcaacatcctttcccccgcagcctttgatgccatcaaggccccggggatgatgctccggccgtcccagccaatcatcggtgtgacgccggggcacacttggccgctaggtcatatcgacctcccggtcaccttcggtggacctgccaatttccgcacggagcgggtaaacttcgatgtggcggacctcagtctgccctacaacgtggtcctggggaggcccgcgttggtgaagtttatggcggcggtccactacgcctacctccagatgaagatgccgggccccgatggccccatctctgtccatggcgacctcaaagtcgcgctcgcttgtatggagcagcgcgcggaccgcctcgccgtcgtgtccaagcccgagggtggcgacgagaggcttggctcatctgcccccgccgccccgaggcagcggatagtcacgtgcgatgaggtcccggtcaaggaggttgccctgggcgacggcccgtccaagaccacacggatcggtggtcttctggacggcaaataggaagacgcgctcgtctccttcctgcgggcaaacgctgacgtcttcgcatatagaccggcggatatgctcggggtccccagggaggtgattgagcaccgtctcgccgtgcggccgggcgcaaggccggtccggcagaaagtgcggcggcaggccccggaacgtcaagccttcatccgcgaggaggtggcgcgacttctggaggccggattcatccgtgaggtcatccacccggagtggctggcgaacccggtggtcgttcccaaggcgaacggcaagcttcggatgtgcatcgactacaccgaccttaacaaggcatgtcctaaggatccttaccccctgcctcgcatagatcagattgtcgactccacagcggggtgcgaccttttgtgttttctagatgcatactctggttaccatcagattcgcatggctagggaggatgaggaaaaaactgcgttcattacccccgtaggaacttattgttatacgacaatgcctttcgggttaaagaatgcaggtcctacttttcaacgtactactcgaatttctttgggtagccaattaggacgtaatgttgaggcttatgtcgatgacttggttgtaaagacgcgcaaccaggaaacgttactttcagatttagcggaaacttttgagagcctccgctccgcccgcataaaattgaaccccgataagtgcgtgtttggtgtacctgcgggcaagcttctcgggttcttggtctctgcccgaggcatcgaggccaaccccaagaagatacgagctatagagcggatgcgcccccccagcaagcttagggatgtgcaatgcgttaccggttgcatggccgccctaagtcgtttcatatcgaggctgggagagaaggcgctacccttatttaaactcctcaaacgctccgggccgtttacttggacggaggaggctgaacgtgctctcactcagttgaaagtgtatctcagctctcccccagttctggtcgccccggagccaaacgagcccctgctgctctacttagcggcgaccccccaagtagttagtgcatcgttggttgtggagcgcgatgaggacaatcctcattccgcgcactctcaccctgtgctgactaggcccgggagtgagcagggaggagaggcccccgagccgaatagtggcctaaggcccctaacgaccggagtcggcgctctgcccgctcgtcagacggtgctgggtgcccccgaccctcaggaaggccccgaggccactgcgggaaggccgcacctatcgccctttgaccccgaggctaaccctgtgctgactcgacccgggaaagagcagggagaagaggcccccgagccgaacggtggcctaaggcccctgacgaccggagtcggcccttcgcccgcttgtccgacgacgccaggagcccccgacccacaggacggccccgaggccactgtgggaaggccgcccctgtcatcctccgaccccgaggtcatcggcacagaagacgagtgcgccccgagaggccacttggacgaagagcgccccggggatacggcccctagcaaagaggatcggccccaccgaaaggtgcagcggcctgtctactttgttagtgaggccctccgggacgccaagacccgataccctcaggcccagaaaatgctttacgctgttctgatggcctcgaggaaactgcgccattattttcaagcgcatcgagttacggtggttacgtcataccccctcggccaaatcttgcataatcgagagggtacaggacgggtggtaaaatgggcgatcgaactttctgagttcgatttgcattttgaaccacgccacgctatcaagagccaggccctcgccgattttgtggcagagtggaccccggctccagagcctgtctcaatccccgaggtcaactcggacccctcgcagccgccacacaccggccactgggtgatgcagtttgacggctccctgtctcttcagggcgccggtgcgggggtcacgttgacctccccgactggagacgtcctgaaatacctggtccgcctcgactttcgagcgaccaataatatggcagagtacgagggactccttgccggactcagagtggcagctggactggggatccgccgcctcctggtgttaggcgactcccagctagttgttaaccaagtctgtaaggagtaccggtgctctgacccgcagatggacgcttacgtacgccaagtgcggcgtatggagcgccattttgacgggatagagcttcggcatgtgcccagacgggataacatgattgccgacgaactctcacggctcgcgtcctcgcgagcccagaccccaccgggcgcctttgaagaaaggcttacccagccgtcggcgcgacctgaccccctaggggagacgggtgtgcctgaccggcccccgaggcccgtcggagtccaggcctcgggacccgaagggagcgctccaagctcccttagattgattgcttggatcgctgagatccaagcatacctcacagataagactctacccgaggaccgcgaagggagtgaacgcgtccatcgcatatccaaacgctacgtgctggtagaagggaccctctatcggcgcgcggctaatggaatcctcctgaagtgcattccacgggaacaaggcgttgagcttcttgctgatatccatgaaggcgagtgcggagcccattccgcctcgcgcaccttggttggcaaggcctttcgtcaaggattctattggccgacagctctcaatgacgcggtcgacctggtccggcgatgcagagcgtgtcagttccacgccaagcaaatccatcagccggcccaggccctgcagatcataccactttcatggccatttgctgtctgggggctcgatatcctgggaccgtttaggcgggccccgggcgggtttgagtacctgtatgtcgcgatcgacaagttcactaagtggcccgaggcttatccggtcatcaagatcgataagcactccgcacttaaattcattaagggcatcacggcccggtttggagtgcctaaccgtattattacggataacggcacccaattcactagtgaactcttcggcgactactgcgaagacatgggcatcaagctctgcttcgcctcacctgcccaccccagaagcaatggtcaagtggagcgcgccaatgcagaaatcctcaaaggccttaaaaccaagaccttcaatattctcaagaagcacggcgattcatggatcgaggagttgccagcggtgctctgggcgaaccgaaccacaccaagccgagcaaccggagagacgccttttttcctcgtctacggcgcagaagcggttctcccatccgagctcaccctgaggtctcctcgggccaccatgtactgcgaggctgatcaagatcagcttcgcagagatgacctcggctacttggaagaacgaaggcggcgtgcggccctccgagccgcacgctaccagcagagcctgcggcgctaccatcagcgccacgttcgggcccgatcactctgcgtcgacgacctcgtcttacgccgcgtccaaaggcgtgctggattgagcaagctctcaccaatgtgggagggtccgtatcgagtgatcggcgtcccccggccgggctccatacggctggccacgggcgacggcactgagttgcctaacccatggaacatcgaacaccttcgtcgcttctacccctgaggggggggtcgggcgtcaggtttcgggctcgggccaaccccgcacccccccctcgggagtgcagggttggccgggggctgccacacatgcacattctcttttctcttatttcagtatttcaataaaagcagtttcaatttcctaagggctgtatctgtgccgttttttcctttttgaagaattttgacttgaaataaaatcactcgtgctcaaccttgccctcgggggctcggttcggtcagctaaaatcgccaaacggggcccagaaccgagccgtgccctggggcgtggtgaactccgggggggaatcggcaaaaacccacaatcgggtcacccataaccctcggtcaccacgttcccggcctggccagcctcgacatgtggatctccccaggcactagccccgacccgcgcctttcgagggctgggacttgggcacgagtccttaaatcaagctaagacacaaaagaggaccacggcacagatcatcctcatctcatttgcatagcaaaataaaattaacacaaagaaaattttcatcatttttgattgcagattaagttgatctatacaaaaaagaggcctgaaggccttagaagaaagaaaaggaaaaaaactggagattagcgggggcctgggggctcaatccgatgcgcccgggtcgccggcctcgtcgtcacggtcgtcagcaccgctggcgtcgccctcctcgtcggagttgggggcgaacgcgagctgaggggccgacccctcgaaactgtggacgatgtggtcggcggcatccctgacccgcacgcgcgcgtcgtcctcggtcccgggagggaactcatccagcgccatccacggagagaagttggggtccctggcctggtagctggccaggacaagctccaccgctccttgagcgaggtccctcgaggatgacttgatgatcttctcgagctcctcggggagctgctggagagctccggccatctttgagaggtgctgagcgaggcctcccaagttggtggagtacttcatcgtttggcccttccagaggcccgcctgccgaccggcgcgatccagacgggagactgcatcccaaagcatgccgggccctatctcgcccgccaagcggagggcctcggcttccccggcggatgaatctagcgcgcgctgcatgtcggtgacgatgtgttcggcatctgcgaggcgggcggctaagtcgctttcgcccgcagccgccccgccgatgcgtgccctcgcgtccagctccttttcccgcgcctcgaggtcggcagcccgctgctccagcgtggctctctcggcgcggacggattccaagttgcggcgcgcctgctccgtcagcgctgcctcacggagggacaggctgtccgccaaccgttgcgcctcggcctcggcctcttcgagagctcgctctcgctcggtaagcgcgtcctcgcggaggcggagtgcggactcctcttcggcgcaggcagactcgtgcgccgccagcgttgcctcccgggaggtgacggcggcctcgcggtccgccaggtccttctccgcgacgcaggcgcgctcctccagcgccatggcgcgtgcctcgagggcctcttcacgccgccggagcgccgcttcggtctccgttgctcgctgctctcgggcagcggcggcatcaaggacctcctgggcggcgtcgagctttttctttagctccgcctcccagctcccgtgttgaaggcggagggagtcctgcgcctcgttcatcacagtggtggcgatgagggcagccccccgctcctcctccacctctcgggcgatctccgccagcgccgtcttacgggcttcaagatctgagacgtgccggcggtgtgctttgcggcctgcttccaccatggcctccaccgagcgccgcccctcctcgacacgcgcccatgcggcgtcgagctccgcacgctccgcctgcagggcctccacctgggcgcttaatccatccaacaccgcggtgttggcggcggctaaggcctgcagaaggggctctgcgctcagcggggcgacggaaggcgtggggaagagctgccttggagaagatgccgcgcggctcggcccgccaatggacgtgccggcctcggggatgtcccccggacctgtttggtcctgggcgtcgcccgaaggagtgggcccaagcgatgcgcccgcggcctcgtcgcgagccatcctagaagctgtcgcctgggcatcgcccgaggaggtgggcccaagcgacgcgcccgcggcctcatcgcgagctgcctcggaagtcgccatcgcctcagcctggcgagcccgggcggcctcctcccgagcggcttcttcggcttggcgagcccgggcggcctcctcccgagcggcttgcggttgtggcagccgagatagatcgtatcgtgcgcgcgttaattacgctcgccgaccgaagcgacgttaccatatctccaggcgaagcaaatcggctcgcccagatttgggcgctgctcaggtgaggtgacagtcttgaagagaccgcccattattgacagccaagttaccattaccgatgcgcatggtttgagaccgttgggtttctgcccaaccatggagaccggtcccacctgtcaccaggctttaggagtggcgtcacgcccgaccgcttcccttgagaagggcgatcgccctggcataacgccgggggctactgtcggtgacatgggaccgggagtatcatgactagaggcttgaggcagacacaatcgcccacgtggcctggcaccctcgggggacgtcgggcccgagggtgatgtgtgcgcccacctcttggtctccccgagggggggggtcggaccactcctgcctcgcccccgagggccgaggcgccccgacccctcgcgggttctactccgcgtgcatgggttaggtgagcacagcagggctcacctaaccgcatttattgcggctcggctaaacgtgtcacgccgcacgaaatacagtgcactccactcgtttatccggtctgtgaccagtcacagaccggtcaaatcgcgggttaggtggcgacaggcggtctgacgcacgcttcgccccatcccgtcaagacgagagcttctaggcactcgtccccagctggagttagcgtgttacatcccagagatggcacgttagccccggtcgatatatgccaggcttcatcctaaccattacaggcaagatgttgtgtgaagaagggcaaacatgcacgttgctaagctgacgcgtggtggacaagaatgaccgatttgtgatcggtctgacactgctcatgtcgtcagcacacagccacgttcccacgacgcgcctgcctccggcagaagtggaggtaggtgtgtgccgtcccgtcagaaggatgttcggaggacaaccgtgcaaatctccgtccatttatgaagagaagaaaagtccagtttggaaagagaggggtgcatgtggtatccccttgaagtataaaaggaggaccttgcccatagggaagggggatgactttttccagattcagtagctagaagaaaagggagaggttggctcacactttgtagctccttgatacacagatccaccaaaacacaggagtagggtgttacgcttctcagcggcccgaacctgtatacatcgcttgtgcttcatgctctttcaataggtcgcgatctttccacatacacagagagcttgggatctcaccctgagcccccggccgaaccggcaaaggggggcccgtgcggtctcccggtgaggagccccacgctccgtcacattggatgattcatcaagggtgtaaattgcacctcttcgcattatctaaattgtttttaggctttggatgatttatcaagggtataaattacatctctccccccccaaaaggcataccatacaacccaattatttataacctatggataactgataaaggtaaaaaaataaacacatgaaaaaatcatatagtagggaaaaaagaaaattttagaactcatatatactatattatcacacaattctcctgcagcaacacgtggggtacccatctagtacatgaggttttaattgaacaaaagttgtctaatggataaagtagagtggtatttatactaggaacatccctcctagcttagtgtgaacataagaaaccacatccaagtaatcaaggctaacataaatgagaatgcaaaaagttttctcgggttcgcgcacagcccttcagctcctgcacagccttaagtaaaattactctaacttcttattggaaaatgatattgtaacccttgagaacgttctcaaggtaacctatccttcttggcgtagtgatgatgccttcagatataaaccatagcaatataaaggtagagcatttaggtagtataaaactctcactaaaatttgggttaagttgagcaaagagtgagttcacctcttgttgtattttcctagcattgaggtagtataatttaaaaacataaaaagataaaaaacataaattacatttatcattaaaaaatacatccgcttcggtctccttccctcttttctccctgaatagatgagatcacaa

SEQ ID NO: 7493 - DNA, 63067 bp, Oryza sativa
  unsure (1)..(63067): unsure at all n locations
aagtttcacatttgcgtgtttttggttgcaagtgatttgtcttgaaatctggaaatttggataagtttgaggcatgttctaccaatggattgtttcttggttaccccacacacactcgtggctatcgtgtacttattttggagactaacaaaattgttgtgactagtccaggtactagacccgatattgtaggttcagtgggaggatggtcgtatttttaaagacgagagcgacgatgacgacgaggttggctcggccggtcagactgggcgccaggccggtcagaccgccggcacaccgccgatcagaccgacacaggtgttgcggtcagaccggccaggctcgtcaggtcccggtactgtcgatgctgatcgagatggacctccagagattacaacttcgactagtactgatacagaacgtgaatcaaccaagtgggttttcaaaaataaacaaaatgaggatggtttgattgtgagaaataaagctggactttttgctcaaggttttacccaggtggagggtttggattttgatgaaacttttgctcatgttgctagaattgaggcaattagacttttgttggcttttgctgcttcaaaaggctttaaattgtgtcgaatggatgtgaaaattgcttttctacatgattttatacaggaggaagtttatgtcaaacaaccaccaggttttgaaaatcctgattttcccaaccaagtttttaaattgtctaaagctttgtatggtttgaaacaagcacctagagcatcgtatgataggcttcagaactttttgcttgcgaaaggttttacaatgggaaaggttgacaaaacgctttttgttcttaagcatggtgataatcaaaaaaaacccctttgtttgttgtttgttcggatttatgtggatgatatcatctttggttgttcaactcacgctttggttgtggagtttgttgagactatgcgcagggaatttgagatgagcatgatgggtgagttatcgtactttttgggattgcaaattaagcaaacacctcaaggtacatttgtgcatcaaatgaagtacacaaaggatcttttgagacggttcaaaatggagaattgcaagccaatttcaacacaaattggttatacagctgtgttggatcctgatgaagatggtgaagctgttgatcaaaaggagtatagaagtatgattgaatttttgttgtatctaactgcttctaggtcagacatacaatttgctgtgtgtttgtgtgcgcgctttcaagcttctcctcgtgcttcacatcgtcaagcggtcaagcgaataatgaggtatttgaatcatacacttgagtttggaatttggtattctacatcatcttcaaatatgcttaagtggatattccgatgctgattttgggggttgtagaattgataggaaaagtactagtggaacatgttattttcttggtacatcattgattgcatggttttctaggaaacaatctactgctgaatctaaatatgttgctactgctagatgttgttcacagattctttggcttttatatactttaaaatattatggtcttacttttgagaaagtacctctcttttgtgataatactagtgctattaacattgctaagaatcctgttcaacactcacgcacaaagcacattgatattcgttttcactttttgagggatcatgttgagaagggagatgttgaattgcagtttttggacataaagttgcaacttgctaatattttcactaaacctttggattcataatcattttgcttttcttcatgttgaattgggaataattcatccttttggcatgttttgagggggagtttatacctgatgattttatcaagcaaaaatatggcaatgagaaaattgaaaaagagagctttgtttatacatatggtattttcttgtgcatgctagcaatactttgaaggtttatttgtttttagcatagcttgtatgtattctagtcttttcatgagatttagattttgcttttaacggagatgatgcatgacatttaaattctacacttgaattaagcaaatatgcaatgttgatgctagcatatggtttgttttataaatgctctacatatatgctttattgaattgttattcctcaaatagctttaattgctcactgtgaaaagagaacaaaaatatgaaaaaaatgaataccgaatccttggaaacagtcttgacgacaaggacgtattcgatgtgagcaaaataatgggtgccaaatccctagaaacagtcttgacgacagagacgtacccggaataaaagagaaaaaaatatgagcaaaaaggctcaagaaaaaaaaaagttaaaaattctcttggttgttttgtgctaaaggtaattttagaaagagtgataaatgcaataggtatatgtgtttagtgtttattcttcaacctatgtgcttgttaagatgttgcattataaatcgcatgaaatcatgaattttgattgttgattcaagcttaattgtaaaatctttggttcatggttatactttaatgcatgcttgttatgttttagatgggttcatcttctttttattacaacacatgacttgatatgctatatgtatgctaagctcttgaacattaatgaacataattcttggagaagcaaatgagttgagaagagcatgttgtttttggtccgattgggaatttctttcttttcaaaagtaagagaagttttcttttgtattttcgagcacgatgtgtactttttgtatgaagtgtgctttttaccacatttgttttatttttccaaacaccaaaacatttttgatgggtttgccaatgtgttcatcaagggggagattgtaaaatcaaagatgtttttgattgttattctgtgatgaacaattggcattggagattattagttttgatatttgcaatttatttacgaagtggttttggagatgattggatttacaggtgagtaacaggtgttgttattttatgtgaccggttagaccggacagtgtgtgtcggtcagaccggcgtgtatcgcgcggtcagaccagcgcagcctgcggtctaaccggccaactctgtgtcggtttcggtttcaggttgtttgttcggatatccgtgattgtttcatgattatggcttctaaatggatactatgcgtatgtaatactgttgtttgctaataatgagtcaagttggagatagcttggtctcggaatatggtttctttgtttatttcatgtgtaggtgactcgatgcctcgggagagtatttgcggtaatggatcaggagtcggcttggggataagacgacgtccgtggtggtcagagatcatgcgggatacttaggctagagttgatggacgtggttggtgatgatttcatatggcatacgatagaggtattgtgtgtgtatgggatgcggagtcgaatttggaaggagtccaaatttggtatgagtggttatgtaaagtttgtttcttgtactagagggtttcctaaggtgtttaggacttctagtatgagtttggttcgtggctttaggctgcctaccttgggtataaaaagaggaggagcgtgaggcttcccggtatcgcttttgagatcaattgagagttgagagtttagttagggtttcatgtttagtcgaaatttttgtaaggagtgttgttggtgcactttgtaaacacagagagaatcaataaagtcgtcatccactttaagagttcttcgatttgtgtttcaccgagtttcggcggtctaaccggcggcgcaccggcagttagaccggcggggacacggcggtcagaccggcttcggcaacaggcgacaggagctaatcttggcggtcagaccggagatctaatcttggtcagaccgacggcaaccaggcagtcagaccggcaggacaacttcggtcagaccgcgatccgtcgaattcgaggataacttttatttccactaaaatttttcggtttttgggtataccaactattcacccttttctggttagcttagttcttatgatttaatcctacagttgctgcgtggatcaatgtacccaagtatcctgcatcttgatgagaaccaactaagctgactaactcctaccaaccaagttgcctatatataagagcaccactgcctcatagcaaaggtctatcaattgatcctcaccgcttacacaaagcagttgcaaaaactcccatgaaaaccaaaacaatgtaatatgccattcgacctctcaaatatcgtgggcatgaacatataggcatgcgaagcatcaggagccattctcacgacacattggttggaggtattacactcttggaaggttgttcgagtaatacaacgctgaaccttgtgaggttaacctggtcatgaggatggactctaaaaatatgtccagtcgcctgttatgcgaacagaggaacaagtactggcagcctagcaatgctggcatcttcgttgcttcgcatcacagcggcaggcggcagtggttcctctggtcaaacggggcagatcaaggatttggagccatcggggtcataacgtaatacatactttacggtactagcatttataagactagatgacaccatactttctagctaattatttgtggtttcttctcacaaaaattaagatataccaatgatgtaattgattaatgaaaaaaaagagagtgtaacttatggtatcttctcgagtataaagaaacatttttttttgcaaacttttatacatacataaagctcttattaaaaagacacggccattagggaatgatttaatatcaaataattagaaattagaaggggtgaggctttaaaccctggtcatctagcccaccaccttgtggagctagccggaacaccttgggtgtttctccataaagctcttatttgttctacacctaattattctacattgttaaagtataaactaaataaaaacaaagtaatgtagcatttcatctagctagattattaattgtttaacttgtcaaaactaagtaaatcaacgggctaggttaattccacctatatataaacagaactatactatacgagaagtgaattaagcaactgttgcacgtgcaatactaacaacagcaaaattgttctggctttccctacaacaaaatacggagtatattgtttactagctgttagtgcgtgggctagagtaaattagttagtctgccggggtcagtgagctttaatcgatggtgtcattggctaaaaacacagaggattatgttgtatttgtaagataccatcggtgtcacctgataccgatagatatactgtacatccgccctcagacctgtagttgactatggcttcccttaattacttttctcgcttcccttaattacttaacaacgggagaatgctacagagagaacatgtagcataaacagaaagatcgtgctgtatttgagagcactgtgactccatgcttgtctgactagaatcttcagacgaatccattcatgcgaaatttgatcgagttgtgttgttcctcctgttgttgtttggaccatattcgagagactaatatatatccaaggaatgtttgaaatttgaacgtcatcgagcacgcgtctacgccatcaagctttggggtgccgctgcgttcgcccccctcgggtcgcagtgccgctgcctgtggtccacacctccactggttgttgcagtgctgagaggcgccctcctcagcatttctacatcaccagtggacttcttgccgctacatcgacatggagctgtagctgtgttgtcctctcggaccgtagcttcgccgctttcgtcgtcttcatcgccgttcgcgcatcgacaacctcgtcgtccgcactggtcatcgtcggccgctcagggtcttcttcatcgacttcgagcatcgccgccgcatctccaagctgccactgtcgccactctaggccggtggtccagctacctctacatggctaccgacatcgccgtccaggccattggtcccgctacatcaccttctacttcgtccaacatgattcatcgccagcgtcgccgtatcttcctcgactacacttcgctcttctccagcaactgtgtgctgctccggcaattctccctctacgctgttctcgcgccgcgaccgtctcggaggccttccctgctagtctcctccgacattagcgtatgattcatggtggtctcctgtctcgccgcacggtattggcaacactgttgcgtgcgttcgtcccgagttgtccccgggtctggcaaaccctgtgtgacgtctcgtccttcacggttcgactacatcggctcttcggcgtcatcttcctcaacgactaccgtgattgtgtcaccgtcttcgtctccagtgcgtcctcacgcaccttagtccacgacgcccctcccgtgcgtccacgaccactctgcggcgccccatgcgcgtcctgcggctcgactatctcgacatcagcttcctgacttcggctacattgaccacggctactgtacgcacggctacctcgaccatggctccctcgcaaccttcgctttggctatgtcgactatggcacaaagggttatcatccgtattgagcactcttgccggtttcttctctactccaagtgcccgcactgctcacgcttggactgcggggggatgttagagtatatggtagttagagccacattaggataggattggtttgtttggattcctttcatatctgtaatccttctttatctcttccctatgtactcctatatatatcagccccctgaggctcaatacagtggtccaatattcgcagtatcctctcttcctatactatccaacaacatgcacctcagaggaacagaatgataactaggacttcaacttagctcactcgttctaggaacctatgcaaatggttgtcacattctccggatgtctctcagtcctatgcgtgtctcatactgattattgccataattaacataattacataagctgcttataatttacacgttttaggttcactggagaggcgaaagagcaagtagcctagtggttatagtgacctgagtagcactctaatatcctgagttcaaatctccgtatgagtgaatttcagattaggttgtttccgggctaaattcgggaaagtctcaatgatgcaatttattacataattagatacaaattaattagtagagagagcacttaggccctgtttgattcagcttaggattattataatctggattattaggagtaacctcaaacaaacaagtagattattatgctatattattataatctataagccagattagtataatctaataatcttctctggaagagctttttctagattattgagtggctaaagacccgctactcttagatgcttccaataatccaaagaaacaaacaactgcaacttaggccatgtttgattcagcttaggattattataatcttgcttattaggagtaagcgaaacaaacaagtagattattatagcagattattataatctataaaccatattattataatctaataagcttctctaaagaaacttttttcagattattgagtggctaaagacccactacctctacatacttgagaaaaattacccacctatgccatcaaccgaacagatagctgagggcattatagactttagcctttcaaacccaataatccatgcctccaataatccagacaaacaaacaactcacagcttattttatatcagcttattataatccagcttatagcaatctggtttaataatctagattataataatcataaactgaaacaaacagggccttattctatatcagcgtattataatccagcttagagtgatccgatttaataatctagattacaataatcttaagctgaaacaaacagggccttagtacaaccaagattccaaatttatatatgtaagggaaagtctcaatgatgcaatttatcacatacttagatacaaattaacaagtagagagagcacttggtacaactaagactccaaatttacatatgtacagggaaaacatatcatagatctcgcttccctgttatatgcagggaaagtctcaatgatgtaatttattacatacttacatacaaattaacaaacacatatcattgatctcgctttcctgttatatgtgtgatctatataatactttttgaaaagaaaaacacataatcaacaagcagtcctacaatttaaatttaatagtaacaaatatagcttttcaaccaactaccttagcatggtttatatgcaatatgcggagcaactcataatgccatgctatatgataaatggaacccaatgaggtaatgtgggattagtcctttctaatcatatccaatgagagggtttggcggttgtatgtattctttttacatgtaacacgtaagtacctacgtattagagataagaggagtgattagccggaatgatcaggaggggtgattagcaagatttttcaagtctaatccaatggtcatatatcgatttaactgaaaaatcgagggaaatcactaccagggagcgggaagctaccgtgtgccaataactcttggtaacacagcgaaaaaacacgggaacagagcttcccgagagcagactgtcgggaacagacactcagcagcctcacacctttaccgtgcaatatttcacgtgagactacgcttgtacactcggtatgacaagaaaatttactgggtgaaagcactttcttggtaacaatgtattgaccggcacaggatgggttgcgaaaacggaatgggggtgttaccgagaggtactaactcacgggaaggaataaaatattaccatgtgttgtagtcaaacacacggtaccattagataacttaccgagagctattaacactaggtaacattgaatacttgattctaggaatttcataaattcattgtcgtactacactgaaacgcagcaacaagcaaacatgaaaggcagagcgcaaggatacatcacaggaacatgtcatgtgaacattagctgcaaattctcccagtattaataggaacatcatggtacaataataaaatattaatagatctacaaactggctgcacatgatgcaatagaaatatatgattctcaattcttacaacctctcgcaatgagacaatatatagacaaatgctagtggccgactaaccaaatgtgtgctttgacagcacaaatcaactctttagtgttttgccatgattgttatatgcctgaaattataaaaaaaaaacatgtttagtgccaaataagattacaacacaactagattatttagaggacactacgtacttgtggatagttcacaaaataaattttcatttgggacttgggaggcaggttataataattttgcagtgtgatctccaattaagtgaagtgtgtaccttagaaatattcgtcaaacaagatatttctatggatgaatcagaacagtaggattttgcagtcattgtcatcatgttgaacagatgatccattgagaatcttcaactccttgtcattgcaaatttcttcagtattcctgctagtggcaaccttctcaaaatcattgtcaagttcttgaccaaggcactgtttattatgaaaatattgagtttcggaactaaagttatcaagtaattaattggtttgtattactattctagagtttcagaactgaagctagctagatttcctaatatgatatgaggatatgcatggtctacagccaccagtaggctaagcagtgacatttgtatcgagggacatgattgtgcattgtccgcacttgatcaacaaagtatatggatgtgaaatttaagatttcatcaagaatgtatggttctgatatggatgaaaaataaactattctttttgccgtaataatattttttagtcggaaattatctcagctgcgttcttttgatgactgagaaataataattgagtattaactaagaaataggatgagctagaattcagaacttcacttgtgataattgaagtgcatatgtgcactacagaactagaaatttctaaccataatttctaaacttgctaaccggagaaacactttaccaaagattaagtaatagaaaataaaaaagaggagaagaattatatccttttttgctgttagaaaccagacttgtgcgaatatcactttgctctgctcgttagcacagcggtcacacaacaactccctgagccagccaggggcaagcctcgcaactgcagccgccgcagcatgcctgtgctgcttgttgcgtcgctcagagcatctctcgtgtaaattaaaattgcaggcacatagagaaattagtacaacctgaaaaatgctgcatccctccaggaggaaagtggatgaatggcaccagctgcagcctccaactcgatggggcgcgtcacagcgtcgtaggcctggatgcagcagagtacccattaggatattactatattactagatccaaagagaaaatgatgtgtattttcataaatcaagaaccatattcgcataaagatgcaagaaccactcaacatgcgcataccacacagattgggaggaagcagttgcagcaggcctcaatgcccagctcgatgatgattgagagccttgctgaacggctagacaatggtagacaaatccacagagtggatggacgtggacgtgcagggccacgcttgccggccttgtgaagggatgaggatggggacgcgcggtcgcatggctgggatggctgcctgcgacaaggccagcggagagggaaaagtgaggaggcgatgagaggagagcgaggcggcggcggaggcggagaatgggagaaaattgatattgtgccatcctcaaaagtgggtttcgcccaaatgccacgctgggagtgggcttcgctaaaatgccactttcaatcgaagactacacgctatatataatgcccaaacggacaaaaatacccctgttactaccttcttccacctctgacaagggatgcctcgccggctcgcctctgccgtgcccgcttcatccgcctccacctccgctcccgtttctcgccgcctccaccacacccgccacatccacctccacctccgctccccttcctccccgcctcatcctcctccacctccgcttcccttcctccccgcctccaccgcgcccgactcatcctcctccacctctattccccttcctccccgacaacccttgcctcgtccgcctacacctccgctccccttcctccccgcctcgaccgcaaccaaccgatgaccccgtggtcatgctccatgccatctacgccgccgacgccgacgtcggcggtctccatctttcgtgccaacccgccgtccaagccgctcccgttcttccaggcagcgaaggcgcgcccgcacggtggagtcgttggtgggcatggccatggcgaaggcgcggcacggtggtcatcggaggtggaggcgatggcggcggcggtcgggataggtgcgggggcccgcggaggtggggctgggatgggggcgatgggaggaggcacggggaggggagccatgggaggggtccccgcaggggcctgtggtctgtggttctccatggaggagagctcacgcgaaggcggatggtggccgccagcgagagctgatggtgatggagggaggaagaagatgagaggagggtaatttggcccaagatagtattttagcgtgtaaccatttgttgatagtggcattttatcgaattcattttgcagagtggcacaatgtcaattttctcggagaatggagaagagaagggggagcggttcatgggtagggttttgcggtgctatttgggccaactttctactgggccagtctgttcccgatggtgaatagacacaaacactcgaaaatttactgtgcagccaaaaatcgtggcacatcatccgcctgcgccaacggaaatcgtcaggcgccaaagaaattccgcgtgccgtccaccccgccaacggaaatttcgcgcgccgtccaccccgccaacggaaatttcgcgtgccgtccacccgccaacggaaattttgcgcgccaagccaaaatagtccgcccgtgccacggtaaaaatggtgggtcccatggttaccaagtttattaggtaggtactcggtattttttgttagcttcccgagtttttctcgaatacactcggtattcttgtttttttaccgagttccaacaaaaactcacggtaacttactgtggcactcgatagcttcacactctctggtagtgaatgtgtgttttttctcaaaatctttgtgatttcgaggctttgtttatttaaaagatagttgtgatggtttaatactgatttaagtaaaaatcggtggacaaatatttttattaaaattagtctaaaataatgtgtacacaatataaaataatgggtatcaactttgtttttaaatattgtagagccaatttatttgcatctgtttgtaaagagtgatatgataatatattaaatgtttgtaaagtaactattttataaaaaatattatcactaataataattattattattattgtctcaactatatacgtggaaaaagaaaaaaggaaggtcaatgtttcaatatttgtacgttttcctactgaagggaaggaaagactatataagagttttggtcgatttgttttaagaaatctaatctaactatttatagtattggaactaccgatttaagtgaaaatcgaaagatatatgtttttttctctgattttctaggtttttctttaatttattagagcgctaactgacggcttaagagcgttttgaggaagtttaatagatttttagtatataatagatggtgtttattttgagtgtgtgcttcttcttaatggtacagaattaactttttctataaatttattaaatatcaacccatgccaagaacagtccatttaatcaggatgtaaataataatgtgttatcaacaataatgcgaagccacaagtccattctcttgctgctctatattttaatatgaagcaaataaactaactagtttgtaccaactatacattcgttcaatcaagaagaactgcccatatatgtaagagagagcctcagtctcataggtcacaaagttctatcaagtgaccccctccacttgcacaaaccaaaaactcccataaaaacctaaacagtgcatatgccattcaatctctcaaatatcagctgcatgagcataggcatatgaagcatcaggagccactatcaggatacatcaataggagatactgcacccgagatgtgcagcatgcgaacagcacacggctgaagcttgcgaggttcaccatgttctgaggatgggctgagtgtggaagtatactcacctattatgcaaactgaatagatttcctctatagcctagcgattgtggcctcttcttctgctttgcatcgcagtggcagtgaacttcgccttgtttgcatccggtgatggatggtcctctgatcagccctccaatcgaatggccgtcctctttcttgtcacagcgaggaacagcagaagagcgtagggagaacgtggaacatgaacagcaagactctgttgcataagtgcatgtttgttgaactggaactgtatacgaaggcattcgtatgaaatttgattgagttgtgctcctccaaaacagttcaaacaatattctgctagagattaacatccagggaacgttgaattcatatattattagtctttccatgcaaatcagagactctggtgttcagtccagtggctcgaaatgccaatcaactacagatcaccatgctcctatatgtttctagagaagcatgatacactgatagaaaccaaatacatgacacaagtttgttctgctggattcaaagactttttatctgccatttgctatttctgtcatgtttgatagttccaatgtcttgtggttgaattaataagccagttatggatcaggcaactgcaactgcaagaatgagaattgatggatgaatgtcccatacacaattaacacattaactgagacaccaactctcagaaccttttgaagtctgccttcaggttttaatgatccttgagaaggtagtactacaataccacacatgtttaaattgtggtgccatcctagttcaaaatctcaaatattcatatactctctccgtttcagattataagacgttttaactttcgtcaaagtcaagctgtttaaagtttgaccgattttgtagaaaaaagtagtaacattttcaacctatgacaaatttattatgaaaatatattcaattattgatttgatgaaaccaatttagtagataaatatcactgtatttgtctataaacttagtcaaactttaagcaatttgactttgaccaaagttaaaacgtcttgtaaccagaaacagagggagtatataccaaataatgttggaaagcgtaatacctgcccacaccacatcgaggatgtaaaaaaaaaactcttccatttgttattattaattcaatcaatcgggtgcattttttatgtattagcaagctagtttgttaaaaggaaaaaatatctaaggtaattatcatgaatatacaatgtgtgtctatgcttatataagagcggcaaaggtgaatacgctcaaggctcaaactcacgtgaggtagtgatctatcccactgtaccataaacagagcagatgtcccttgttccagcatagagatgtttgctatatatcgtttatacatgtctaatgcatattagactgtgtagtatcaggagtaattggtacaaaggcttcctcaacatttttcttgattaaatatatggttgaagcatcatgtgagagcagtgttaaggcactccggattgtaggcacatcaagccatggccaacgcaggccgtagccccgtttgctaagtgggctaaggctacacaagggaccttatttctccaatgaagacaatacccacaggtgtgtcctgttcaatgaaaagctgcacaaccgagaggcctcaagctgcacaacgtgagccacggctcgaaccctagccttagatcggcgcctcgcacagggggcgtggcgtatgtaggaggttcgcgcgctttttgacctcgcgtccaacgtgggaggctagaggtacatgccacgtcttcgcgttggctatggcgtaaagaaaaaagagtgccagcagactgacgtcgtgtacctatagaccatcaattgatctagaaatgcttgggtatgctaggtgaaaatattctacttcatatagttattcgacaactgttgatagaacaatatggaatatagtattatttaaatatatatatataatagaattttagtatttggggagtcatttttcttaatgtacttaggagaaggatatgtagctatttacattgccatggaaggctccaatgtcgcaaacatccaggaaattaatatccaaggaatgttggattcattgaaaatttcccttgcaaactagatccgctcgatgttcagtccattgactcaaattgtcaatcatctatagagatcactgagctctcctctaccttaatttctacagatgcatggcactgacacaaactaggaattttcatactaaatttgaatatagtccgacctgcctgctttctcagaatttaagtgagctgacatgttacaaatttgcatgcgagattctaccatagtaccatactcaccatcagttaaataaatgtttgagctaggtttccaagcaaaatcccattaaatatgaattaacaatgttttttcatttgttactgaggaggagagacatgcaggcctgtgtgtgtatgagcagacgccctttgggccatgaggactttcaggtccagaagttgcggcccagatttacttgagcgacggccactaatttgcaatatggcagggataactcctgcacaatctgcgtggcacatcgttgatcggacggcgtacgatgatctctcccaatcacttgcaacatttcaagactgggtataagtaaaccatgcaacaaacagttctgcatccacagatcatgtaagcttgctgtgatggttaaaagaacatgcacaattgggtgggtgttctaccgtacggtggttttttttgtttgttgatcctgtaaacaattgtaggattgtgaggtaccgggagagttccgctcaccatatttacacgccaacgttataaatgggcatttgggtgcaagctgctcaacagattccattcatgtgtataaattcagcagtagaaacttcatggcatattggtattaccaagcgaatgagcatatgcaaacgtttcacaccgataccacacaaatcgggtgcatgagcaaacgggaaagcatcaatggaagcaagaaaattactaggatttgagggaccaagaaggatctccaggcccaaaactgctaactcacaaggcaagaactcctgcgcaatctgcaccacaaatcatcgatcggatggcggatggtgatctgtcccattcacttgaaacatttcaagactggatataagtaaaccaagaaatagagtaacaaacagctatctctccaagcacagagatcttgtaagctcgcttcgagattcacagaaagcatgcacaactgggtgggcgacctacatactcctcgagtaaagcaaatttgcttgtccttgataaaaccctttgaaggggaatattgcttttcatttgtttataccggaggcgggtataggattgtgaggcatcaggatcattcagtccaccaagtttacatgcctacatcagaaataggcatttcggtgcaagttgatcgcgagaggatgttcatgtgtaaatttggcaagggcaacttccacttgtactacaaaccctcttatctcagaagatatataagattgatctcccacaccacaccacagcactagactcgagcaccgcaaagcgtgcatcctactactcatcgtcctagatgagactcccctgatgttgtgcagtttacaattgtgccactgacatggggcccacatgtcagtcgcacaactgcaggctgcacaaagtcggaggatctgtttcccatcatctttgtggttaagcaacgccgtgctcatcattgttgtcaaggacctctgccacatcttcggctattaagctacatctcattactgccctgttgtgggtggtacaaccaatttatattgtcagaagaaaatgcattatataggtttgcaccatttgatcaagtgcatcgtacattaagccagcaatatacatcaactaaatgaagaacaagttgcatataagtaaaccacagagaagagtcactactagaaaaaacatttttcccgacgttacagtacaacgaatctagatatggatttattgtactatgtaatttctcatctttgttaggttggttttttattttttttattgttttttttacggagggagtaaataatatcttgtatgggagttgtaaataatagccaaacctaaccttggagaattagttaaatttggcccttttgactttggagtgccacattccgcctgaaccccacacccggattccgccgtcagccaaaaccctcgccgccgccgccggctgcatgcgtggtacctcggcaccggagaactcccctgtcctcctggccgtccgcgcgtagcctccgctctccgacgcagcgcccgcccgcccgcccgcccgcccgagcaccggcggcccttcgtttctccggcacctccgccgccgcgcgacgtcggttggtattccggaaacggcatctttacttcccaatcttaatttttatctcaaagagatctctcctcccgttgccgtgtaaatctcttgctcgcagtgttgcgatcttattgagtttttgtttttgttttctttaggagggatcgcaacaggaggccagaacacaagaattctgctggattaggtatttgtttttttttccccaaatcggattgcacgcttttgcagattatgcgtgtcgatttttgttatgataatgtaggtgttttttcttgctgctgtttgatacatatttgtcccagtaggcaaaataatgtggttaaattgtgcaattaaccaatctatatgtccatttatattcccaacttggcagatgacatgcatgtattttcccccaatctgcaggttattctcattgtggtctatgtacatctcaggttttgtttgggagaatattactttgtaagaccgtcagagagtgaataatggacctttgattcctctgtttttttttgagtgactgaaccatccatgtcatgtttttatggtaactgttttcttttatacgacatttgtttatatgacattgtggcctgtaggacagactattaggaagctccttcaaacaggtcgcactaaagttttggatgttgtgtggctaattaattgttatgtttggcataaaaccgataaatagtcaatattgagttgagtgatagcatcatgcacctcctgctttgttgaacagccagtgctttttcttcttgtatcacatcttattagttttcatgtttagttaattgagttgtggagatggattgctactttctaaaataacttgaccttcctcttctcccttgatttgtcttgtttttagaactgatgtttctatccagtctcttactctggtcctaccacaatatatgccacacttgaactgggaaaaataatttaggaggtgattatttctagttcatgttctgtttagcatgtcctttatgaaagatgaggtaattagttttccttaatattttgacattaaatttgcacaagtgagctagatcttatcattgtaaagaacaggtttatgttcttctatgattaacgagaatgtcatgtagaaattgtgcaagaacttcttgttacaaatggcatagcctttttttttccagaagccttactgtgaaaagaactgaaaaccagtatcaagactccaacagcgtctactttggtttgagagtgacgtttccggtgtaattgatcttgcatcaagttctatatttatatttaacgctgattcctttcaataaaatgtcacagttagcttttgaaaagaagaaatagcagattctgttccatataattgtaccttttggtctactttttatctgacaaatcttttccctgaatctgttgtctggagttacttaagacccatatgcatttgttccaagtgcatcacatttgttttccaccactggaatcagactaaattcattttgaccttactgttcaagttcgcatgttttgctagtgtaacaaaaaaaattgctgagatcattcttttttccaaaaaaaacggggtgtgagttggcagaggggaggggtgcatcacaggttttaatcaacagtaggcagatagttttttgccaactcagtgggcagttttatgcttgcctcgactgattcttgacttctcgatgggagcagcattttggtcactctccatggcccttgtggaaatgggaaatgattctttagtttgccctttcagctctagaaaatagatcctaactcaatacaattcaacgccaaaggaattaataagttatttgaactatttcattagtactgtattacaatttcttatcatttgtagtactacctccgtttcaggttataagactttctaccattgtccacattcatatagatgttaatgaatctagtacacatatatgtctagattcattaacgtatatatgaatgtgggcattgctagtaagtgtaataatatgaaacggacgaagtaaatctgattgtttacatgatttgaaatcttatttttacaacatatgtttctgcagggttgttgctctcctccaagtggcatccaacggaacagtaaatgaaattagagctgaacaagatatctcttgggtgtattcttatttatctgttgggaacttcaaccaaataggttctcagaattggcttcaaagttcaaacccatgtgctttctgctcgtttgacatacccactatatacatttcacaccattccactcatttgcaatggggcctcacccacctagtagttattcagataaaaaaacttgccaaaatgtcccaccagaaaaacccagctccacgagtttctgccatccacaatttccgcagcacttactttcacatccagcatatgcaatgaatttccctttcccgccgtttcctcactatcctccatactcgcaaaatttccaatatgctgttccaccacaatatgctccatactcattaccgccacctgatggagctatgccatcaccatatgtaccagctacagttatgccatccaaggcaccctctgatcaaggcaccccacattcagtaactggtccaggacaacaagatgatgacgatgctgaacctgagaggactgctaggcgactagcatggacagaagaggaagacattagattggtaagcattcctcttcctttttctatttctaatttttggacattgcaaatggtatcctaacatctccgtgctggaactacagataagcacttggttgattaactacaagactgacaagtactgggataaggttgcagcagaatacaacagtgcaacccccggagctcggagaagggaagtgaagcatttgaagaaccgctggcagaggatgatcaataaggtggcacatttcaatgattgttggtgccgggtcatggcaaaatatcctagtggccagtcagagggcatgcaacagatggacaaaacttggctgatgtataataaggaagcacatgtgatgtatctcgaagaagcgaagcataagttcacctttggccattgctggaacgctgtttgggaccaacccaagtggaaagaatacatctcttctttctccgcaaaaagagtgatgcgatctgagtccggtggttacgtgtcatcttcggaagactctgaagatatgcaagaaggaaaatgcttagtggatcctctggacatgcttcccaagaaccatgaagatatgacagaagtccagccgtctgtctcaaatcaaaagaagcaattagaactattgacagctgatgcgtcgtggcctattgaatttcagcttgggaggcaccaattgatgactggaacatcaaaattgaacgaacatcagcagggggtggcagtgagggatgaaatgcttgaaaaagaatcgggcccacaagattttgaggtgctagacaatgagagagtggcaagggaagatgaacctaaaaaagaaacacagcctcatcaaggtttcaaggcgcgaaaggtcaatcggaaacgtaaaggcaaggcatcatcttcttcatgtgaggtgcaggaagacatcaaacatgcattatatcttcagaccatgcttaacaatgatcgtgagaaaatgtcagaggtacagctccgcctctcgaaagagcagcttgaattggccagaataaagcaggatgaagcgaatgtaaagaaagaaacagcactttacatgaaatacacagagctgttgctggcagacacttcaaggtttgatgagtttcagaaggcagagtatgagaaagcattgaagcatataggagggatactatttagcaaggatgtcaattagtgccctcgcaacaatttatcttaagcatgcatttctgtgcaaatatcatcccaacaactagtaatagatcgttttgttctacttaactgaaggattgcctccactaacacctgtgtctgtgttaggtttaatcatctctagcaagatttaacagagattagtactgattgaatcgtggaagtgatggatcaatatgtatttagctattagtggcttatctaatttgcaactgacctgtgcaaagaatgaactagtggcttgtcttggagtgatggttgaaggcaaattgcaaatacttgaaagttaacccaagcaggtcttacattgttctctgccaccgaaaactcgcacgccctacattgctgtgttggagttatcacttgctagaacatattgggatgcaatcacccgtcaattgttcagtcatcgcctcaaatggatgcttctctacactctatcacacagtttttcccgttgcatctcatgccaacagcagaaaaaaattgcttctcgactgcacaaaagcaataggtctgacagcttttatcttatttcagataatgttttatggtggcttgattaattctgtggttctacacctatgtgactattgtgctatttattttagggtatgcatatgaaatatatgtaggtgtcacatcgttagaaggattggattctgtggttctacaactgtgactattgtgctatttattttagggtatgtatatgaaatatatgtaggtcagtaggtgtcacttcgtttttttttttttttttttagaaaatggtgtcacttcgttagaaggattggtttgaatgaatacaaagtagctaggtggtttaatgtgttaattttgacgaacatttacacccatccagtgccatcagtagcatctgaagtccagtagatgagctctgcctgaagcccctaaaaagagtcattttgaagttttgaagggaggtttttcctatacactatccaacccacaaagagcaaaacacattttccttcgagtacataatgaattaagcgaaccaaatttcctacgagaataccgcttcacaacttgttcaagcagataaatctctgaatgctgaaatccattatgcattgttcagccggaaaaagaacaataatgagattactcctgtacagtctcttgcatataaacctctattattttaatacactgtagtaggagcctcttctgctgtttctcgtaaaaaaataatcagatgtactgctcaataacaagagaaattgccttcttacagttttttggccctaatgatggagtcatgaagtcgtcaacttctggtgcatagaggaccattcatacatagcctcatttgattgtctagcatcctttggaacacaggatttttttttttaattttcaaacaaggaatagaaaaatgcaggattgaggtgccatgacttgttgaatgccatacgaattgtacagaatgctgtttgtatgcctcacggaaaaaaaatacaggaaatttaataagatttatatgttgatttattagagagagaagggagtaagatagagaagaagtgcattggagttctcgaggggatttgtaaggcaagaccatatgttagaattcctccaaactgtggaggaatttttactatccttaaaaattattttgaaccaatttcacaatatttattgatctctcctaggaatttctcgtttggatcgaattcctctagttttccaatggagtcccttcaatccaaagtagcccttagccattcttgtataaactgtgatctcctgatgtctcccaagtcgaaaacaacaactacatgtatataagtattgcagagctgtaattcttgagataaatcttttggattcacatcgttttaagctgaaagagtgggaaaataacactccaacttgattttagagagagcacaagatgccaaaatggcagattggggatgcaaatagtgtaaataatagagaatgatggaattcgttgaactgatatattgagtgtctcaagataggtatatatagagggtaattttaccatccttaagaaggtaccatgaggttctgtaaaatttagtaccgcgagatacaaaaatttagtgtaaaatttaactaactcccgccagccgctctcctttcccccgccgggattctcaatgagttccccaccggctacctgtcattgttgtgcgtgttgtcaccgacccatctgatttggattcggagtcatcaccaactctccatttggttaaggtaatgtggcagatggttagggtaaactttaggaaggctagcaagattatttatttccctaatcgattaattaccgtcctagcttaaggttttaaggatgtgctatagctagctgccatagaatagagaaagacatgtctgaagtttatgttatttgctatcgattagagaaacacatgattgtttgaatggtatttgatctttgctatcgactacaacaataaagtttgctatcgaagacataaaaacaataatcagctttcttgagtataacctggagttttggcaactattaatcagctactaatggcatgagcacactgtctccaaatttagtctctttagattgttcagactaacaagtgaacataatgacaatatgttctgattttgatttgtcgctaccttatggtgtgagcagttagaagcaaaataattggttttgtcatatagttaagcttcaaattgtgcatataagaataattagatctgattactcgtagcaatatatgaagcatggcgtgatgggctggattggtgtgcaaatggagattctgtaattcaggctattgatgaattgaataggcaaaggaaaagaatatcagttcgagtactataatgtattcatatgtggagtgtctaaatgcaatactgtaactgaaacctgttgtcatgtcagttttgggctctccatcttgatccaatatgcacaatagtgtccagatactgtgtacccatctgtgcaaggaaaacgttagggagtcttcttctttagctagattttctattttccctaatagattatgtacctagtttaaggatttgctaatttctatcaattagagaaagaaaggatgtctcgtggagagaatgcgtgcaggtgatctaactcctatataattgttgtatttagcaccattatatatcttgaatgtattatgaagagatgagtttgtctaccttaagaaagttttgtttttaccttgttctttcaaatattcagttaggagtgcatcctgatgtaattcatttttaatcacattttctcaacctgcagaatctgaagattagaacctcatcaccatttgccataatccattcaagcagagcagttgctatgaagtcgatacttggacatgctgtcctgaattttgttgttctatgatggcttccagaaattgcaagagcacattattgatttttggttttttttagatctgtaagcaagtggtattgggatatggtgttttgtttggtataattgagttggtactttcaagttccttatagctgcactttgagcatgcccttaaactgtcatttactgtatactcttgccatcaccaatctgaattggtcagcaagcttgtgagtggggctgtgcaatcagcatgcaaacagattaattgattaattttgagccctttgctccgactggctgtcatttttttatttttgttccatgatagtgttcaatgattttttctgaaatgttataatattttaaaatttgtggcatcaagtgctgatcttaacatactttgcagctagttaagatggaggacacaatcattagatgtgctgccagatgatctagtttagtattttgtatgtttgatcaggagttggaacagaacaaagaacatattttttatcccaacttcataatgtactaactgatataaatgacaggtatatatacttgatataaatagtaggattgttgtgtgattgaaatcatgcaatcttttaacaagaacaaagatgcagaaattgtttatggttagagctgttgacactaaggatcagaagttgtattaccacacatttcagattcataatcagcagatgtatctaatgtctagccattacatatggtgaataataagatatgtcattgaactatattgcaacaatgaaccaatgggcattaccattcttatggtcaggtttagctgaacaggactcctcaacacaagaaatgatcacttcctaacttttattgctattcattcctcctcacattactagaggcgcaccattggtgcacctcatcttctagtggtatttgatacatcataaaacatattgttactataataaaaacctcatatagaggcactttcgttgagacgttttctaaattgcttctaagatcagaagttttatagtgtagagacactttataaattgcctagaaaatttttactctagagacattttcagctcagtttattggattttatctcgtagaggcattctttcggtactgtaaaatgcgcctgatatgtaaaggtattttcttgtgacattttaaactatgtaaagatactttttaaaatgacaatgtgtactaaacgactgaatataaataactaaagacacaaacatgcaactaatgacatggaattgagttggttagtgcattgaggataaaaaaaatgatttgtccaggagatcttgagttcaaggtttgacagaagcaatgagactattttattctcctcttttggactagtttcatatgtttgtggtacaatttaatgtctcaagaaaatgcctataccatcttatagttaccataagacacttattagacattttttaaaatgcatctcctcttttggactagtttcatatgtttgtggtacaatttaatgtctcaagaaaatgcctataccatcttatagttaccataaaacacttattagacattttttaaaatgcctctacagtattgtaaaggcatttgaaaaatgtctctacagtacttagaaaaatatctctataaagcatttttcttgtagtaatgactcaaaatatttcctcggatttcaagaaatgttccatgcagcatagcacaacaaacttaaatgatagaaaaacaacaccgaaagtcctcttttggactggtttcatatgtttgtggtataatttaatgtctctagaaaatgcctctaccatcttatagttaccataagacacttattagacattttttaaaatgcctctacactattgtaaaagcatttgaaaaatttctctacagtactagaaaaatgtctctacaaagtatttttcttgtagtaatgactcaaaatatttcctcagatttcaagaaatgttccatacagcagatcataacaaacttaaatgatagaaaaacaacactgacagtttttaacagtactgttaatgagtacaagcttgacttagtaaagttcgttacataagttttgcttttcacggcatccaaaatttattaaatgcataacactatcaaccataaagtactagacaacacaagatggttagatcaaaccatatcaatgagatcggactcgaaagatccaagcaatcgaatcctgagcttcaggactggccattcaccaataagcttagtgagaatgggcaacaaaactgacacaacgcaaattgcaatggccaaccatggaaggtgaggggccaaaactgtatataaaccagttgcgaatgcggtagtggttgcaaaatatgcaaaccacatgagcttcttagtaaaagatctgtagtaaagcaagaactgaagatcctcccaccttgctatgatgcatacgaaggcaacagtaagtgacgtgcacattgcctaggtgtcagatatcaagaatgcctgaaatgcaagctttctacccatgttaggaagcccctcacttccagcattattactgtgtcctccaggcaaggtaaaagcagcggcgaaggtgattgttgcaaggaggattgctactaaagaagtgttgcttgtgtatgtttgagtcaatgtccttatatccttccttgctttctcagttacttgatctttgattgtttttataagattatagatttcacctttgtcttccgggtcagctttcaacatacgcatggagacttcactctgcattaatttattacaaagttatgtatggccatggtagtaatatgattgatagtcatggaactatacacacaattttggtgcttgcccacttcccttgacctttgtgtttcaatttatgtctgccacaaatgtttgcaaatttaaaataaaactaaacaatttgaagtgtccttgaattactgatgatcgatgtaattcctataccatgttgaatataacagaactagttttagaatccagaaatgaactaaagccagaagctggaaaacatatctttttccaaattctcagaaactagcaaccaaccagctgcttctagtattaagctccttaaacagacctaagtcgatggctctacctgtggtttgagagtgtgctacgtgttagcagcagttgcctgctcatttggtgagtgataacgcaccattttggtaattaatgtcaatatagttaatgagtagtaatgtctgctagttaagaaaagggaattgtgctcatacataatggtgggtggggtgtgtaaatagggacaataacttgtaaatctgttgtcccggtgcagcaacttgtccattcaaatccggtgcacaacaaatccatacgagcaaaggccaactcaaaccccgatgcgcacaaccccctgttttttttttcgaaatatacaatctcttgtttttaagagattctatacccgtcatcgaaaacttatcattattgtggtcagtgacgggttataactcccgtcagatgaactcatatcagcgtatgatcactaattaagtcttctacagcttatccctggtaagtaattttatcaaacgggttacttttcaggacatgtttaggttgtagccaaaataaactttaccaagtttttagcaatgctaaaattttagcaagatgataatattagtaaaattttggcaggatttcttatgtattgactatggcaacaaattaaacgtatctatttttttaagtaactttgtaaaaaaaatggtatgattgaaaatgtcattaaagtgaacaggcccttaatcaatgagagaagtcacctatgatggatgacctgtcacgaaggctcatttctgtaacagtgagtgtatttttctccacttgtgaataaatttctctcataatattcttctatatatatttggtcagttatttctctacttcctgcacataagctaattaagtcttctacggtggtgctcggcatgatatactgacatgttgtactacagaaaacgtttttctggaccagactcccagtaggttccaaacggcccgtaagtgccagcttatgcaaaaatcgatttctccagacggatcttttaaggggaccgtaagcaaaaaaaaaaaaaagatttttttttatacggtcctcttaaggagtaacatgcaaaaatctattttttttctcttatgctctctctttccctcctcaccacttcaaaatttttcacccctctcctctctccctctcctgatatttctctcctctcctctcctcgtgttctaactcctctcctcctccaaatcagcgtgggcggtagcaggcggcgacgccgatggggaggccggccattaggtgtggcggcgggtgatggcgagggtgcgacagcgggcggctgcgcggcctccatgacagcgggcggcgccctcgggagggccggatccaccgccctcaggtgcggctacggccttcgcgacggcgggcggtgacggtggacggcgagggtggcggatccggtggtttcgccttcgagaagagggggggggaggatctgccacccttgggtgcggctgtgaccttggcgatggtgggcggcgacggtggatgatgacggcagcggcgctcttggggaggggggggtgggggtgggggggttctgtcacaccttgttgcggctacgacccccgcgactgcggccggtgagggcggctgatccggcggtgccaacatcggcgatggcggccgctcccaccccccacgcacgacggcggatctagcaccggtgacggtgggagcggcggcggagatggcgatggctatggcggctgcaggcttgacggccagaggtcgcggatcgacgacggctgtgagcgacggcggctgcggggaacgacggcggcctaggcagcatggatctggcatggccagtggcgggcggctgtggtggcaggatctggcgtggcaggcggtgtgcggctagggtttctgcctttttttgaatttatatttttttggcgaaaatatttttgcatacggctggcttaggtgcctgcatgcaaaaatcctattttggcaagcggttgcctaacccgcatgggaaaataacgattttggcaaaccttttcacgcatacgggtcggccaaccgcatgcgaacatcgaagaaaaagtaggtttagtcactgctaaatgatgattatacctctccgcatctattttcttagacaataatacccattcatgtttatagtactgctaactgggatggttgtataaatagatctgcacctttcgatcaaatgagatcaacggttaagattgctttatagtactggtaggtaggaatgtagtgggactcttttctctttaacgactgaaaattataccttgcaaattgcttaaataggagatatttttcaacattatagcatcgtttactattttttaatatattagaatagaaatcgatgacatatatatagacgctatatatgttgtggagagcatatgcgtacgtacccagttgagcgtcttagcatggtcggcggcatcatttggtacccagattggggggttaccgttgctgtcgagcactgtgacatcctgggctttacattgcagtaaaagagcgacgatcttcggatggcacttccggattgcataatgaagggcagtttcaccgtttctgtctcgcatgttaatgagtttccgcagctcctttgactgcaaaacaaattccacaaactttatgtgacctttttgtacagctatgtggagacatgtggtgccatcgttttcaactagaaatggagcatctggacaatgtttaagaatctccatagcaacaccaacatggccctggtatgcggcactaccaagaagagggataccacttgtgctgattatatatcctaaagagaaatcatgttccaacaatacttttagcacgtcaatcttgttctcaagcacaccaaattgcattggattaacccgtgcgctgttctcttctcttgccaatttaggacgagtctcaataatctttttggcgatatctgagaaaaaaatgtgaaggcatggataatattaatggttaacaagcacatatagctagatcgatacatatagctagatcgatgagggtctcaccagtattgttatttctaaaggcagcatgcagagcattgtatccggaggttccaccgtgagcagaatcaggaacctccaacagtttatcgaacacatcggtgaaattcctcatcaccgcgatgaacatgggcgattcatcgtgtttgttaacagctttcgtcaaggcaggctctttttctatcagctcgaatgcaagcttcctgtgtcccctgcggatggtgtggtgcagcgcgttgcatccttgcttgtcttgcctcaccatcgcctccctcgtatcaagatcgtcatggcggcggcagtagtaactgagaagaaaagaagctaaagcgacattgccgctttttacggtggcgagcaacggcgtctcgccatccgcgtttacagtgcagaggagggacgggttcagcatcaagatatccttgcagaattcctcgtggccatgggccgatgctatgtggaggcaggtgttcccctgcactgtccttccaagcagaaggcttgggtcatgcagagccggcttcacacccgatgtggctgctttcagcagacctctgtccatcactggcgaatctgcggttgctttgctgtctggaatctgcatgcaagtaataaatgaatatgatgctttcctgttaacgacaaaatttggtaggcccatgagagaattatcacatcgtcaacagtcggattactgctatattcggttaaggaaattaatctattaaaggaagcttatgcagaagtagttcaagaggatgcgacatgacaaattatctattaattaggaataatttgttcattaccttttatctttagaaaagtgtgttcagtgtcctataaggattttatattttccttttattttttaggaaagtttttttcttgtcctacaaaggactagtatctccctgttgtcgaagcgacaaccgcgtacgtcgaaggacgtggttactcaacagtgttggaaaaagtaaatgtagtattttgagatttttctttgggatccccacttcacatgtccctacggggctatttataatcctattacaggttcccccattagggtttaggctttacaggggaatttacatggctgcccttatgaaagggacgtttgattgggtatacagtgtaatttggatacatgggcctctaatgggccaattggcgaacaggcctaagcggctgggatggccccttgggcctcttcaaagttgggcttgttatggcgaagcccccatccttcagcatacacccttcgcccaatgatgcatttggtcttgccagataccaacgcgattcttcagccttcgccatctctacttcatagtcttcgccatgggacttcgcccagatgatcttatcgtcatgggcctgaatcctcacaggttgcatggtttcggtaggtctggtcgaagggtctcatgacataccaccaacaagcccctcacgggcaagggtgagttatgagcttcggccgagaccgtgcaaaccatgtggtatggcatgaggcgccccctttcgaccgacgctcctgccgaaacctatactggagtcctgcaagaaatgtgtatactttgtgcatatgtacttttacggttagtaaattttcctatctttcgccttttgcaaacagcgaagccgttctctttttgtgggccgcaatgaacagtgacgggcttccctcatgggcttagcactgtgcggctcaatgaatgggaatttaccatttcgcaaagagagaatccattatttaccactgactttatcacacgtctacgatttgccactgactttatcatgttctacaatatgccatcgacttttgcttaacttctacaatttaccatcgccgtccggttagtctccgttagtactgtacaaatttttcaaaatgaccaaaatacccctgggagaaaaggtttcaaaatttggataaaaattatgaaatatcatatttcaagtttttggtcaaattttggatgtttacaatcttatgtttataatataatattttgataattttatccaaattttggaagtttttgtcataggggtattttggtcatttcgacaaatttgtacagtactaacggtggctaaccgaacggtgatggtaaatcgtagaagttaagcaaaagtcgatggcatattgtagaacgtgacaaagtcagtggcaaatcgtagacgtgcgacaaagtcagtggcatataatggattatctctttcgcgaacccttgtgacacgtggcggcttacaattgggtgggaaggcgaaccgacgcctgggtgggttatatatccccccaccctttttcaccgccacgcccctgtcattttcaccgcgagcattctctttctccgctctctcacttcacggcgttcttgagtcactaggcctttcgaccgttcctttttttttctccacaagcggcagatttcgccaccgctcgcacttttcgccatggcccctcgcaacccgaacccatcttacgtgacgggccctgatctcggcaggatcgatgatgacgccaccgcctatctcggggtttcgcttgtagacgaggatgagttgatgaagctggtcacctccggcgtgctggcggagaagcaggccttcgccttaggaaaggctgtggtgccgaagcccggcgacaaccggacggtggtcttcgctgtgttcttcgaagcgggccttcggtttccgtgcaacgtgttgttgcctgagattcttcgcttttttcaggtggagctcccccaactgagcccatcggctctcgtccggattgccatcttcgactaggcgtgccggcccgctggtttcgaatcgagcgccgggctcttcggtgctattttttacgccaccataaactcgaagacggtggtcactcccccagggacgaaaaagacggcgttcgagatcatgaacttcaatgttcgccccgagcgctctgatctatgcccgatcaacggcaccatgtccaagtgggatcgccactggatatcgaagtggttttaccaatccatccccttcgaggctgggtccgagtcggcgaaagctctccgatggcgtcgcagggcgatcgcgccgaataggaagcccaaggtcactgtcgatggtgccatggaagcccggttcgccctgcttcgcaaaatctgctcccgccttagctgccgtgacctggtggaagagttctgtatgcttcggatcttccctctctcccagacgtggcaagtcgaggtgagcccagacgaggaggtcgatggcttgccgaagctcgtcatgccagagggggcaaacagtgagtttttgctttcctatatgtgtctgtattttgctctttcctcctattcggcgcctaataagataacacgtttcgtttttgcagtgttaactcttgctcaggccgacaccgaagctcggaagatgatcggtgatgtgtcggtcaccgaatacagccagctacttacacggcaggcggccgaccgggcgaaccgagtgtacgatggcaatcttcctccccgggcgaagccgtataaggccaacggtgatgaagggacttccatgaagcggacacgcaggcaagttaaactggctccccggagcgaagggcccctgccactaccaacttcgacgccgatgatgaggacactgtcgatgaccatgacggcgaagaggaaggggaagaggacgagacggaggttgcggacgagcccgccgacaaccgcaccgagacgcgtgggtacaccccaactccaagcctcgaccatgtcaaaactgggtggagtcgaacagctcccccctccgccgaaaggatttggagggggcgaaggcgctggtttcgtttgtggcgggcaaggtggcgaagaggggtttggttaaaaagacctctaaaaaaatggggctcgtcgatgtcgctcgcgttttcagcgacgacgacgagtcttcggacgagacccctacttcgcctgctggtcagagcctgggttttcgaccgctcctggtgctgcggtcggtgttggcggggtgggagggagtgttgcccttgggacttcagcatctgctgaccgggtcgtgaaggttgcggccaggctcttcggaagccctgtgcgcaaaccggtggcctcgccgctcgccgtccagaagtggaaaaagacggttgccgaaacatcggcttcagagtattcccttgcggcgccacacttcgcccccggtgacttcgagactcgggcggaccttatccccttcgtcaagggggtaagtaatctcgtttctctggctgggagcccgagcctattcttcgagctgaacgagttcgacgagggctgttccgccatcaagagtttagctgttcgggtatgctattcatatttctttccttttagctgttgtttcgggtatgccattcatcttcgccctctttctctttgtcgaaatagattcttgcggctcattgttcgaccgaacgaaccgtgcgggctcgtcttgacggttttaaaggccgttttcgagctaaggacgacgaactgggtcgcaagagccttgaaatggagagcctcgccaacaccctcaaggaggcgaaggctgaaaacaagcggctccaagctgagcttgagaaagggagcgaggcaaaggccgagatcgagcgtctcaaggccgaggttaagaaggagcaagctcattccgccccctgaccgactactataatctcaccgagccgaagatggaggctctttgccaagaggtcagcaaggcagaggaaaccgcttcaacggaggcgcagcggttcacgcaggatatgtcgaaagccactgaatctgccaagaccgtgtgccgtacgcttcgccttgcccttactgacatgggggcgagggtgcgaggagtccctggcgaagatgcttctgccttcaccttctcggagtggacacaacaggctggtggtgcggtctccgattgcgccactgcgtacggcgattgttgtgcgcgtgtgtcggcggcctttacaatgggcctgttgcagtagaacggtagcgaacacatcgtcgagctccccaagtttgtgaagggggattgggaggtcaactctcaggacatttcgctcacacttcgtggctggcgcaaatagttctggcaaaaagaacgccgatccaccgccaaggtgcgcctgctcgaacacttggcaaaggcagaggaggcggagcagggcgaagagccagcggccgaagaaggcggaatggatgtgggcggtggggcggacgtcagccaaaatcaccccgaggtgtgaggctctccacccgttctttagattttttgtagatttctcttggcgcttgccgcggtgggcgaatgatgtaaatttggccggtggccctacccctttcgtattgtagccgaaaatggccctttttaatatatgagatagatgaaccaagtcttagtaaattatcatgtttcttcggctttgatatgtatgctttcattattctgcgcacaaaaaagagacgacgtttttcgcccactttatgtgctccgcctcgtcttaaccatgtgctttgccattggccttcttatgttttcttagcagggttttcgccgaaaggtgtatgttcggcctccttttggggattggcggaacaagaatgtgagaaattcgtcacggttaaaaacctgccgaagattaagtattcctgtcgcgagatgataataaacgccaaaagcgggcacaccccgggtgaaccctggacgactacgatcatgtccatgtggaacgtcaggaggacatggcccgcttttggcgaaatcaccgaaggactgatcgctaggaagcgatcgcccagcgccactatggcttagtttgtgtttcgcccccttctcctcttagggtagtgtataatattagtagtgatgacgaaccaagttcgccaaatcacacctttgggagtggagggtgttttgggggcgaagatataattttcttgtaagctaggctgtaaagcccgttactttctttcacctatagcatgttgtatggcatgtattctttgatattttttgaagttaataaagatgtgtttcatttccttttcgctattgttcgcatagtcacctttcgtgctttcgttaggtcgaaacatgtcggcccccttgcgtatattagcgaaataggtctgctgactttttagctttcgacttccgctttcgatctgtggtattccgcgctaaaagaagcgcttgtgttttcacataactcgagtattgcggtgttcggttacttatttcccgaaacaagctgtcgcggtttcaacgttcggtgagcgatgcttcggccgatttctttcgccccccggtgctttcgctgatcaggcgtttgccttagggtttttccacgatttatcattcacataagtaaaaaggcgaaagacacaaggattttatactggttcaggcctccaggttggataatagccctacatccattttttttgtcattttcctctttttttggtatttttgtgccgaagggcttacataacgagagttgccgaaaggcctatacaatagtatgtacatttttacaagttggcgaatggggtgccaccctttctagatatagaaacgcttaagagaagcagtgttccaggagtggtcgaactcttcgccttccagcatcgccaagcgaaaggagcccgtcctggacctgtgtttgatgaggtatggcccctcccacttcgattcaagctttccgaccaccactgggttcgccttcttccttaggacgagatggccaggcaaaagctgcatcggtcgaactttcttgttgtaagttgccaaggtgcttgtagcgtacttgcacatgtgttctattgcttcgactcttatcccttcaaggagttcgagcaacaactcgtgcgcatcttcgcctccaaagaacatcacccttggcgaattagctcctagttctattagggtcattgcttcgtcgccatagagaagcatgaacgggctgaacttggttggcctagtgggggtcatccgaagggcccagagaacagatagcatttcgtctagccatttaccctttgccgccccctcaagccttttcttgagcgccatttgcacgttcggccgccccatttgactgtgggtgcgcgaccgaagcgaacctgatttccaggtttatcccctcgcacatctctctgaacttgtcagagtcgaattgcttgccattgtcagtgatgaattccttcggcactccgaaatgacaaacaatgttcttccatacaaatttctgtactgctaccaaagtgatcgcaccaagtggttcggcttcgatccaacgggagaaatattcgattgctacaattgcaaacttgtacccatttcgcgctaccgggaaagggccgattatgtttagcccccatatggcggaaggctagaccggagcgataggttgcagctcatactggggtgctgcctggcttcggctatgccgctgacagctttcgcacttcttggcttgctcaacacagactttcagcacagtgggccaatacaccccctggcgaaacactttggaggcgaccgttcttgcggcctggtgcgcaccgcacagcccctggtgtattttcttcgccatttcctcgccttcaacgaaggagatgcagcgaagaaagggttggagcacccctgagcgatacaattgccctgagatcagcttgtatcttgtggctctgagctgtaggagcttcgcttctgcttcgtcctctggagccaaccgttcttaaggtacttcacgaacggtgttcgccagtcctttgggtcctcgcccagttctgcctggtcgattgccatgatgtccaggctctcagtaggcacacttggtgcgtacaaagacctcaaaaaagatgcccggtgaatgtgggcctccacaagcaacagacttcgccagggcgtctgcttcctcgttctggcctctaggtaagtgttcgaccgttatgccggtgaaacacttttccatagatcgacttgcctccagatacctcttcattccttcttcttttgcctcaaaagatttgtcaacgtggcttgccactagtttggagtctattcggatgagcaagcgccgaaccccaatgctnctcacctttcttaggcccagcagtacgacgtctgccgtgttgttggtcgtgttgaactacagccttatggcataccgaatcggcacgccccttggcaaaatgagtactgccgcggcacccgcccccttttgtgaccacgaaccgtcggagtacattacccaaggttgttcgacaggcttgggttcaggggtgaatgccggcgtccattcggccacgaagtcagctaggacttgggacttgatagcagtgcgggcgacaaaatgcagatcgaagggagataactccgccgcccacttgctgagccgggggaagtcgtctttcgggcacaccttgttgaggtctgtgaaatcaacgcacatgcgctatttgccgtttgacttccgcaccagtaccaggttcgccaactactcagggtggtcgatctcccggatcaccccggccttgagcagcttttgcacttcggcttttgctacttcttggcgatcggcggacatcttgcgcaacttctgtttccttggtttggtgttcggcttgaccgccagatgatgcatgatgagatctgtcgaaacacctcccaccttatcgggtcccaaggcaaagatgtcaatgtttttcttgagcacctccaggatgttttcaacttccctttcgcccatatcgcccccaagcgaaacaaatcttgtgtgattggcatcgtcgatctgcaccttgatcaccttgccatgaggggcgggtgctttgtacggtcatgcggttcggcctgtacattgtgcactgccctgctaattgcggccaaatcgccctatgatgtagccgaaggctgaagcccctgaccacgatgacgcctgccggactaggcatcttgagcttgagatagttgtggtttgagatggctttgaacttgttcaaggttgcacggccgaagatggcgttgtagttgtatgggatgtcgacgacgtcgaagagtatttgctcttcgcgcttgttctcgttcgtgccgaacgccaccgccagttgtacttgtcccaggacttgaactgcttcaccaccgaaaccacgaagccaggctgctgcttgagtgagggctagggtgggcaagcccattatggcgtaagcttcggcgaaaataacatcggccgagcttcctccgtcaaccagaatttgccggacttcgaagcccgctacttcggccaagatcaccaaggggtcttgatgcgggaacaacactccttcggcatcttccggcccgaaagagatttgctgattcaagtaccgtggagccccttcgtcggccgaagcaatgttgtgcaccattcgcagctacatcttcttctgcagttttgacggctaagctggcgagtcagcccttgtaatcacttggattactctgcgcttcatgtcttggcgctattcggccgggggtacttgttcttgagcagcctcgcgaggtgcttcgacagctgctccttgttgaggccttggatcttgagcgttgccacgctgtcgaatgtttcagcattgctcgatggtgtacgaagaacgtccatggtaagcgcagtagaggtcttttccgaccttcttgcgaacaggctgttgatggctgcccgcttgttgggcgtcgaactccttgcggagggcttagacttcttcgacagccatcacggtcttgcctgcgcggtcagttctgaatttcctccaagtcatgggggcttgacttggcctcggcggctgtccttggttcatcagctgaggttggcgaacggtgagaggagccggttcggcgacctgtgcttgtacttgggcttgagcagcagcgatggaggccttatcgtactcggcttggattgcttgccatcgcttagaatcctcttcgccccttgcgtacccatcaatgatacgaagcaggtgctcaagtgtctgcggctccttgttggcgatttttcttttgagttcgccttcgagcagcccggccgaagcagcgttgatgacagacgcttcggttatgtcctgaacttagcatcgggcttacgagaaacaacgcatgtactcccttatcgattcccccggcctctggcgaatgccgagtagatgttgctgcgtcttcggctcctcataggtgccttgaaagttaataacaaaaacatcgcgcaattgctcccatgagtaaatgctattggctggtaaattaaagtaccaagaacgggcgatgccatctagagcgagatggattacctttgccttggtgttttcgtcgccgtgagcggcttcgattgcggactcatagatggacagaaattccttcgggtccgttttgcccgagtaccgcggaacaggtgggaacttaaactggggtgggattggatgaatcttgattcccctgctcagcggtagccccttctcaccccctggcttgttcggcaccagctgcggatatggtgtggtgaagggtgaagtcatgacttgcgcatgaggttgggccatcgtgttcggttgcccggtcccgaacggcgacgcttggggaaccgccatggataggtcgaacgtacgctgtgtccaagccatggcgacctggttcggcgcttgattggttccgaagcttggtgccgtcgcctgtggttggacggtcggtgcttgaatggcagtgttggggtcgaactgcggtccttggctccaaggcgaagcccctggaccaggctggttcgacggtagccaactgggtgcaccctgacttgcattcccttccggtcagatcgaaggggttgtacttgaaatattgtggggttagttgagctggtgaaggaaagcttgaaactgcgcttgccaggctgaaaccccttccaccatcgcctgtgatgtctgtgccagtagcggaggatgcacttgggcagcaaccggccgaacttgtgcttgtacgtgaggggatgggtgtatggttacggctgaaggctgtcaggcgaagcacgctggcgcttgcatgacttgcagcggaaagacctggatcggcgcttgcggatagacttgaggtgggttatagcctgccgagtactagagaatgggtgctgatgcagccttagcttgtcgggccgcttcgtacgcctgctgctgcccttccatctgacgaagcatgtcctgaagtcgtgccatgttctgacgcatggcctccatgtcagcttcggcctgcgcgtcgaggttggggttgacttgtgcagcggcgagcgcggtcgaagtcggagcctgctgtggcgaagcagcttggggcgccacctgttggctcgttgaaaggatctccgccctggtctggagcacccttgctgttgcagccgtgttcggcgcctgccccgtcgaagcggcaggagccgaaggtggtggttgcagcgcaggtgccgaagccgatggtgccacgccagcttcaacgtcgggcgccgaaggctctactacctcttcggcggccatctcgcctcttgcttcacactccattcgcctagcaaccttctcctttgcgacattcttcggtggcattcgctcttagtggtttcactcagaggtccccatggtcggcgccagctgttgtcgaagcgacaaccgcgtacatcgaaggacgtggttactcaacagtgttggaaaaagtacatgtattattttgagatctttctttgggttccccacttcacatgtccctaggggctatttataatcctattaaaggttcccccattaggatttaggctttacaggggaatttacatggctgcccttatgaaagggacgtttgattgggtatacattgtaatttggatacatgggcctctaatgggccaattggcgaacaggcctgagcggctgggatggcccctttggcctcttcaaagttgggcttgttatggcgaagaccccatccttcggcatacacccttcgcccaatgatgcatttggtcttgccggataccagcgcgattcttcggccttcgcgatttctacttcatagtcttcgccatgggacttcgcccaaatgatcttagcgtcctgggcctgaatcctcgctggttgcatggtttcggtaggtctggtcgaagggactcatgacataccgcgaacactccccatgggtataaatatgtacacccaggtcattgtaaattatctccacgatcaataatactactctaagcgcatcgccaccctctttaccgaggtttttacttatcctccagtggaatttggcacctgacacggggctgcattagttcagttcgatctctagcgaagggataagtccaacgttccaccggcctaggcaattgtctcgtctacgtcggcatcgttcaaggctgcatcagtacattcgacctcttgaattgctctagtttggatgatatatttgcctacctatttatcagatgtctctgttaatctagtcttagcatatcaatttagctctattggctgcttctcgttttagggtttctgccggcatcggctaaattgtgttgctagattagattaacttagacatctaccacccttaaaatcagccataggcttgattgtccagatattatgtttcttttcatatttagtgttgcatcaactaaatttgatctattaagtcatgcttagaatcgtaatatctagcatgcttgttgactgccaataagggtttcatcggggctttagccgatgaggtatctggacgttgtatcggcttacaaggattacatacaatttggatttagccgattgcaataaagatttcactgttcaatctaatcttatggattttatgacatcggacctctagccgatgtatgctttatcctttggatcagtacttatcctatcatatcattattagccgattggtttctattggattatatgactgttatactgtattatcatcagccgattgcattatatcattatttactcaagtatcattatctacattggacatatagccgacatctcaaaactctatcgctatcggctagtatcggcatcggctggaatcactccatcggcttgtcaaccgatcagctcattgatcttcaatttgtatgttttgtcagttgcagggtcaaactgactatcacgcccgtatctcaccaagatttagacctgcactagagctaagcagatcttccatacctatattttttcgtgtcaacagtaccatctgggatggctcgtttttccgttccaatccaattcgtatcagtctgggtatcctgaacttttttacacgtactattttgctaaaaagacaaactctgaacacattagatttttttagcaaagtagtactactcaatcacttgtaataattacaagttaaacacttgtaaagttaaaaaatctaatcttaaggatggacgggtatttttttttaccagctgaagttaggattagttttttttttatggaggggtatttttttttttacttcagtttcatgggatggagcggtaggtaggagaaggttttaagagctacttcctccgttaaaaaaaccaacgttttaacatagtgatgggacattatacagtaccatgaatctgggtattctcatgtctagattcattatactgtattatgtcccatcgctacctacgttgggtttttttggacggaggggtataaggcaaggtgataaatgatactccctccatattttaatatatccctccatattttaatatatgacgccgttgactttttgaccaacgtttgaccattcgttttattcaaaatttttatgaaaatctgaaaatatttatgtcatgcttagtgaatatttgatgataaatcaagtcacaataaaataaattataataatgtaaattttttaataaaacgaatggtcaaacgttagacaaaacgttaaaatatggagttagtataaggcaaggtgacaaatgatgagatagctgatcagaagtggcaacgcgagcagtttttttttgtcaggagaggtttggtcgttgtctagccagtcgggtcaagcgcaatgaatgagcacgattgcacgaacgatggatgcgaacgtgcaggaggttggatgtggattagcggtacatgtcagctgggaaaactctaaacttttgtttgggtgtcattaattggttaccactctccccgactaaaaatataagcatttttatatttttgatacagtctttgagatgctacttggactaacaatatttacaagtaagatgttttaaacaatatttttttttgctttgattcctagtttactataatttcaccgtagtgttacagtcagaagtgcagtaatgtcctatatgttttacagtagcgtgacgtgttactgtacttttacgataattatacttcacgaatatagtaaaatgttatgagtttcctaataatatatatgttttgttttatggtggtagtgaaagagattagaatcgatcactatattcctttctcacaaagtaagataaaaaaacaaacaataatccttaaaacaaatatcatcattggatgtattggtaagaataacttggtatatactgtgagatcatagttcaaatcttgaattcactaatttatttttttaattttctataaaagagaaaaaaagaaaaaagggagagggaggaggaagggcatgggagagcagagggaggcgcacaccaggaggagagggggtatatataaactattataaaaatattataaaaattgaagatgtttctgctaaaattttagtacgtcatccgcattttagttgattttctaatatttatctttatctctaatctatcttaatacctaatacctaataaaaaaataagcaaggattccatgcatttgatttcatatgtcgtctctacgtgtctaaaccattgtcgtgtgcctccagccgccgccgtgccgcccgagccgaaccctaacacagccgccacatcgatctacctccacatgcattttctcctctaattaattaaaaaaatggattctccactcctcaatcatcctttcccccatgatttccccctttcaatttggctttaattcactagatttcaactcagtttaatggtagtgaatgatgctcggccggtgatttttccccggttgtttttatcctctgagttttgtggattcgctgcgtttttaggaaaaattgaaagaagagatcaagttgatcaaaagccctcaatcaatttgggagaccgagaaaggaagatcggcttcggcactgtacaggcacgaaactttcttccggaagttaagacaggcagacagagcgaagaggggtaggaggcagcgcggtttcaattataatatatagcgatactaattcttagtaactattgtatcactggaaaaaaacacatttacccgttgtaacacacgaacatttttttagtgtctatacacatatatacacatatgtatatgtatatatatgtgtgtctatgtgtgtgtatgtatatatatatatgtatatatatatatatatatatattaaatttgtttggtgctccatggtgcccgggcaccattgttgaaattgagtatatacccaattcaaatgagtatgaaactttttcaattacttaggtattaacattaactactttactaactagtttaaagcaagtttgaactgaatttgaacttgtttttgttagattttgattctaggtatatagcatccatacatataattagttaggtatgtaatcatggattgtgaaataaagttaaatttgagttgttttgttgataagtataggtatgaatcaaattattataactaggtatatactcacaatttgaaaattttgaaaaatttgagtgattttgtgcattagataccatggtgcccgggcaccatggtgccccatatgagtgtcctatatatatatatatatatatatatatatatatatatatatatatatatatatatatatatatgtatatatatgtgtgtgtaagtataagcatttttagcatagtaacaagtcaaacatttttaactttgactatgttaacgaccaaatttggtaagatatgaattaggttcgacgttggaatcgaagcggattcggcggattcggcaaagagttagatttgaagaacagcgtatgcgtcggctgtgaaggcatcggctggagtctgaatcggctgagatggatcggacagaggataaccgatacagccgatagagttggtatagccgattctgataaagatggcttcgaggctattcctagaatcaattaacgtgcttcataaggattgccacgatggagaaaaagcttttagaaagtcaattgtagctattaataaggatatctcatgtaaattctttagagatatgtttgggcaaaagtctgccgcaaagacttatggtatcttagagtttgttagagataagaatcgtgtccggcaaggacatatcttgtaatctcggatataaatatgacccgagcctatgtaatcaaataacacacattcaataacactttcggcgcatcgccacccttttattctatttcgacgagttcttgctttcgggttgagctgcattgattcgatcttcaactagaggtaaacttgtcaaggcggtttgcgttctcgggattagtgcttccatctttatgacactctaatcttgtttatgtaattcgtcgagttatcatatatactttacaatctttgttagttgtgctatataacttgtcatcggctagttcttgctgttaagaagtaaccgatagggctatgttttgttgttaacttggattgtatcgggtatctaccatctcttagaagttttcatcatcttgtttagatcctacagttatctttatgcttaatgctgcatcggttaagtttgagttcgatctattaagttctatctataattgtgatatctagcctgttttataataattaatagagatagtatcggggtttcagccgatcttacctgatttagctactttatatcctatatgttcgattgatatgctaaatctgccatttatattaagatcttattgcattaaggtatattaggcttcttgtttgatatattctgcttgttctaatatcttagtatagagtggtatcggagtattagctggtacatgctagatctttttgatcggctatgctataaacatctatataattaatactttagtatatatttcgacttaagtgatttatactgtctcggcacagcgaccgatctatcccaatcacttagtttaaatatgtatcgaagtagagattatatgttattaatatctatagccgatcgagtagatttagtcttatttcattcattaatgactgccgatcgattcagatatgacatcggctcagagataaatgatatatcatcggcaactagccgatcagctatcgtctatagatttaaccgtgtttttcttatctttctttcttattgattgcaagatcaaatcaactggcacgcttacgaatctaaaggcgagattttgaacctgcacaggagttaaacagatcttccaggccagtgtatgtttttcgcatcaacagactattaatagaaaaaaaataaaaaaggtcaatcatataaaattgatgtttctagatttatcattagacaagctatcataatatgcaaatctttttatttaaaatattttatttttattgatatagttggtcaaagtagcatatcgaagatcgtgtcagagtccaaaagttgttatattttgagacagagggagtatataataccgcttataataaataatgtatagttagatgtaggatggtggttataggcagaatgtggagaaatttgaattcgaagtggttgatatgacaagtagcactatcatagtgataactattttactataacttttaaatactataaagatactaacaattataggatggtggaagtacatacccagatgtggtcgatgtcatcgtcctttctgctagctaaagcttcagttaaaaccgaggtggccgtctgaccgtcattgttaagcagtgtgacgtctatgccttggtgaagcaataaagcagaaattatcctcgaattaagcttctctgctgcgagatgcagagcagttcgtccgtatttatcttggatgttaacgagatgccgtagttgttctgaccccagaacaaaccgaacaaactctatgcgatcagagtatgcagctgcgtgaagacacgtccagcctgtttcgctgcagtatggagtatctggacaatgcttaagaagctctcgagcaacagcaacatggccgttacgtccggcggtacaaagaagactactgccttctctgttcattagataccctacagaaatagttttagttgatcccattcactttttttcactatgtgattggtatccctcttattttaatactaacgcatggtattttctctcatagaataacatacatgttttctcaatgtattattcaaatatattaaaatgacaacataattttaaattttgtactaactttacgaaactactaatgtgtaatatttatattgtattttacatacatgttagttattaattatttttaatattaaattttagttatttgtaaattatattcctatatggactctagattcgtctttcaatatttctttgttttaattctgaatttttgttatctgtaaattgtatttctatatactccctcttttccacaaagagacaaattctagcatcccaatgcatcactaaaggagaggataaatgtccaaactaccccttaatattagtaaattagtattggtgggtaggtaggtaaggggtattaaaggaataaaattttttgatttgtgaaccgagagtagataagaaggtagaggtagatttattttcggacaaagtttgaattgtagaagttgatttattttgggacgtagggagttgactctaggctcttcttccaataatatttttttaattctgaatttttattatttctaattatatttctatgtggacttaaactcatctttcaatattcattaatttttaatttcgaattttacttctaaattgtattgctatattactttatactcttcttcccatgtttcttttcaattttgaattttatttatttgtaaattgtatttttatacgaactctaaactctacttttaattttattatgtttattccgaattttagttacttttaaattcctatatggactctatgctctgcttctgttattccttatttttaattccgaatttctattattccttaattgtatttctatatgaactctgtactctacttataatattccttatttttaatttcgaatttctattatttcttaattgtatttctatatggactctattatcctcttccaatatttcttattttttaattccgaatttcaactctttctaaattgtatttctatatgggctctgtttttctttctctcctattaatatgagaatttctaggataagccaacaagaagatcaaaacattcaaatgaactgtttattatgcagtcgcatcacatataattaaatagttttacttgatcccattcacttttttcactgtgtgattggtatccctcttattttaatactaattctcttatatacagcgtttgttagaaaaactaggaatgactcacgcaacacgtgggcattcatattattaaaacaagatattatagtttgttcaaaaatcatatctcatagggcaaactataggtcgggtgaatctaaaaacaattcatcgacttacaagatagatcaagctcatatgacttttgaaccaacctttggatcgagaatgcaattatcatgcataccattcaatattgtcaaaaggaaaaattaggacggtaaggaactcaaggtatgatttaggccatgtttgatttagcttaggattattataatctaaattattaggagtatataagctaaaacaaataagtagattattatgatagattattataatctataagccagattagtataatctaatatactaatctataagccaaattagtataatataatagattagtataatctataagccagattaatataatatgaaaattatggttggattttttttccgttcgtacaagtttaaaattttcatattttttctccataattctaatgaatttttaaggcgttttatgttaggaaacaattcacctacacaattagttggcttgtagtccaaaatatcaacaatagtttgcagctaatttctttcttttttgtatgtttgtttgtttttgttcaaaacaatatttatttgaaataagagtaaaaatatattagtatgtgtagtgtgcctataaattttgaaatgtttttaataaagtttatgggcgattgtgatcaacttagctacttcaggtagagcactaggtcatatgcccactaggcaaggacacaatgtgcaacgtgcaaagactggaaagagatctttagaggcttttttagaacaaaagatagacctgatggtctattatcatagcaaaatattttttattaaaaatagttcaaaatagtgggttataaattagtttatatagatcataaattgctaatttaatggtacaaaataaaaggtgcacctaactaagaattataattgttaatataatgggtaaaataatatgattttataaattttcttttttaaacattgtggagctaatttagttacgtatatatgataatatatacaatctatgtttataaagtcaacttaaaattattttcactaataataattgtgatctcatctattcagggagaaaagagggaaggagaccgaagcggatgtattttttaatgataaatgtaatttatgttttttatctttttatgtttttaaattatactacctcaatgctaggaaaatacaacaagaggtgaactcactctttgctcaacttaacccaaattttagtgagagttttatactacctaaatgctctacctttatattgctatggtttatatctgaaggcatcatcactacgccaagaaggataggttaccttgagaacgttctcaagggttacaatatcattttccaataagaagttagagtaattttacttaaggctgtgcaggagctgaagggctgtgcgcgaacccgagaaaactttttgcattctcatttatgttagccttgattacttggatgtggtttcttatgttcacactaagctaggagggatgttcctagtataaataccactctactttatccattagacaacttttgttcaattaaaacctcatgtactagatgggtaccccacgtgttgctgcaggagaattgtgtgataatatagtatatatgagttctaaaattttcttttttccctactatatgattttttcatgtgtttatttttttacctttatcagttatccataggttataaataattgggttgtatggtatgccttttggggggggagagatgtaatttatacccttgataaatcatccaaagcctaaaaacaatttagataatgcgaagaggtgcaatttacacccttgatgaatcatccaatgtgacggagcgtggggctcctcaccgggagaccgcacgggcccccctttgccggttcggccgggggctcagggtgagatcccaagctctctgtgtatgtggaaagatcgcgacctattgaaagagcatgaagcacaagcgatgtatacaggttcgggccgctgagaagcgtaacaccctactcctgtgttttggtggatctgtgtatcaaggagctacaaagtgtgagccaacctctcccttttcttctagctactgaatctggaaaaagtcatcccccttccctatgggcaaggtcctccttttatacttcaaggggataccacatgcacccctctctttccaaactggacttttcttctcttcataaatggacggagatttgcacgggtgtcctccgaacatccttctgacgggacgggacacacctacctccacttctgccggaggcaggcgcgtcgtgggaacgtggctgtgtgctgacgacatgagcagtgtcagaccgatcacaaatcggtcattcttgtccaccacgcgtcagcttagcaacgggcatgtttgcccttcttcacacaacatcttgcctgtaatggttaggataaagcctggcatatatcgaccggggctaacgtgccatctttgggatgtaacacgctaactccagctggggacgagtgcctagaagctctcgtcttgacgggatggggcgaagcgtgcgtcagaccgcctgtcgccacctaacccgcgatttgaccggtctgtgactggtcacagaccggataaacgagtggagtgcactgtatttcgtgcggcgtgacacgtttagccgagccgcaataaatgcggttaggtgagccctgctgtgctcacctaacccatgcacgcggagtagaacccgcgaggggtcggggcgcctcggccctcgggggcgaggcaggagtggtccgacccccccctcggggagaccaagaggtgggcgcacacatcaccctcgggcccgacgtcccccgagggtgccaggccacgtgggcgattgtgtctgcctcaagcctctagtcatgatactcccggtcccatgtcaccgacagtagcccccggcgttatgccagggcgatcgcccttctcaagggaagcggtcgggcgtgacgccactcctaaagcctggtgacaggtgggaccggtctccatggttgggcagaaacccaacggtctcaaaccatgcgcatcggtaatggtaacttggctgtcaataatgggcggtctcttcaagactgtcacctcacctgagcagcgcccaaatctgggcgagccgatttgcttcgcctggagatatggtaacgtcgcttcggtcggcgagcgtaattaacgcgcgcacgatacgatctatctcggctgccacaaccgcaagccgctcgggaggaggccgcccgggctcgccaagccgaagaagccgctcgggaggaggccgcccgggctcgccaggctgaggcgatggcgacttccgaggcagctcgcgatgaggccgcgggcgcgtcgcttgggcccacctcctcgggcgatgcccaggcgacagcttctaggatggctcgcgacgaggccgcgggcgcatcgcttgggcccactccttcgggcgacgcccaggaccaaacaggtccgggggacatccccgaggccggcacgtccattggcgggccgagccgcgcggcatcttctccaaggcagctcttccccacgccttccgtcgccccgctgagcgcagagccccttctgcaggccttagccgccgccaacaccgcggtgttggatggattaagcgcccaggtggaggccctgcaggcggagcgtgcggagctcgacgccgcatgggcgcgtgtcgaggaggggcggcgctcggtggaggccatggtggaagcaggccgcaaagcacaccgccggcacgtctcagatcttgaagcccgtaagacggcgctggcggagatcgcccgagaggtggaggaggagcggggggctgccctcatcgccaccactgtgatgaacgaggcgcaggactccctccgccttcaacacgggagctgggaggcggagctaaagaaaaagctcgacgccgcccaggaggtccttgatgccgccgctgcccgagagcagcgagcaacggagaccgaagcggcgctccggcggcgtgaagaggccctcgaggcacgcgccatggcgctggaggagcgcgcctgcgtcgcggagaaggacctggcggaccgcgaggccgccgtcacctcccgggaggcaacgctggcggcgcacgagtctgcctgcgccgaagaggagtccgcactccgcctccgcgaggacgcgcttaccgagcgagagcgagctctcgaagaggccgaggccgaggcgcaacggttggcggacagcctgtccctccgtgaggcagcgctgacggagcaggcgcgccgcaacttggaatccgtccgcgccgagagagccacgctggagcagcgggctgccgacctcgaggcgcgggaaaaggagctggacgcgagggcacgcatcggcggggcggctgcgggcgaaagcgacttagccgcccgcctcgcagatgccgaacacatcgtcaccgacatgcagcgcgcgctagattcatccgccggggaagccgaggccctccgcttggcgggcgagatagggcccggcatgctttgggatgcagtctcccgtctggatcgcgccggtcggcaggcgggcctctggaagggccaaacgatgaagtactccaccaacttgggaggcctcgctcagcacctctcaaagatggccggagctctccagcagctccccgaggagctcgagaagatcatcaagtcatcctcgagggacctcgctcaaggagcggtggagcttgtcctggccagctaccaggccagggaccccaacttctctccgtggatggcgctggatgagttccctcccgggaccgaggacgacgcgcgcgtgcgggtcagggatgccgccgaccacatcgtccacagtttcgaggggtcggcccctcagctcgcgttcgcccccaactccgacgaggagggcgacgccagcggtgctgacgaccgtgacgacgaggccggcgacccgggcgcatcggattgagcccccaggcccccgctaatctccagtttttttccttttctttcttctaaggccttcaggcctcttttttgtatagatcaacttaatctgcaatcaaaaatgatgaaaattttctttgtgttaattttattttgctatgcaaatgagatgaggatgatctgtgccgtggtcctcttttgtgtcttagcttgatttaaggactcgtgcccaagtcccagccctcgaaaggcgcgggtcggggctagtgcctggggagatccacatgtcgaggctggccaggccgggaacgtggtgaccgagggttatgggtgacccgattgtgggtttttgccgattcccccccggagttcaccacgccccagggcacggctcggttctgggccccgtttggcgattttagctgaccgaaccgagcccccgagggcaaggttgagcacgagtgattttatttcaagtcaaaattcttcaaaaaggaaaaaacggcacagatacagcccttaggaaattgaaactgcttttattgaaatactgaaataagagaaaagagaatgtgcatgtgtggcagcccccggccaaccctgcactcccgaggggggggtgcggggttggcccgagcccgaaacctgacgcccgacccccccctcaggggtagaagcgacgaaggtgttcgatgttccatgggttaggcaactcagtgccgtcgcccgtggccagccgtatggagcccggccgggggacgccgatcactcgatacggaccctcccacattggtgagagcttgctcaatccagcacgcctttggacgcggcgtaagacgaggtcgtcgacgcagagtgatcgggcccgaacgtggcgctgatggtagcgccgcaggctctgctggtagcgtgcggctcggagggccgcacgccgccttcgttcttccaagtagccgaggtcatctctgcgaagctgatcttgatcagcctcgcagtacatggtggcccgaggagacctcagggtgagctcggatgggagaaccgcttctgcgccgtagacgaggaaaaaaggcgtctctccggttgctcggcttggtgtggttcggttcgcccagagcaccgctggcaactcctcgatccatgaatcgccgtgcttcttgagaatattgaaggtcttggttttaaggcctttgaggatttctgcattggcgcgctccacttgaccattgcttctggggtgggcaggtgaggcgaagcagagcttgatgcccatgtcttcgcagtagtcgccgaagagttcactagtgaattgggtgccgttatccgtaataatacggttaggcactccaaaccgggccgtgatgcccttaatgaatttaagtgcggagtgcttatcgatcttgatgaccggataagcctcgggccacttagtgaacttgtcgatcgcgacatacaggtactcaaacccgcccggggcccgcctaaacggtcccaggatatcgagcccccagacagcaaatggccatgaaagtggtatgatctgcagggcctgggccggctgatggatttgcttggcgtggaactgacacgctctgcatcgccggaccaggtcgaccgcgtcattgagagctgtcggccaatagaatccttgacgaaaggccttgccaaccaaggtgcgcgaggcggaatgggctccgcactcgccttcatggatatcagcaagaagctcaacgccttgttcccgtggaatgcacttcaggaggattccattagccgcgcgccgatagagggtcccttctaccagcacgtagcgtttggatatgcgatggacgcgttcactcccttcgcggtcctcgggtagagtcttatctgtgaggtatgcttggatctcagcgatccaagcaatcaatctaagggagcttgaagcgctcccttcgggtcccgaggcctggactccgacgggcctcgggggccggtcaggcacatccgtctcccctaagggatcgggtcgcgccgacggctgggtaagcctttcttcaaaggcgcccggtggggtctgggctcgcgaggacgcgagccgtgagagttcgtcggcaatcacattatcccgtctgggcacatgccgaagctctatcccgtcaaaatggcgctccatacgccgtacttggcgcacgtaggcatccatctgcgggtcagagcaccggtactccttacagacctggttaacgactagctgggagtcgcctaacaccaagaagcggcggatccccagtccagctgccactctgagtccggcaaggagtccctcgtactctgccatattgttagtcgctcgaaagtcgagacggaccaagtatctgaggacgtctccgtttggagaggtcaacgtgacccctgcaccggcgccctgaagagacagagaaccgtcgaattgcatcacccagtgggcggcgtgaggcagctgtgaggggttcgtgctggcctcgggcattgagacggtctctggagccggggtccactctgccacaaaatcggcgagggcctggctcttgatagcgtggcgtggttcaaagtgcagatcgaactcagaaagctctattgcccattttaccactcgtcctgtaccctctcgattatgcaagatttgaccgagggggtaagacgtaaccacagtgacccgatgcgcctggaaataatggcgcagtttcctcgaggccatcagaatagcgtaaagcatcttctgggcctgtgggtatcgggtcctggcgtcccggagggcctcactaacaaagtagacaggccgctgcacccttcggtggggccgatcctctctgctaggggccgtatccccggggcgttcttcgttcaagtggcctttcggggcgcacttgtcttctgtaccgatgaccttggggtcggaggatgaaaggggcggccttccctcagtggcctcggggccgtcctgggggtcgggggctcctggcatcgtcggacaagcgggcaaagggccaactccggtcgtcaggggcctctggcctccgttcggctcgggggcctcttctccctgctctttcccgggtcgagtcagcacagggttagcctcggggtcaaagggcgataggtgcggccttcccgcagtggcctcggggccttcctgagggtcgggggcacccagcaccgtctgacgagcgggcagagcgccgactccggtcgttaggggccttaggccactattcgactcgggggcctctcctccctgctcactcccgggcctagtcagcacagggtgagagtgcgcggaatgaggattgtcctcatcgcgctccacaaccaacgatgcactaactacttggggggtcgccgctaagtagagcagcaggggctcgtttggctccggggcgaccagaactgggggagagctgagatacactttcaactgagtgagagcacgttcagcctcctccgtccaagtaaacggcccggagcgtttgaggagtttaaataagggtagcgccttctctcccagcctcgatatgaaacgacttagggcggccatgcaaccggtaacgcattgcacatccctaagcttgctgggggggcgcatccgctctatagctcgtatcttcttggggttggcctcgatgcctcgggcagagaccaagaacccgagaagcttgcccgcaggtacaccaaacacgcacttatcggggttcaattttatgcgggcggagcggaggctctcaaaagtttccgctaaatctgaaagtaacgtttcctggttgcgcgtctttacaaccaagtcatcgacataagcctcaacattacgtcctaattggctacccaaagaaattcgagtagtacgttgaaaagtaggacctgcattctttaacccgaaaggcattgtcgtataacaataagttcctacgggggtaatgaacgcagttttttcctcatcctccctagccatgcgaatctgatggtaaccagagtatgcatctagaaaacacaaaaggtcgcaccccgctgtggagtcgacaatctgatctatgcgaggcagggggtaaggatccttaggacatgccttgttaaggtcggtgtagtcgatgcacatccgaagcttgccgttcgccttgggaacgaccaccgggttcgccagccactccgggtggatgacctcacggatgaatccggcctccagaagtcgcgccacctcctcgcggatgaagacttgacgttccggggcctgccgccgcactttctgccggaccggccttgcgcccggccgcacggcgagacggtgctcaatcacctccctggggaccccgagcatatccgccggtctatatgcgaagacgtcagcgtttgcccgcaggaaggagacgagcgcgtcttcctatttgccatccaggagaccaccgatccgtgtggtcttggatgggccgtcgcccaaggcaacctccttgaccgggacctcgtcgcatgtagcgatccgctgcctcggggcggtgggggcagatgggccaggcctctcgtcaccaccctcgggcttggatgcagcagcgaggcggtcggcacgctgctccatgcaagcgagcgcgaccttaagatcgccatggacagagatggggccaccggggcccggcatcttcatctggaggtaggcgtagtggaccgccgccatgaacttcaccaacgcgggcctccctaggaccgcgttgtagggcagactgaggtccgccacatcgaagctcacccgctccgtgcggaagttggcgggtccaccgaaggtgaccggtaggtcgatgtgacctaatggccacgtgtgccccggcgtcacaccgataatcggctgggacggtcggagcaccatccccggggccttgatggcatcaaaagccgcgggggaaaggatgttgagggccgctcctccatcgatgaggacacgtcccaacttcacgttgcagatggtgggggaaaccaccatcgcaacctgccctccccgggcaatgcacggtgggtggtcggtctggtcgaaagtgagagcaacctccgaccaccgcgcccgacgcgtcgcctcatgagtaggggccatggccagaagctctcgcttcatagccttgaagctccggcgagagacgtgagcacacgctcctccatcgacggtggcaatggtggccccaggttcttggaaacctaggtcatcatcaccatcatcgatgtcaacagcgggggccttctgcttggcctcacttcgccgtttgccggaaggaaccgccggggacttgccctcacggcgttcctgcctcctgtcctcctcccacttcctcgttcgctcagccaaatttttgactgcgcgacagtccgcgagatcgtggagggaggtgttgtggacggagcaccacctgccggcggggcgctccttgctgggagtaccagcctctttctttttgtcgctcgcaggcctcccctttcgggtggcccgcggagcgccctcgacggcgaggacatgaccctcatcgccggaacggtccgacctcttcttcctcctcctgtcacgccgccctgtctgagcggcggatccgggggcggccgaagctgccactccggaactggaggagttccatgtccacgcttcctctttacgagccactcggtccgcgagctgaaaaagctccgcggtagtctggggctctttggaagcgatcttttcgagcatgcggttgtgccgcacgccccccctgaacgcgtagatcaccgcgtgtgcagggatgcaaggtatagtattgcggacttggcaaaaccgctgaatgtacgagcgaagcgactcatcatcgcctcgctgtactgcatgcaagtccgcttcttcgcctgggcgcggatatgtgccttggaagttcatggtgaactgttggcacaaatcttcccaggagtggaccgacgcgggtggcaggttcatcagccaaccccgcgcctgtccttttagggccatgggaaagaagttcgccatgaccctgtcgtcacccccagcggcctcgatcccggtcgtatagacctggagaaactcggtggggttgacgctcccatcgtacttctcggtgatggtgggccggaaccttgggggccaacggacattccgaagactcgccacaaaggctctacagccaacaccaccagccggaggcacggagggctggtcctcacgtccatgtcgaggtgacactctggacgaggaggcaccctccgttgcacggggggtacgccggctattacgccggcgctcgatgttgaggcgggcatccggctccccatgctgatcctcccgagtcgaaggtgtcgacgagggagtagcagccgaatgacgtgcagccgccgccgctcgccgcgccctccgccttgacgacacggagccggtggtagcggcaccggaggtcttggtggtggcggaccgtccaccagcacccaggcgctgctgtgccgtcatgaccaagttggccacatcttccagccatcgttgggctggagactccgggtcatggacgacaggcggatgtcgtaggagcgcgccagcagcctgaagcgcaccctgaggcgtgctgccgtcgccgtagacgaggaggcggcgctccccatcttgccgtcctcctgcaccacctgcgactggtgatgccatggacttgtcgaccttctcaagcgcctccccctgcttagggcttgggcgcggaggagatgggggagtacgagctcgacggcgtggattcagctccccgtcgtcgccgctcacactcggagagaggtcgtgcgcctttgctcgctcggccattaggctgaacaagggaaacttggcgcccacggaagagtctgagagctcagaaaacacacgctgagccccctacctggcgcgccagatgacggagctcgtggctcctcacc

SEQ ID NO: 7494 - DNA, 7869 bp, Oryza sativa
gggcgcacgaacggcagctgcgagaacgactagatgcccgcggccgccggcacgtctccgacgtgtttcgcgtcgtgctcgctcatcgccggccagccggccaccgcctagctcgccggcaaggtagctagggcaagctagctagatagctactgaactacaggagattagctcgctagctaggtaggttcaaggtgatctgatggccatgtgtgttggcaatggtggtggtggctctagctaagaacaaatgggttgggttaagttcggagtgggggagtggaacgaacgggaccagtttggggatggtagggttgacaacgagtgtgtttaatgcagtgtgtgcaatttctcttggctcttataatcttgatgcgttttaagctttgcattttgtgctctatatgtgtttggtgcatctgtcatggtacgatcaggaaacaatgttaagttttgttgggtgcaggtctctctcttgaatgttggcaaatagatggttgtgttatggagaacgggaacaaaaggtcaaaaaaaaaaaaacaatgaaaacgcggttgtagtcacattcgcatggtcggggtcaaactaaaacttttatcgagatcaaaactattatcgtaaccacttgaaccgcatgcaaaataagaattgtgatatagcgtatttgctattgggacaacacatgacatcaactgtacacaatcaacaccgtccacttttcaactcagtagtgtaaatcggccgctaccttgttatgtatgccttttcctattggaaccaagtacaataattttgttacaacgccaagaaaaatctcggtgttccattttaaatcttgtaatggtagtgagacaactagtacttaatttgttagcacactagccgccacacaataattggattcgtaataggacacatacatactccttgggatttcaacatataaatatgtaacatgttgctaaccccgggttttggattctttataatttgctattcttatggagaatgtaattttcgctctcatgacatataagatcatctgagtcatcactaaatataggttagaatggtaaattatatgccgctcatatgttaaggatatataacatattatcaaatgtcccgtgggtttctgatcctaacacaaaaggtgcaaacccgctacataatatcataatgtgcacattgctcatgtcctgaagacacgaaagccaattcaactatgttttcaaaagaaatgcaattagtattatattcttctgatggtgatgtttggaaaacttcaacacaaaatttggattttgacacaacgaaaagctacttgtttggacttatgaattagtggtgggacaaaataagaaattaagaaaagaatagggacttgatttccacatatcagtgctgatggacaataatcttgagttcttaattttgattgaacataacgagaatgaaggctaggatttggccgataaccagggaagctagagcctagctcatgtgaactaacttaagattttggtccaaaacctattgtattctcaatccagtggactcactgagagaaaactgaagaactatgtgcaaattaagtgaaaaccgaatccatattctgcagttttgtgatgcgtacggatcaattacatcaaaagagaaccaactcaactacactagctaccagtgctgttcaactagatgttgttagttcttcaactgaaaacgaactagcatgccggcatgttattgttagtggttgtggcacaagacatgcatgccgggcatgttagtagttgtggcacaagagagatctaaagccaagataaatgtggctatctatctatcagggcagcatatatgggatccgtaccatttaaattaaaacctcttggtatatgcgattatcaggctattaaataccgttcgcgaactgttgcatcacacagccggacgatcgtacgtctagctagcagtgcaggcattagctactctcaccagccggccgcgaaggcaacagcctgattgacgacgacgatggatcgaacgcgaaaagcacactttcccatttaaatggcgacctgctttaaattccatcacgaaaaatggccacagaccacaaaaagaactgaagcttttcgcagttttgccgctgttattttcgtggcataaatagatagacaacgtagttaaaggtagctacattttattttacctttattttgtgatggagaagaacgaggtagttcttgaaatggcatacatgtagcggaaaccatcctaaactctcgaggagacattccctcgttgttcacgaaatagttatgacaaactgtttgatggtattttggcgattatatgtgtacacaagacttactcatgatggacaaagcaaacaagcagtttgtaagttggctagcttatcatttctacgcaatgcccggccatgtatatacacgcaaatacatgcatgcacaggcagctgggaatatatatacttggattagtatatatgcatgtataattaaccaataactagccgtgtgaagattggctggtgaggcaatcacgtgcatgcatgcatgtactacagtagacggtcgtatgtgtgtgcatgcctgggtgattaagcaacctatgcatatccgagtgattaatcatgggctcggcccatggccgaagacggtagctgcctacgcgccaagatttcagaagttaatatgcggaagagataaaaccagatgaattaagagataaccaacaaaccaattgattttatctctataacaaacttgatttagttagttacttcgcgcgagcgctggtgaggcgcttatcaccagaccgtggcccagcagcagagaaacaaagcaaattacaaatcagatatttgacgccaggagaagctaagagataaaatcaaataaggatatgaacaaataacaaactgatcgatcaagccttatctgcaacgaacttgacgcggaggaaacggcgcgcggacgcggcgagcaccgaccccagacccctatataaggcgtcgacccctcggcagccaggggcattcacgaactcatccacacattcattcaccaatgcatctagcatccacaagccacctatcatcaatgcatctacccatccagcatcaacacatccatccatcaactctcatcggcgatccatccatcaactctcatcggcgatccatccatcgacgacacgcaccggcggcggcgagctacttcggccggagtcccggcgtccggcaggagagggcgcgcacggtgatccgatcatcagcaagcgcaggagaggagcttgatggctagtccaggtaaaagctagcaagattgttttgttttctttcatatacagcacgcacacatccatgcatagggatccatctgcacgtatcgtcgtcgccggggaagtcgcggtggccgattcatctacgcatcacagaagcctcatcgatgccggtgtctgttcaagccgacgtagtgctacttgtccctggactcgacgctgctaattcaagccgttggtgatgcatctacccgaagctgcgacctcgccgagataccagacatccttgatttgcaagcttcaccgcactagagcgggctaaccatggaggaggtcatcgggaagccgccctgccggagcgcgccgaggatcaccggagctgccgccgactgccaagacttctatcagttctcatgccggaggtcaagcatcacgcatggcgtcgaaaccagcggatgacgatggaggcaagtatggctgcagtacagaggaaggacgacgggaggatggcgagccagtgctgttggatggcaacaagctagctaatgcatgttgattaagttaattattgtggcaacgtggccaaccaatcggaggacgacatgtcatcgctgctacagtgccatgcacaaaccaatgcgtgggctgaagaagtcctgttggtttttcttatttgtcccaaatgagatgccgagctttgattaaatccggccgccgtctacatcaaccatcttcaataactcctccctaattcttctctaatataatctcgacgcaactgttgtgacgtcaagtcgttcaagctatgcaactccatgcatgtcttcaccaacaatctacatcgacacgttattcaagaccgacgaggctagacgacggagggtgggcgaccaacacaggcgcacggaccgacgaggccatggatcgctgtcggcgctcacacacacacacacacacacacacacacacacacatctatatcatcatcacaaccatgcatgaagaacgcgaagcgaagacgacgagacgaccacaagcagcttaatcggaggttctcttgcaggcctagacctgcggaggtaattaactgggagcttctcgaggccccaggaaccaggagaccacatcgcacaagtcagatctgtccaatgacagattatggagcgcgcatacatatatattacattgggaatttgtatttatgatcttttaagattaataaagagcatgttccctatgttttgtttacattgtgtatttaggtacactggcacgcccgcacatatatgtatctctaaacaaacgagatcttagatgttattttccaccctaaacaaattggcacgcccagtgggacctggttctcctcccatcttcgctatgctgtggtcgtcaagctcgtcttcgctgttcatccaaccaacaccaacatgctgcatgatgatcttcaacgtggagtgtacctgaccaaggctccttcttgcagggggactttccatcatcgagaacaccctgacgccctttgtgattcagtttggatcactaccaccggtgacattcttcgagtatggctccaaggtctacatgcaacaagctcaagatgtgacccaattccaggaggcccagtctaagaagcaatgcaagcgtgcttctgccaagacgaagaaggagcggcgaaccctcatgcttgaagcccggaccctcttgaaggagtccgttgtagctgagattaagggagacatccaagctgcacagaagctgcgtgtcaaagcttccaataggcgctcaagtactgcatccctgcgtgcccctgatccagccgctactccaaagcggcctaccccaactgtgcaacacacagaggtggagctgcttgaggctctagaagctgtctccgacaatcttcgtcgacacatttcgcatgctcgacgggcaaacagtcctcatcccctgcgcaactataggaggaagtatcgcaaggtgcagcgtctacaccaactcgttagctcgcgcatcgcccagagctccgtcccagaggaagactggtctcttgacacatctgtcctcatcaagaaggtgttcaagttcccaagcattctagagccaccttacgacttgttccctgacgaatgggcatgtgagccaactaagatcaaggagaaagtcagacgagccatcatgaaggagtattggaagcggcgtgatagggagcacctcgtccttccaggctcaactatctccttcgactacaacacgtacacccctcgccagcagagcacgtgggagtcatgcctccacctatttgcggtaggagggtcgtctgactacaacaacaacaggttcgctgtcctgcggtctgaggcacccgctcctcgaggcgaagacttacgacaagaacttcgtaagctgcaagaccgaatggcccaacttggaagacgactctaggatcatgaagcaccacaatcatcatcaacacaagctgggggcagatcaagacgataccagccaagttatcgtcctcaacatgatcgccgcacgctggctcctcgacgtacgcttccatcaactcaagtgatgcaccagagacaaacagcgttgcctccacgctggaaccggtggtcaagacgccaagattatcccacatcttcacatcccgctcaagaatggtgagttcgagaagctccatcttctcaagtgccgcctcatgttccatcttctccaagacgagaggtctatacacaaaggcaacatgaaaccaacgcacctaccccagctacacggcaggtggcaccacttcttctcccgacgccgtcaattccgccaagacgtcagcatgcacctactgagaatcaacgcaagcgagagcgacgtcgtaacaaccgctacgctctctacagagagcttgaagacctagtgctaaaacacactcaagttcgtgttcgtctagatggagaagtgcatcaagaagatgaaaggatcgtgttccgtatctcccccagtttggagagggatgcgaggtataactaccttatagctcgtctaactccaaaaccccggagaacacaagacgttgctgacaagaatagggagcagacgttaactcaatctcgccacgtaaccatcctgcagcgagggaaggggcaagttcaagctaccttgggcacgtcgccatcaacattagtaagacagtccaagaagaaccaatctactccgatggagggagtcgagcagacaccagtagagcaagtcgacaaggcgtctcgacaagaagaagctatcattaaccctatggttgatgttctaccttagcaggaatcatcctctatgcctccagccagagttgaacaggtggcgggaagcaagaacatagaagatccaaaggaaagcattgtcatgtgcagcgcactagccgcacaccacgaaaccaagcccaatgccgcatgggttcccccgccgattactcacgacttcacctacccttctgatgaagagatcgtgccaaatccaagggcaaatttttccaagacgttcctcccttagttggatcaagtccacccacgattcagctcggagggttcaagacgaagcacatcttgctctcaagaagcaactagagcttcggccccttgtcttcctatcggtacaggagaaggatcgttatttgataggggcaaagcactccagtcagatgtctcccctcgtcgctacatcgacattacgacacgcctaccccatgaccaaagcgagctactttaggttgcaagtcgacctggtgctaacactcgcatgaaggctatcgctatcaagaatgttgagacaactccttctcaagcaagaaaagacctggaagaacatgttgaagttgaagatcttgatgagttagagtctacctcatcgtcatcgctggaagtgaatctcgatctccctcgctataatgaactcaacccatccctgccttcagacggagagggttatcctaataactttgatagtgcacctgcccatgtgacagcagaaatcgatcgtaggcaacatgctagacaacacgctccacgtggtgagaatccgtccattgggaacatagcaagtacatcaagataacctctaagtttagaggaacaagtccaagaacaaagacaagtggtagaccaattagcagcaaagcttgatcgcttcattgatatcatgacgggtcctgatccgaaccagaaccaaaaccatgatgctctggtcatcgaggatccacagattgaagaagtggaagccatagcacatcacccaacgcaaacccatgatgttcagcgacggtcgacgtcaagcgttcgccctcaattccttaacattcctattgcctctgctccacttcccaccacattgaaagactatcatgacatggttgaagacctggtgaacaagcggctgaagcaaatctccatcgagcaaacaccccgaccaatggagagtgagcttgagaagctatatgaagcttggcacgatttagtacctttcccggcagggtggcacccacccaagttccgtcaattcgatggaaccggagatgca

SEQ ID NO: 7495 - DNA, 12287 bp, Oryza sativa
tctctgcctgcagctgtgcagcctgcctggttgcatgcatgcatccggcccctgactatattattacgtccgcatacttggcatgctgcgctggctgcgctgagctgagctgagccattcggccggcatgatgcagcagcagcagaaggcagagcaggagagaagcccatctagcagcagacgtggggatggatggatggatggatggatggacgcagctggcagctgtgtggctagcttgatctgatcacggagcctggccgtgcagcgcagtgcagtgtgcgtgcccgggcggctgctgctgcgagtgactgagctgagctagccagctaattccgccgggacggacggagacggcgcgggaccatgcggcgtgcgtgcgtacgcgttggaccgcgtggtgtgcgcgcgtgctgcgtccgtcgatggatgcaaaccatggctgactccaccgccggtatcgttggttagttgcagttcagcagctgggcgctttttacatggcacacatgcgcacgcgtgccctgcgacgacgctacacgggccgtgtaacacggcacccacgcacgcacgcacgcagcaggccagggcacggcctcgtcgggcccgggcgtcagctagcggttgggtgggctgaaatccagcgcgtccacgcatatggatttcatatgggcttcggtgttagcgggttggttttccccccggaggccgtgaagtgtgttgactgacttgaacttgagaggggaaaatgtacaccgaaggtccctcaacttgtcattgggataaaaaacgtcctcaaaccgcaaaaccatatacgcgaggccccttaactatacaaaaccgatcacccgatgtccttaggtggtttcgaccccggttttgtcctacgtgactgctgagtcagtgcgggactcacgtgggccccacctgtcagcctgtccaggtcagccactctctcttctctcccatttctctctctctctctctcacttctctcctcttgggcaagccagggcaggtggggaggaggtcgccggggcgcagcggcgggagcacaaggcgacgcggcggcgggctgaggcggctcgtcggcggcggcagaggaggaggaggcaacaatggggaagacgaaggggaagcagcgacaggataagttctaccacctcgccaagaagcagagctaccagagtcgcgcggccttcaagctgctccagctcgacgcgtggttccgcttcctgccgacggcgcgcacggtgctcgacctctgcgcggcgcccgggggatgggtccaggtggccgtcaaccacgtgcctgtgggggccttcgtcgtcggcgtcgacctcgtccccatccgcggcgcgcactctctgacggaggacatcaccaccaccaagtgtcgcgccgcagtgcggaggctcatggactccaacggcgtcgtcgtgttcgacgtcgtgctccacgacgggtcacccaacgttggtggcgcgtgggtgcaggaggccaccgtgcaatcgtcgctcatccacaacagcctaccgccgtgtcgcctcgtgctcccgccgtcgcatcggtgcagcccacctccgcagcgctagggggctgccacctccacgtcgctagcctctgccaccaccacgtactgttcgccgcgcgctcgccaagcctgccgccaccgccgctcccatccgctagagggagagatgaacagagaaagagaaaggggaaagagatagggtgaggtggacacccgacatgtggggcctatgtggctcccatgctgactcagccgccacgtagaccaaaaccgggtcaaaaccaccgaaggacctcgggtgaccggttttgtatagtcaagggacctcgtatgtctggtattgtagttcgaggatgttttttatcccgatgacaagttaagggaccttcggcgtactttttccaacttgagggcctctgttactacaagtggagcagttgatttggagtagttttgactgaatattactccctccatctacttttgatagtcatatttcatcttgacatacataccaagaataagtgattctacttatcatctatttaaatatgctactagtcatttctcgtaaacaagcgattaattaatatttacatttctcaatgcccatgtagccaatcttgtataaaagaatggagagacgtgcattaaatctaagaaagtcattaagatgataagttgttggattgaaatatgcttatcaaaaataaattttttagatctagaaatataactatcaaaagtagatggagggagtagtaaataaaagtccttagttgaactgaaatttcaatccggatacatgtaaaaaaatcaaaaaatgtttaataggcctataattaccagattattgagcggattttttttttcagattatatacatgatataaacaaaccttaaaagtaactcgaaacaaatggtctaagcaaatataataataagaaaaattgagaaaaaatatttttattgtgtgaagcaaataatccattacaacggtacgatagataatctgaaaataaccggatcactggtttctcctgtgtgccctctgcatgcagagtcaaattgaattgttctcgttgagtatttaaattaattaatttagttagtatccaggcgagccaattaagctaagctatcagcaaaaaattaattaaacgagacacacacatgatgagtccatgcatgacgcacaagctaccttagccgctgcgtactagctccctcctactaatcgtcaacatttctagaacaaaataaaccccggacgcaatcctgaattgacacgactcatgaagactcccagcctctcacgtgtgacgatcagagaatgatacataagggcataaggcgatgcgacacatctaggccaaccagctctggctaagcacaaagctgattcccggccgtttcaacgacgaagtttacaggctgaccgcgaaaatccgtctgaattcaccgaattgcagtggaaatttccacggcgggttcacgggaaggcggaagactactgtgcgtgttttaattctggattctggaagcccctgttctggatatattgtagcagtaccgtgtatccgtgtctccatgactcgattttacattggtacatgaattgatttggctagccgatcacttgatttgtgcgacatgtctcttttaggtttgagaaagtgaagcgtctattcaggtgcattcagttgtttgtatactattactatcggcaaaaaaaaaatacccctacatatcatatcagatatatatttaaagtattaaatttagtctaataataaaataaattacagattccgccaggaaactacaagacggatttattaagcataattaatccatcattagcaaatatttattgtagcaccacattgttaaattatggcgtaattaggcttaaaagattcgtctcgcaatttcctgacgaactatataattggtttttttatctaaatttaataatccattcatatatccaaatattcgatgtgatagcgtgaaaaattttgtttaggaattaaacaggccctaatactagtgtatgtgtcatgtatatgataggaagatgttctgactgctctgctattatagctttaagatgcaatagtctatcttagggcggtttacattgcacccaaaataaatcttaccaaattataacaatgccaaaattttggtaaggttgtaatattaccaaaatttttaccaaattatgacaatgccaaaattttggtaatattattttggtaagtttataatattatcaaaattttggcaggatttcttatgtatttatcaaagtttgacaataaatatagacactttttagcaactttgataaaaaatgatatggttgaaaatgacatcaatctgaatagcctcttattgaaaaggtagtcttgcaacgttgatatcacagggatactgttcttgttgggaatttttcaaacatttaccagtgtaaacgcctccataaagaggcatttctcgacgtttctatctcgatcagcaagaacaaagcaaaagcaaaaaaaaaaaaaaaagtcgattcgagaatagaccacggaaagaacgaacagttggggaaaaaagaaaccgtggtcttttgtatctcagcttttgcagagcctggacgcacaggagcgagctagctacgcagccgccctctgggagcagcaggtacaatatcatactattatctaacaataaatatagtttaatgagataaaagatacgagagaaaagcagcggcctacagcagcacagattccaagacgcagtatgtttatgacatgtgggatcatatactaatagtgtagtaagcaactattgtatgaattagctattagattggctataggtgaattggagttagtagtgggctatactattgaacttgctctgagattaattaacacccagtgatgacgagtgatgcttgctttatctaccggccgctgtcgctaagggcacccgcaatagttatctataggctctctataagatatccatgtcagcatattttactacttgaaagagattaaatgaagagagagagtaaagctatctactaacccgtagatagtctatagagaaaagcgaggcaatggatgagagagttatagatacccatgtagacatactattaatgtggtttactattaatctagtctattgctgagatgtatatgttttatagagaacatcttactttaccattgcgggtgctcttaagtgcgctgtcaccaacttcacctggccttttctagatcgagttgtacaggccaggccagtttcgatcgctgtatatgccccagtctcgtcgatttcctgtcactgtttccccgaccaaattaacgaccggtttagtcccttcttttattctttcccggcggcttgagaaaaccgtgaataatctagctagggtgcatgcatgcatgcgctaaattacctcgctgaggtgtggctatgcgtgagcctcttattgtcagttctagtacctccggtttagtcagagcaaagtaatctaaactgattgattagctgggagatgatgccacttaacatatattcctccatcgtgctgacttctgaccgatcggctgagttgcctgtcgttgcaagttaactagcattcttgcataacaaggaagtaaaattaactcgcgtttcatcttatcagctccatccttagctccatataagatgggcaaaattattcttgttctttttttctaaaatagtatattaattggcagattacgttccggaagctctggcaggggctgggcagtggcggccacaaggtcagcgctaagcttcgccacctcagcaccagtttatttggcgctgaccttgaaacaccttctccgcgagagcctaagtccacgatcttagcgccaaatcacctagcgcttaggccgagcatgtcagtgccagtacggtcattatcgaaccttgccacgcgtgccgatggttggagacgactgtcaaggcctcggcggtcggcgctaaggtgttcaatcttagcgccatcgggtgtggcactgagcacaggtccattttataagatagtttttagtaagaaactaatttgaaataagttttgaaaaaggacaaaaaaaaatgtgaaattttcgccgatatcgatggcccctcctagaaacatgtgtcaaatgtcaatatatccactgtacaacttccgttatatacccgtcaatccccgaccacaggcacacccgccagtttgcgggtcagaatatattcggaaatgtcccggcctggcggcgcggaacgaccagacaggtcacaggtcagaattgagaagccacggcgcgggccgcgggaccaaaggaacgtgatgtgatccggtgaactccgcgaaccgcgatgatgatggtgcacgatgatatgttgtgccatctcactcagcagctttcgtagccgccgcccgcccggctgcgcgcgcgtgcgtgcgtgcgcggttgctgcgacaccgcaggaggggaggaggaaagctaagcgatcgagagaaaaaccacgggcgcgggcgcagtgtggtgtggtgcggagcgcgcggtttgattgaatcgtccgtgctctctctcgccggagtacgtctaccgctgctcgatcgaccacctggctagcgttggatgtaggcggcaccggcaaaatcatccgtgcagccgtgctccgcaagacgggccggggtgggggtaagctgaggcttccaggagttcaagttgttcaaagtcgtaacgggaactaaagtggggaggcgaatatgcctttcctactgcctacactacacaagccatgcatgccacggtctctcgtcattttttttttctctctctaaggaaaagataaacactttgacaaaaccaaaaccgctgagtgtagccggagaaaatggaactgattccgaggaaacttctatagatcactgccttctaaacgaagccgtgtaaacttcaatctaattattcggacgacaatgacatccacaccgtttgctcttcagcttaattatcgcagccagtatttaaattttatatcctaattttaaaattgattttgatggtttttttattctatctattttatttttcgccaagaacacaatataaaaaatacacataaattattatctaatcgcgaatgagggttacggaatcagttgtagacaaaacgataggaccgaaaataatcttattaagagggtattatcctgatgtatacttgtagacgcatgaaacaaccatgaaaatgtccaattcagtcattcagaaaacaagcgaattagtacgagctaaccatgttcaacggcgagagaaaacatcaagtaaacaaaacaaaatgagaaacaaactacaccccgaaactgagctttcagcagcaacgtacacacacatcactgctgatgaatcaacccaacctcgtccgatcatttacattgtgtacaacacaatacggaaacttttcaaaccttccaaacctcagaaccctctagactctccccccctccaaaccttcttaaaacccctcattcccatcacctcagcacgtacgaacgagagtgatcgatcgctagctcgccgagatcaccagcctcctcgtcttcttcttcttcttcctctcgatctcgaggagggtgccatgggtaccatggttggccatgtcgcgccgggcgccggcttcatcctcatcggcatgtggcagctgttcaaccacatccggctgttcgcgctgcggccgagctcgtacgcggcgccggtgtggttcccggtgcgcggggtgcgccacctggagctcatactggtgatcgtcggcgcggctatctccatcctgatggagctcgtgatcgggccggcgaggcaccagccgttcgacgacgacgggaccatcccctccaaccacctccacaacttcgagcacgcgtccatctcgctcgcgctgctggtctacgccgcggtgactatccacatggacagggccagggcgcccatgcgcgacgccgtgtcgcagctggtcgccgccgcggcgttcgcgcagcagctgctcatcttccacctccactccgcggaccacatgggcgtggaggggcagttccactggctgctgcagacggtgatcgccgtcacgctcgccaccacggtgctcgggatcccctgccccaggagcttcgccgtcagcctcgtccggtcggcgagcctcgtgttccagggcgtctggttcgtcgtcatgggcgtcatgctctggaccccggcgctcatccccaagggctgcttcctcaacctcgaggaaggccacgacgtcgtccggtgccgcaccgatgaggcgctccaccgcgccaagtcgctcgtcaacctccagttcagctggtacctcaccgccaccgtggtgttcgtcgtcgtgttctacctccacctgacgaagctgtacccggaggagccgaggtacttgccgctggtcaagggcggcggcggcggcggcgacggtgacagcgacggcggcaggttcagcatcggagacgacgaggacgacctcgaggccgcgaaaggtggcttcggacacgtggcgggtggcgggaacgccgttgaaatcgagcggtaatttactccgcgattccgtgtcagaggaagaaacaaatgtcaggatggctatgtgattagattgaaaaacgagggcctatgtgtaaataatagtatttctttttaaaaaatatttttagtagtactatagggaattagtgatttgtgtgtgagtgaacaagctgatcgacccataaatttgggtaaatctcatgcttggatcgcttcaatttgtttagtcaagagtgtctgatatcacaagggttaaattgatccatggatgtcgcatttggttggttatgtctgtactctagccatatgagtggagattttgcacacaacggaaaaccttttcatcctctgaatctcttctgttccgtgcaaagacgatgaaccaatatgccttcagagttcagagacgtgccaagccaatcaagactgcatttcaggtcattttctgaatgggaccgcgactgctgtgttgcagtcaattcagatagcttgaccagcttgccttcttccaaacatttttgtaaaaaaagatggattggttcgaaatacttaattaattatcaggtgattacgggagatcgatcgcctgctaagcgtaagcaaatgaatggaccaagccaacagcaggattggcatgtactaaacagggcgtatcatctgctaatgtcagccatatcttagggggggggggggggggggcgaagatgtcagacaattctgataatctgcagaggagaagaacatacttgtctctcgttttgatgttgacggtaattaaatttggtacgacaggacggcagcaaaaggcttgcacgttggtttttgctgggatctagtagagctgttgtgctcaaagaagtttctgcgtgtctttgtttcaactcatatgatggattatggctagtagctcattcactttcaggaaattctcatggaaatgaaacccgatttcaagcattaccctttctaaacatttaaagccctgtttttcgccaggccggtgggaggacgctagccaaatttattatgattcgaaggagaacgttcactaaaaaaaaattcagccagcaaggatttgtttctgcatgcgggcagtatgaaaatccgtttgtataaatgacgagaggttttgtggtctaaaatcacatgttaaaataaccatattttcacgggacaaccgcttctaaaaatcaatttttacatataattgtgaaattgcatgtaaaaattaacaattttcacgtaccttttgatagaggtggttgcccaaaacatatttataaatcgatgttaggtagcctcatgttaaaaccgcttcgtagtagtgattgcagtaacgaacaacaaggttgttgagctgaggagtgtggatgtaccctcatttccttttcttttttttacaaggagacgtaccctcatttcaaatattctactatgtccttttcgaatcatttggttttacaatttatgcaagtgaatataatggtgaaatccatcttcttagcctcaaaacgcaaatcgagaacggggcacaacgcccttgcccacaacaattggattagggacatcgatctgctgcgcatcactggagcggaccacccgcgccaatacatccatctttggacgttgatccatctggtcagcccgctttccgatcagagggactccaacatttggaaactgatggctaatggattctactttactagttcggcgtacagactataattcgttggtgcggctagaacaatctacaactagaccatttggaaatgttgggctccacctaaatgcaaaatcttctcctagatcatcattcaaaacagagtttggacgacggatagactacaaaagtgagggtgggccaatcaacgcctctgtccactatgttgtgccgtgccggagtcggcgctacttctacttgcaggacagggatagatctccagctgcaagagtggggggattgtgaaacgatcgaagtctggtggtacaaaatatggcgcacggcgaatcgctcaagaaaagccctaaaatcaattatcatcctgattgcctgggaaccatggggtgagtgaaatgctagaattttcagacaagtagcttccacgcccgccaccatcatcaccaagatcaaggaggaggcgcgaacttagatcacagcgggagcggaaaaactaactgagattataccggcgggagagtagacatttttgtttgcaatgggcacaatgttctcgggccctgtaaataactttttttactccttctctattaatatagaggtggcaaagcttttgtccttccttaagaaaaatacgggtgaaatttgtactgtactatctccattcaatgattcaatcataatagatttgggccgacgatcagcctggcgaacaaatctactggtgaaatttaatcgtgacggtcaatgaccataagagaattggaaatgtaggtacgtgtacatttcagttagatttctctcatatttggaactcataattaaaaaaaaaacaattctagggatgaatcaaattgagttcattcactcgttccaaaacaggcccatatcacacgttatgggctcccaatttcttcagttgcccaactgtactccatacagacttcaatgtgatcgtgcttacagacttcaatgtgatcgtgcttacgagaaatgccaggtacagtccgccgacgagtcaattgacagcaaccaattgaagcgtgcacgtttcagcgatcaaatcaaaggagagaacgttgcgattgtccatgtccatgccgttcgtacgttaatcgttataggcgattgtgccccaattctgggacaggaattaattttgatcagtctgaattttggcggggtgccatcatcagtccacaccatctgcaggcactgtagtgtagtctgtagctcatttagtcaagtctatactgcattgtaatacagtatggtgcagcactgcaacatatgttgatctggaggcagacgctacatttaagatatttgtcacatgccttgcttggctgcactttgcactgcaaacgaatcgcagtggcagtgtctgatatttgtacagttcattcaaggagagattaaaattgttctggcccaggttcacgaataaaatagggatagacgaggaaatattctttcctccgcctattttggaggtgaggtgaagttaaaatctgttaatgatgggctcttaccgtcaagcgtcactgtatcagtaaaaatgttgcaggatcaatatatttagatgacttcaggggtcactaacgccagcttatagaagtagttggagtgatcccgacatctataagaatactcttaccgggtaccgtagctatatcaagtttcttctttatcgttcgtgtaccactcgtttttctaatgcaagctcaaacactacttgtccaatcacatatttcgtctaggacatctcgatcgatttcccctcagtaacatgctggaaaacccgagaagtattgatctttagtgaaaacatgattgttgaaagctcgaagctgtgtcgtggctgaatagaagatgcggcgcctgatccctgctataatagaagtcctgaaatagagggttgatcgatctggcgaagtaattcgaggggacaaaatgaattacaatgatacatatacagccacatatacacatgttgttacttttgtataattaaatgccattttaggggtgattgactttgtgccggagtctcggtgcctgtttggataactacatcggatgttacggcactaattagaagtattaaacacatattaataacaaaactcattccataactctagactaattcgtgagactaatctattaagtctaatcaatccatgattagctcatgtgatcttacaataaatatgtgctaattatgtattaattaggcttagaaaatttgtcaaacgaattagcactcatttatgcaagtagttttgtaagtggtctatatttaatactttaaattagtattcaaatatccaatgtgataagtactaaagttagtccgtggatccaaatactccctcatagtccaatcagtataagctagtataaaggagttaaagagatggatcaaggaagcccactgaaacgagc

SEQ ID NO: 7496 - DNA, 39492 bp, Oryza sativa
  unsure (1)..(39492): unsure at all n locations
tttctaaggatgctaacgggaagaatgaggttcatccagaacctgttaagtatggaagaattgtctctttcggtaaagatgtagcagaggctccatcttcagaaattgagcagatagaatttcgtgtgagtatccaaaagtatattagcattttctttacttactgaccatcatttttttgcttatcactattttgctagatgtgtagtattttctcgtgctacttatcaatgcatctggcagtttgctctagctctttcagcagtcttgtatgcgatatgtactattcatttatgtaacttcccccctcatttagtgataattgcttttatcattatggttggtactcttttcccgtgtagctggtgcagctatttcacatctatttgcaggtaaaattaactaatatcagggccactcttttgcctacatattatttgaaaacgagtccaaagaaaattgttcccgtcattctgtatttgagctgcactgcatgcctgcacatgtgttaggattttctagcttttacttgtttatgtaattatgtgcctttgttctcttggttttatgcacttatgcagccccattttgattgtttcaattcaccgttcaataattttaggttcaattatgctacataatgctctatgtagaatggtttcttttctttaatatgttatgtatggtttggacattaattttctgaggatggggttgtaagcgtttatgattatagcaaaaccttaacgctatgcttgtttcagatgctgtcaaaggcaataatattgcccactcaaatacatcatgccgggatatatggacagagtatcatgaattaggatggggcggaataaagcagttgcagactaaggtttcctgctgctggctccataatagatctttcttcgttttgttgctccaaggatgatgcagcgtggaagtgttcacttttcgtatgggattgctgacaacttggatgatccaaagtacggccactacaaatactggtcaaatcccttggaaacaaagtaagagtcttttgccaacattctcatctcattctagtatgttctgtttcttgtgaaacatgtgatttaggtttatgtggaacatgtagttttggaatgtaaagtatataattttctggcctctgcaccaagtgagatgcacacatccattacaccaccaagctaaatgacaaacgtgtttattgtgaatcaagtacatttttttctatctgatattctgttcaacttttttcatacgccttataatcctttcatttgcagattaccaaatgcacctgaaatggaaatattttcaacgtatggagttggcattccgacggaaagagcatatgtctataaattagccccacaagcagagtgctatataccttttcagatagacgcttcagctgagggtggggatgagaataagctgtttgaaaggcggggtttacctgtttaatggtgatgagaccggaccagtttttagtgcaggatatatgtgggcaaaaggctggggaggaaaaacagcttcaacccttctggcagcaagacctacgtcagagaatcagccattttccaccctcaaatctcctcgaaggcaagggcacccagagtgggcgcacgttgatatcatggggaattttgctttaatcgaggatattatcaggattgctgctggggcaactggtgaagagcttggcggtgaccaggtttattccgatatattcaaatggtctgataagattaaattgaaactataaaactttaaaaaagcatggtagttttgtaggagaattatttgtttcctggccaaaattttatgagttttgattcgatattgtaatatgattttttttacctttcccttaagctcttaattcagtagaggctgacttgatttgtattattttgtgatttgagcggcattgtatattaaaatgtacagatgtattcatgggaattgtgttacgatttgaagttgagtactccccacattacaaaatatcaggcatatttgctctttacacggtattaagtactatgttaaccactccttccgttctaaaatgttgtaacctaagtaaagataaaattagattcattcagtacaatgaatgttcaaattcattgtaatagggtgcgttatattaggttgtaacattttgagacggaggaagtaacctttttttactatcaactactcactctcaaaatagtatattttgtctcttaatatagcaaccttagtataggacatgacactattataaatttggataagcctcttatttagatttatagtattacaatgtttcatgtctcgtattggattgttatattatgggacaggagagtaacatatggtggcgcgcacacctttaaaatacaaattgagcggcaattctagaatacagatggagacatctaataaggggctaaactgtactcgctggctcatggcactggcgtgccggtgcaccgcacaaacatcgagcaagttaacacctaagattaacaaatgaacaatgtcagagtcaaatatgcgagggagtgagcttagttatgaagatgagacaacaatggatgctagcttcagccttcatgtgtagaattagggataaaaatggttgaacacaaaatcatttatttaaaaaaaatacaggcatttgggaattttcatatttaaagaaatccactttacttgactggactattccattggattaactctaaaatatttttttcttatttcatccctaaactaaaaatggttcgttttactacttaacaacatttgtcttctttatttttctctatacgaatcgtattataagtagaatttttttaagccataaatgacatcattatcaaatttcaaaacatttttaaattagtgcttccaacctatataagcactgatattttttcaaataaaatgttaagaggtaggttataatggatctaccaatcaaaaaaaatcagtgcaaatacaaattatatggagagataaaaaaataagcaatattgctagggaataaggtgaaccactttaaatagctcggctgctcgggggtgcaaaatgagcccaaaaaaaattagagtgttatgtgctctgcccaactaattcaagggagtaaaatgaactttatttatatgaaaaaatttgctgcaagacacccaaagtttatgctatttactgaaggatacagcaagaacacacttttgttagagagctccgcaaaaaagtggtatttggatgttggacacccgtaatattgttttattatatctagaagaaatggagagagaaacatccgcgaaagtacggatataccctctctccatctgttaacgatcacagttaattcacatctctacataatccacaccacagttaatccacatctgaatctatatcacggttaatccacagccattcatcagtcgagttgaaagcagttggcccatagagaaacttgtctttaatgaatatttctttatccatttcttttggatataataaataataccgtaggtgtttcataagccaattaccatttttttaaggtgcccttcaatagaaatgtattttccggtgtcctctagcaaagagcgtaaactttgggtgtcctatcaccaaatttacctttttatatttataattaaccaattcaactattcagtgtatactataatatggtgctaaaggcatagcaaaaggtcaaacttaatgttcggtcaaaatggcaccattatatagaactaatatttatttggtcacgaatttccagaaatgtttccataagtagatctgatggtttgatagtaggctgatggcaaatgtactcgatataggactaggaataaggtctgggggtgtgagagtctgaccctcacaacatacggacttatcttccaaaatatagcaacctggtatggtgctaggttgcaatattttgtggcggagggaataacaaataaacatcatcatatgaaaatattttcaaacactaaataatgttagtacatacatgacaccaaacacatatttttaagtttaataatcagttgaagttttcaaatgttaactttgtggaaggcaaggagaccttacattttaaaacagatggagtttctttttaagaaattagatgcgtggaaaacaattttgtaagaaattggcgatggaatttaaattcgtataattattgtaatgttggtaacaggtttcacataaatttgtagtataaatgtatgtaatagatagatattcataatgaatatgtggttccgattacaataaattaagtagataagtacatagaatgcccatttatgagtactttgctatgcatgctttattataactaggtaaatacatacatagcctatgcatgagttttttttccatacatgtttagccgccgtcaatgttttccttgttaccctccatctcttcatcatcgtctttctcatcagctcaaaggctttagtaaacccttgaattttctttgccaaggtttcaaatttttgtggaacacattgtggcaaatttccacccagggacaagggagcaatggtaggaaggggactggagggaaggaggccaaggggaggaatggaaagggaggtgaagggaggagtggatgggcttggaggggaggagcgccatggccgccatggatggagctctcacaggccccgtgcgtttgggagtttaggtggaggtggtggtccaaaaattttatgagttttgaatcgatattgttgtgtacttttttcacttcccctcatctcttaattcagtagaagttgacgtgatttgtattattttacaacttgagcgcactacaacaacaccctcatgtagaggcacttttgtagaggtgttttgtaaatttcctctaaaattaggagctttatagtgtatagacactttttagaggcattttaaaaattgcctaaaaaacttttactctagagacactttaaagacattttcaacatattttattaaattttatcttgtagatgcattctttcggtattttctgaatgtgcctggtttgcaaaggcattttcttgaggcattatttactctataaagacttgttagaatgcaatgtattactaattaagggactaaatataagtaacacaagtcacaaacctacaaggaatcgcatgtggttgagttgattagtgcattgaagatacaaatgatttgcccaatagatcttaagttcaaggattggcaatatcaagggaaaatattttattatatttttttcccgtttcatatgttcgtggtacaatttaatgtctctaggaaatacctctactgtcttcattgggggtaaattaaaagtgactgcgctcctcccacagcgatttagccaatttcagggcagcgtattcgactccgccgctatccacgtcgcccgcgctccctcccgcacgcgatgtggggtctgctgtgggcccgcgtgcgcgcttcccgcgcgttgcctccgcgttttcccgcgatcgtgcgctcttcttgtggctgcttgcgtgggctgcccagcgagcaaggcgcgctggcgttcatctgattttcacgctcacagagcaagcaagcgaggcccaatcaacgacgacgctgtggcagacaagtcatatcacctctcgcttgttttatacaatgtcttttgtttgtagagaaaattcatttggaaagtgcctctatagtgtccaagacacttattagatattttttttcatttggaaagtgcctctatagtgtccaagacactttttttttactgtaatgtccaagacacttattaggcatttttgaaaatgcctctacagacatttgaaaagtgtctatactattagaaaaatgtttgtacaaaacattttcttagtgacggcagtatatattaaaatggacttgaaattggcattgtcgcataaatcatgtaatgttaaataaaggatatcatgtttctaactataatctaaaatcatagcacaattgcatataatagattcctgtagtattcaaatgaacagatatggtggttctaattacaaataagcaataagaaatagatagcccatgataagtatttccccaacacgcttaggattacaaattaagtagatagatagctcctccacgatttcccttgcgtgtttagttctcatcactgttctcatcatcgttatcctccatcacctcatcgttgtcttcgtcgtcttcaatgtcgatgccatcgtccgcttccggtaggctatgcacaatctcgtctatgccttgcaattgctccagcatacttgacattattttttttggtaaaattgttccttttccttgcggagcttgaaagctttagtaactccctgaactttgccaagattccactcagtgatccgtttcttcaaattgttgttgaacttgttctccaatctagcgatctgaagacataagcaaaaatgttataagcttttgaactagcatgtggttcgaaccttacaagaaatgcaattgtatataaattgaaaaatatgtagaattcaaatgcatatgcatcatataacctatctatatggccatatattcaagtcattagccttgcagaggttttgcagagcagttgtgccaacactcagaccaatatgagcagcacttttttgttttatgtgaaagtaggattccaagtccttcttcgtcaatgtcttaactcgtttgcgctgttaaactaaaacatgttagcacaagaaaaaaaactgaaggaaaccatgcatgatctgtactatattttccctggctaacacagtagacctgatcagggaaagtaaacatcttcctcttgtcagtagctgctgtttggtcagtttgcacaagagaagtggctcatttaccaaggaagaattactttccactgtaggagctttgccatgttgatttttcttgggagcaggtggtaaaatggccaaagatctaggcacatctcccccaggatgtcctttgggcacaccatatatgactactcacaaatgaaagtatcattgcatgtatacatgtgattagtttgataaacaaatgttaatatccatagaaaatataaacgaaaatacccatataattttatggagaaagagagaaagagagatcgatcaattaatcgataccattttggccggagtcatagaagactcctcgccattggaagttctcctttaatagaatgaccagcttaacatatctctttattaattggaaatgaatgggcagcaacatagaacccatcccaagaaccctcaaaccagtatttaccccgaagaacatggttccacaacgtatttagtagcggatccacttttccttatctattaatgagactatagctttcttttgcctatgagctagctaaagatccatcgttatcccttccaacaagggaggcggaatcaatggtcatgtcaggtttcatattcaaagagagatgtcaagcaagcgccgaatccgtgtactcaacttgcccgacccgcttcttccactagacctcgtctttcaaagagcagcagccctgcaagcctaatagaaccttgtttcctgggccaagtcagcctataagtaagtaagtagggctgaagactatctgtttgttagtttttcaatcttcttccttctatgcttagagtaagtggaaatgacatccttgatcagcaagtaagcaagcggtagtttagtctccgacaagtgaggccgaactagcccctagatcagttctcatagtgggggaatcagagtcaagttaggcacagaagagggggttgacatcattcgtcgtgattggatcaatcaaactactccacaagaaatgccaagggactccctttctcatcgcccatttcttcctcatctgttgctgccttgagtgcataaagtaggctcaacttctttggtttctaaagatcttgtagtagccgaaggcaaaccagtctgcttgttagattgaattgaattttatataacctatgcagctaaagaaaaaaaaatcataatggtctaagtggacctctcaaaggtataaataattaactaaataagtatacattagtcttactagttcggtctttttctttttctttttgttatgatgcccacatttcatacttctcaattcttatttagtaggtatacatgtgattagtttgatagataaacgttaataaccatagataatataaaggaaaatacccatatgattttatggagaaagagatatcgatcgattaattgataccattctggtcggagtcgtagaggactcctgttgtatccattcggaacgaagtgtaccagtcattaagcatttcagcttgcaactctggggtttctcctgacacactgcatgcattgatgcatgcgtacgtgcatatgttcagaagagggaggaacatgagttagctatcgatctcagctgaacatttgtttgtaaaaatgagtgctgagagggaagttggtgtacgtacttgatgcggtaggttgattgcacggaagcctcggcatcgggcgagttgttctgcaccaggatgtgatccaactttcccgtcctcgccggcgtgcaggacgacgaccatcttccggtgatctggccatcaacagcgaccaaggattaatcaagaaacatggcgagcgagagatggattaccacttcgcacatctacgtacgttaacatggatcagttagaagcaaaaggtaaagcaagaccaggaccaggaccagggttttcaatttcgaaattggattttatgcgcggggggggggggggggggatttcggaaaattctagcaaatttatttgaaaatttgactgaatttgaataaaatttgaccaaattcacaagaaaatgcaaaaaaggggaaattttgggcgaggtttgagtatgctggggggggggattttcggaattttcgaaccaaaatttcaaaccctgccaaggatcgattcaaaaagaatggcgagcagagatgtatatatcactttgcacgtacaccatgacatggattagaagcaaaaggtaagtaagaacaagatcccaaggatcgattcaagaaacacggcgagggagagagatcgatttcatcgcgtatagctatagggatcgatgacgtcgaacgtaccgttgacatggatcagcacgcgtagctgcctgcatctcttcctcaggcactcgatggatcccaggggcaccatcgggagcttccggatccggcgccaccgccggcggtaacaccatcgctcgggacgttcgatgatgtactacaatgatgcgccagttgccatcgatctcgcaacgtggtgaggggagagaacgaacaaagggaaatgatctaagagagcgcgaacggactgtgcttatgtgtgtggcggcggctgtggaggaattggggaggatagagacaccgacgggcttaaataggtggggattaagtgggtggcagcgccgtgtgagcgcgtccgctcaggcagccttccgctcgctctgcacgtgtgttggcgcgttgcgggttttcccaaattttcatcgagcacgcgacgacacacgttcgaacgattagtgcattgaagacacaagtaatgacatgaggttgagttgattagtgcattgaagacacatatgatttgcccaagagatcttgagttcaaggattggcaataccaagggaaaatattttattctatttttcacattggtttcatatgtttgtggtataatttaatgtctctagaaaaatatctctaccgtcttatagatatttgataaaatgtatctttgtttgtagagacaattcatttgaaaagtgtctctatagtgtccaagacacttattagccatttttttcatttggaagtgcctctatagtgtccaagacacttattaggtatttttgaaaatgcctctacagacatttgaaaagtgtctctatactattagaaaaatgtctctaaaaaaatagtggtggcaatatatattaaaatggacttgaaattggcgttgtcgcataaatcatgtaatgttaaataaatgatatcatgtttctaactagaatctgaattcgtagcacaactgcatataatagattcttgtagtattggttctgattacaaataataaataagaaatagataaatattttcccaacattcttaggattacaaatttagtagtacatagatctccacaatttccctagcatgtttagtactagttctcatcactgttgtcatcatcgttatcctcgatcacatcatcattgtcttcatcgtcttcaatgtcgatgtcatcgtctgcttctggtaggctattcacaatctcgtctatactttgcaattgctccggcatacttgacattattttttggtaaaattcttccttttccttgcggagcttgaaagctttagtaacaccctgaaccgctttgccaagattccacccagtgatctgtttcttcaaattgttgttgaacttgttgtccaaactagcgatctgaagacatgaggaaaatgttaaaaacttttgaactaccatgtggtttgaaccttacaagaaatgcaattgtatataaattgagaaatatgtagaattcacatgcatatgcatcatataacctgtctatatggccatctgggcaagtcattagccctgcagaggtttttgagtgcagttgtgccaatacttagaccaatatgagcagcacttttttgtgtgatgtggaagtaggattccaagtccttctttgtcattgtcttaactcgtttgcgctgttaaattaaaacatgttagcataagaaaagactaaaggaaaccatgatatgtacaatatttttccttgctaacacagtatacctgatcagggaaagtaaacttctttctcttgccaatagctgctggttggtcagtttgcacaaggagaagtggctcttctaccaaggaagaattactttccgttgcaggagctttgccatgttgatttttcttgggagcaggtggtaaaatggccagagatcttggcacatctcccccaggatgtcctctcggcacaccatatatgactacacacaaatgaaagcatcatcatatgttacatgcgattagtttgatagacaaacgttaatagccatagataatatttctaaagctggcagtttactgcaagcttattggtccctaattagttcccctctaattgtttgacacatatccctaaaccattggtgagtaaaaaaatctaaaaaagtccagccaactaataccattaggtgcaccatgttcacaataaatatcatttttttctcggtgatttttacttttgagagggccgtggtgatttctagatgaaacgtaatacgtgagtatacagtactacttgtaggttgcagatgtagttgatggagttcaccagcatggcccacagaaaagtagaaggcaacaaaaatatatggcctggtctaaaatataaacaatatagtgtgggttagaaatatatgagcactaatgatagatttgtgatttatattacctttggggtatttttctgcaagtgttaaaaatcatgtattatataattcaattcagtagacaattcaattatagttttacacaaacaaaggagccttaaacagtttggatgtggaaaatagtggaaaacagtttggatgtggaaactagtatattatgtcacgctttcgcgcgactatgacctatcacttaatttattaaatatattaaatgtatttacataccgtttacatatatagtaattagataaaaaatataataaaaattaacaatgtaaacatggaacatggctaaggaaagacggaaagtcaagaaaataaatttagcaggaagtatagttagaatgaaaattttattctctttattattacatgaaaaacacgtgtgagcacatatcactacactacacacccttaagataaacttaaagagatggtttcaattcaaaatgtactcgtatccgcatatgtgtagtattcatggtaccaagatttgaatcctggtagtaactagagtcatgcatcccaccgccacactaccggtgtttctttataaatatatttatttgatttttaaacaatattattatgacaaagaaaacatttaaggtaatttcatgcaaacttttcatttacattttaaagtaaaataaaaatcaattaaatttatatagttgctaaatatttgtcaagggaaagtgggggagggataaaatttgccatgcgcgcatgggaatcgaacccccaacgtcccattcacatgccatcctcgctaatcacatgtgccctcatgtgttttttataattatttgaaatttttgtataagttatttcattacaattgcactcaagttttggatggattttccatcaaaagttgtatagctggtcccttagttttattattatttttcatcgttttcatcactgccttcacaccatactctccactgcatgacccacttatcctccatttatattcctttggcgctcccattatataggacgtgcatgtacattttgcatgtaaaatttaagctgataattaagtttaccatcaccaaagaaataaaaggatgaattagggtcaatcaaattcagcttaggataactcattaaaataatttgtcatgtaggtgttcgtagttaattgccagatgcaaaactaattgcattaaatgaaaaaacaatcctaaactgtgcatatttgaggaatgcaccttgacccctttctacaataaaataattttaactgtttttaaatttattttttcatgtttatttacaataatacagatcaattacaatgtgcggcattgctgtgtgtaatatttgttatatcatactttaatttagcgctaaaatgtgtttttagttggaaaacgaatatttaggctgggactttcacaacaatggcctagtaaatatccaagaggatatgtggaagactcttgaagactcttgacttttcaccactcctttatagttttaccgggacttctctagatctaacgacaggtagtagccacgtactatatgttttgttgcatcctatgatccatatttttctgatgatgtggcctaacgaagttgcaatttaggtttcacttttcacgtatagagatacaaattatttcgggtttaattcaaaactagattctgcaaattgcgtggtgctaaattttaaaagaaatatatttgatatacaacacttcaattctatttacataaatacaattgtatttcctaaccaatagagttttaaaatatgattggatttcatatacaattgctagcctttgtttctatagctacaattttattttgtatctatgccattataatatagatccatcacgatctagggcgtcatcgtttggcatattcatatgcttatcagccaaaatttgaattttcaacgttaaatttggagctgattttggggttttttcatcgaagtttatttttcagcctttgcttttagatcgctaagaacatatatataaaagttttattcacaaattgattttcgtttgcaaatatgccatttggcatattcagaaaatatgccaaacgatgaggctgctaatggtgcaaatatttttatttcttagtgactaatgtgggaatttcttacatccaaaacaaacatgataactttttccgtgctatcttaataatataataatatgttgtaaaacaaattaacatgctccatttgaaacatgtctaatttttaattgtgccctacaaaatatttacggggctatgaagtgagcgcgccaacaatccaacatgcacatcaatttcctagtatgattttatggagaaagagagatataccattctggtcggagtcgtagaggactcctgtagtatccattcggaatgaagtgtaccagtcgttaagcatttcagcttgcgactctggggtttctcctgacacactgcagaagaggcaggcatatacatgagttagcgatcgatctcagctgaacatatatgtttgtgaaaatgagtgctgaaaggggaagttgatgtgtactcgatgcggtaggttgattgcacggaagcctcgccttcgggagagacgttctgcaccaggacgtgatccggcttcccgtcctcgccggcgtgcaggacgacgactgccttccggtgatctgctcaacagcgaccaaggtggattagcacttcgcacgtacaacgtacgttgatcgaacatggataagaagcaaaaggtaagcaagaccaggaacaaggatcgattcaacaaacatgcatggcgagcgagatggatttatctcacttcgcacgtacaccatgagaaggattagaagcaaaagggcaagccggaccaagatccaaaggatcgatcgattcaagaaacatggcgagggagatagatcgatttcgtcgcgtattggctatatagggatcgacgacgtcgatcgaacttaccgttgacatggatcagcacgcgtagctgcctgcatctcttcctcaggcactcgatggatcccacgggaaccatcgggagcttgccggatccggcgccgccgccggcggcagcaccaccgctcgggacgttggacgacgacgacgatccgccggttgccatcgtcgatctcagcgtggtgagggccggagagagaacgaacaaagctaggggaatgatcgatctgagagcgcggacggacgactggccttgtgtgtgtggtggctgtgtggaggaatttggggaggatagacacgccggccgaggggcttaaatagctggggggggggggggggggattaagcgggtgtgcgcggcggggtcgtgtgaacgcgtcccgctcaggcagccgtccgctcggcccgcaggtgtgtcggcgcgtccccaaatttttcatcgagcgcgcgaccggcacccgttcgaacgacgccgcaacaaaggctacgtacgtcgattgcccgttcgttgggccagaaaatacaccaggtgccatggacttgtcagcccaaaaagaattctcgactcttttgggtgctgcgaacagaaggccctgggttactaattggcccacgccgagacacacggtctgacatcgatcagtatcgatcagtatgcggcctaagggctaaggccatttccgatgggatttcattttgtagttttcaaaagtaccctataatctaataaagagatgtttaggttaatgaataatacaagtatcttcaatgcacaattttcgtttcatggtttcatatgctattaatagcaattaatgattgaatgatgttatgaatctaatttgatcacagtggggttccatttccgttgcaagggcatatgatgaaatgataatggcgacgaagcttggcaacaataacatctacagtttctctctagggacgtgggtgttgccagtgcaggttttggcgtttcaggggctttggctgatgtctaaagtgtgagcttggtgttgctttgctcgttttggcagtgcctccaataatgtcgtgattgccgtagagttggagctgctgggtcgctaggtggcaagctcggcaacgatgacacgtgccttgtgatgtcaacgttgtgtgccgcttcttcagcatcttgacgtcgatgttcgccgttggattccgccattttttctttttttttttagcttgtctagatatttactcccgcttaatgaaatataattggcagttctcctgccggtttagtttcaaaaaataatatgatggaatgattcagtctcagtgagttttattctttttttcaaggcataggcaagtgtgtaaactaagttttatcaaaactaaacttattccttctctcttaataaatttactgatatgctattagtttaccctatacaacatatcatttaatgagattgaaattcttattaaactcactgggaatggtctaaccagttatgccactgtcttccatagaccacaccctagtggacggggagaggagacctaaccatcaaaacggcacgcgctgtagatgaggaaaatatgtggttgaaaccgcacgtgcagtgaaaatcaacaaactattataaaataaaaactcgacgtatgatatttattcctatcatcatgtgtaaaatttttactcgtgattaaatttaaatataaaagttatttacaatgacgtatacaaatattagagtactggttttcaccaagtattttcatctgtacgagcgtccattgaggcacgtttgttctctcgacgcatgtgtactgtggtggcgccccggcgtacgtgaaagcgtcacgcgacccaccccaccggaccaccactccatctaggggtgaaaacggatcggattcggacggatagcagtcatgccatatcctataccatattttttaatcggattcagaggcggtgcggataatgtgcagatgcggatgcggagcggattatttcggatgtcggaaatggtgcagagtcggtgcggactcgggtcggaaacggatgaaaataatcggatgtgacatgtatatacaatcgatacaacatctgattatctgtacaatgagcaacaatgagataccaatatcacaattcacatgatcacatcataatataatgtcaagttgttaacgattgacttgtcttctgtccaaaagcatctaatcgacacatatagtattgacatcacgatggcaggaggcgtcgccggcaccgagacggagacaaccaggtgaccagcacaggaggtggcagcggtggcggcgacgcctccgcctctggggtggagacggtaggccgcggcgccggggtggagaaggaaggtggcggcggcggcggcggtggcgccgggctggagacggtagggcgcacgctgggtggagaagtcaggcggcggcgtaggaggactataagaagagaagtctcgatgaaaaaaattgacacgacgtcgacggagtcacggactgaactcctggatagattgatggataaggtggacctgaatgggctgaatctttgcacgatgaaaatgcacatgccaaatgggccaaattgagtggttatatgggttaaattgagtggttatatgggttatgaaattcggattatccgccaaaatgtttatcggataatccgcttaaaatagtggataatccgtatccgccagatattaccgataccatatccgcatccgcatccgcatctggccggatatctaaaaacccttaccatatcctcacttcggacggatttggagcggatcggatcggataatatccgcttcgttttcacccctagctccatccgcgcgctccgatccgcacacgcgctcgctcgctggcttccgcttaatttgggtgccccctccgcgtcgatctgcctctccagccgccggccgtacgtacgcctgcaaccgccgtgacgaacgaactgccgaccgagcgatcgatcgatgcgcgtgtctcgtcgcagttatagcggctgctgtcccatccaatcttgccgctggggagctcgccatttatttctcccgccttccgtgtgttcagtccaaagctagctaacgactgactgaggctgtgtttgtaaccccatgttcccgacctctcttcatcgttttccgtatacacgtttttcaaactactaaacgttgtgttttttttaaaaagtttctatataaaagttgcttaaaataatcaaattaatccattttttttaaaaaaatagctaatacttaattaatcacatgctaatggtccgttccgttttgcgtgattactgttacggatgggaacatgcatgcccgaacacaccctgaatgaacaaatcatccatggatttcacttgaaaactgtttcatttcatttcgatttttcggtacctagaatctatactcttaaaatcggtacctaagagccttttattttattttggatagcataatacctaccggatgacgtgttagaatatatctgattttggaacttcttttttgttaaacctttttaaaggaagctaggggtttatcccattacctcatggctttatttttagatactaaacttactggatttgtgtagtgtcttatgcaaagacgcggagatataaatcatttttattatcttaaaaaaaattcaattcttaggtggtgcatgcatgatatagttttggacgacataccacgagcagcagctagtcgtcgagcacgattagctagctatgcatcatccacatgcatcaatctaccgaaacgctagctacgaacgttttctgtcagtgtactgtacacctttttggcgcggtgcattttcagaggtttctgcatatgctggatcgtgtcttcttttctctgacgctcgcaaggttaccagaaaatgaggtgcgtgcgatcgattcaggtaggtgtaaccaacgcaatgcacaccgcgcggactacagcattgtccctttcgcgcgcggccatcctgtccagatcatatgctccagcctccagcacacagatcagccgtccctgtcgccgctagatcatcgatgattacctctactaccacttcgaatcttcctctacatctgcatgcaaaaatatatgcaataatcagtatctcacacatacaatgatacaaagtgaaatacagatattaatgagaggtaactatgttcatttatatatagtcctgggcattcgtatagctagctagagcaattaatgatcgagctgaaactttatcccaattcaagagggaatatccagctaagctagcaatgcatattcagcactgatcgaactaatcagtgctgcaactgtgttgctcaatcgttgcgctctctttaaaaattgcaggcacagctgcgttgccaaggcatgcatgggcacgatcggacatggaactgttctctgcccatatcgatcggtgctaaggccgagatcgatccggcctccatcttaaacaaggacacattcggtgatccctgtgtcgtacatttccctggcacgccgtactgtacagcttgatcaagattattccatctctgatagtctgatgagatgatgatcgtgatagaataattgggctaggcccaacttataatattaaatctcaaaggcccataataagtattgaggataataataccacctcaggatttaagcgaggaatatctcaacctaaatagggagttattggaggctccctgttgaccagttgaggtgggggtcggaatgccacacacgcgcgcgcgccgggccgagggcgtgggcgtggctggcggcgtgcgtcacgtcactatccttttgcagccactaacccacgttcccacgattccctccacaacagcgcgtccacgttctttctcctgatagataaggaggccgcgagtccgatccggtttcatcgcttctttcccggtgttagtttctccttctccgcgcctaagttgctctcgcttcctcgcttcttatctcttgcgcgcacgagagattggaaggagcagtgcctccgaaaccacaccttcgcctgagatctgcaccgggtaggcgggtgatcaggtttttggggagtgcctcccgcacgactgctcatcaccatgtctggagttgccgccgccgctgctggaggagatggcggaggtggtgcgccgccgacaggagccggagctggtgcgccaggaggtgccgtgaacgacaacaacaacggaggcaattctgcctcaccatccagcggagagccattctcggggtataatcttctcctcctgttcctgttgttagcgctatttctgttcccattgttagcgctatcgctatactatgtgcgctatgttcttgttcctgttcttcatgatgcctctagcatgttattgcgttactgttatgttcctgttcctgacattcatgatgcgcatagtatgctactggttatgttaagatcaccctacactgcttatgccatgattattgctttaacatttttggattaaaatatgccgattaattactatatttccaacattccaaaaacctgataggacattttcggtagttggctttgctgctgcactgaaaccacatgcttttgatggttcaaactataagagatggaaagcacgtgcactattgtggttgacagcgatgcagtgcttctatgtttcacggggcaaacgaagtgaaccacctctttctcctgaggaagaggctaagttcgaggcttcggattgcctgttccgtggagcattgatcagtgtactcgctgacaacatagtggacgtgtacatgcacatgccttctgggaaggacatgtgggatgcacttgaggccaagttcggagtttctgacgccggcagtgagttgtatgtcatggagcagttctatgactataaaatggtcgatgaccgttctgtagtagaacaagctcatgagattcagatgctggctaaggaacttgagaacaacaactgtgaattgccggacaagtttgtggcgggtggcattattgccaaactaccaccttcttggtcggactttgccacttctctaaagcacaagagacaagagttcagtgtttctgatctcattggctctttgggtgttgaggagaaggcgagggcaaaagacgtccggggcaaaaaggttgagggaggttctagtgccaatatggtacagaagaagaaccctcatgcatcccacaacaacaagaaagtcaagcttgatgtcaaacccaaggctgcaaccaattttaagaagaaaggcaagggaaaggcaaagggagactgctttgtgtgtggcaagtctgagcattgggccaaggactgtccagagcgcaaagacaggaagtctgccaacatggtcattagcgagggcggaggaacatcggggtatggtaaaatattacctacagttctctctgtttttcattcacctgattggtgggtggacactggtgctaatattcatgtatgtgctgacatttctctattttcttcttatcaggtcgggagaggttcctccttgttgatgggaaatgggtcgcttgcggctgttcatggtgttggtacggtcgatctgaagtttacttcgggaaagaccgtgcagctgaagaacgtgcagcatgtcccttcaataaagaagaatctagttagcggctctctattgtgtagagaaggttttagacttgtgtttgagtccaataaatgtgtcgtatctaaatatgggacttttgttggaaaaggttatgacagcggaggcttgttccgcttttctttgaatgacatgtgtaataatcataatgctgtgaaccatattagcgagaatgatgagtctaatgtgtggcattcacgactctgtcatatgaatttcggttgtatgacgcgcttagctaacatgagtttaattccaaaattcactttggtcaaaggttccaagtgccatacttgcgttcaatcgaaacaacctcgcaagcctcacaaggcatctgaggcgaggaatttggcacctctagaacttgttcattccgatttgtgcgaaatgaacggcgtgttgactaaagggggaaagaaatatttcatgacactgatagatgattgcactagattttgctatgtgtatctattgaaaacaaaggatgaggcattgcattactttaaaatctataaagctgaggtagaaaaccaacttgaaaggaaaatcaaacggttgaggtctgatagaggtggggagtatttttccaatgagtttgcatccttttgcaaagagtttggaattattcatgagaggacgcctccctattcaccccaatcaaatggggtggccgaaagaaagaaccgtactctaactgagatggtgaatgccatgttagacactgcggggctttccaaggaatggtggggtgaggcagttttgactgcgtgtcatgtcctgaataaaattccaatgaagtataaggaagtaacaccattcgaggaatgggaaaggaagaaattaaatctctcatacctacgaacatggggctgtttggccaaggtaaatatacctatagccaaaaagcggaaacttggaccaaatactgttgattgtgtgtcccttggttatgctatccacagtgtgggttatagattcttaatagtaaactctggagtacccgacatgcatgttggtacaattcttgagtccagagatgctacattctttgagaatgaatttcctatgaaacatacacctagcacttctagtaaagaaactgtcatgccccatgagcactttgcaccgatagaacacaatgatcaaacgcctgaggaaaatcctgaggaggacaacattgtagatactcgcaagagtaagagacaaagggttgcaaaatcctttggagatgactacattgtatacctcgtggatgacactccaagaaccatagaagaggcatattcatctcctgacgctgactactggaaggaagcagtacgcagtgaaatggactcgattatgtctaatggtacttgggaagtcgttgagcgtccatatgggtgcaagcccgtaggatgcaaatgggttttcaagaaaaagcttaggcctgatggtacaatcgaaaagtacaaggcaaggcttgtggccaagggttatacccaaaaggaaggcgaggacttcttcgacacatactcaccaattgctcgcttgaccacgattcgagtactacttgctctggcagcctctcatggtcttctcgtccatcagatggacgttaagacagctttcttaaacggagagctggaggaggagatctatatggatcaaccagacgggtatgtactagaatgtcaggagggaatggtgtgtaaactgttgaaatccttgtatggcctcaagcaagcacctaagcaatggcatgagaagtttgacaccacgcttacatctgcaggctttgttgtgaacgaagctgacaaatgtgtatactatcgctatggtgggggagaaggggtgatcttgtgcttatatgtcgatgacatattgatctttgggaccagccttaatgtgattgaggaggtcaaagactatctgtccaagagttttgaaatgaaggatttgggagaggctgatgttattcttaacatcaaactacaaagaggagatgagggtgggattacacttgtgcaatcccactatgtggacaaggttttgagtcgctttggatatagtgactgcaagccagctcctactccttatgatcccagcgtgctattaaggaaaacccgaagaatagcaagggatcaactgagatactctcaaatcattggttcattgatgtacttggctagcacaacgaggcctgacatctcatttgttgtaagcaagctgagccggtttgtctcaaatctgggagatgatcattggcaggctctagaaagagtaatgcgctatctaaagggcactatgagctatggaattcattataccgggtatccaaaagtactagaagggtatagtgactcaaactggatatctgatgctgatgagataaaagccacaagtggatatgtgttcacactttgaggtggcgctgtttcctggaagtcttgcaagcagaccatcttaacgaggtcaacaatggaagcagaacttacagcactagatactgcgacagttgaggccgagtggcttcgtgaactcctgatggatttgccggtggttgaaaaaccagtgccagctatcctaatgaactgtgataatcaaacagtgattattaaagtgaacagttcaaaggacaacatgaagtcatctagacacatcaagagaagactgaaatctgtcagaaagcagaaaaacttcggagtgatagcattggactatgtccaaacggctagaaatctggcagatcagtttaccaaggggctaccacataatgtgatagacagtgcatcgagggaaatgggcttgatacccacctaaggttgcataatagtggaaacctgtccattgtgatcggagatcccgtgaatttcgatggtgaaacaaactatcgtgtgactgaaagaagagacccttgaaaagggctcattttcatgatgtgcttctcttcttttctgcatggtaggatggcttatgccttaatgtgatccgagtggcttttccaagcagagatgttgacctgcagaacatctcagaaggaacacacctatatgagtttgactgctagtcacagtctatgaggtttgggcgatctcaagatactcatgaaagacctggagtttgacttatatgctccaaacagaagggatgcgaacggcagcccagtaccagtcaaggttctgagtgaaacttgatcacacaaaactgacaattcaaggcatagtccattgttcagttgtgggctaatgtagctatttcctaggtggaagttcaacttaacagtctccaccaaaaccctggtatatcaaacaggcacaacattgagaacatttcttatgagccttaaaatttggtggggattgttagaataattgagctaggcccaacttataatattaaatctcaaaggcccataataagtgttgaggataataatactacctcaggatttaagcgaggaatatctcaacctaaatagggagttattggaggctccctgttgaccagttgaggtgggggtcggaatgccacgcgcgcgcgcgcgcgccgggccaggccaaggctgagggcgtgggcgtgggcgtggcgaggcgtggctgactggctggcggcgtgcgtgcgtcacgtcgctatccttttgcagccactaacccacgttcccacgattccctccgcaacagcgtgtccacgttctttctcctgatagataaggaggccgcgagtccgatccggtttcatcgcttctttcccggtgttagtttctccttctccgcgcctaagttgctctcgcttcctcgcttctgatctcttgcgcgcacgagagattggaaggagcagtgcctccgaaaccacaccttcgcctgagatctgcaccgggtaggcgggtgatcaggttcttggggagtgcctcccgcacgactgctcatcgccatgtctggagttgccgccgccgctgctggaggagatggcggaggtggtgcgccgccgacaggagccggagctggtgcgccaggaggagccggagctggtgcgccaggaggtgccgtgaacgacaacaacaacggaggcaccatccagcggagggccattctcggggtataatcttctcctcctgttcctgttgttagcgctattcctgttcccattgttagcgctatcgctatactatgtgcgctatgttcttgttcctgttcttcatgatgcctctagcatgttattgcgttactgttatgttcctgttcctgacattcatgatgcgcataatatgctactggttatgttaagatcactctacactgcttatgccatgattattgctttaacattttggattaaaatatgccgattaattactatatttccaacggaacggtgtcagtggtgtttaggataaggtcgagatacatatatgtgcctgcagcttcggcgaaactgatttgcaagtattatatacatgcagatctatttatacttcgtatcactgacaaatttttgtagtactacctgctataatgtaagccatatgattagctagtgtggggtactactttagcatcaggccggcaatggactgatcgatgctaacgaaggcttagtgacaaagcatgccctgtcccagacaacctgctaacaagtacttgctgtactttaatttcaccactatttgtgtactctgtggttttccctgctaatagtcataaattcataatggcatttttttttattctgtcttcagatgacccaccatcatcatcaccatcctctcgatggtgatctgttgatcgattgtatatatacaaaatcctagtgcttcagatagaagctaagcacatctatgatctatccaaagaggcacacacatagttcaaaaagcccatgaaaagaatgcaagaaaagaggtgtacatggtcatggagaaggaatattggtcggtggagccttatctagctagtgatgcattagccaattggggatatcaccgcggttggtagcgagcatcctcatatacattaagcctagctaaccatgcacagaagtttggtgcttattaatttgtttgtttggtgaacaatgtattcgatttggcccagctaggttgacacatgtaggactatgttgtggcgacgtcctactatctcacttctcaccagagcaaactatccagttcagtggttgaggattttgaaatgatcgataaatcttttttcaacttgtgcagttgtgctatggactaaaatccccccttccttaaagcatgagagctatggcacgtggatattgtggtttgagaggataaatttccggttttagagtttggggtgctagctaggacgttggtttaaagcacgggtggatccgaggcctgacgaccaaggtttattagcgggtaacatcacagtaatagcttctatatttccaatgtttaattaactacataaatacttgtccatatgctctagaaaatttctgaacccgctctggttcaaacttttgtagggttttaatagaagcatttaaatttttgtaatttttatgtaccttttaagcgagttggaataaatgcttcttgtaggcagaggtaattcagaattgatagccaaaatgacctaacggtaagaacctttttggtcaacactaattgtgcatgaaaaccaattgggagtttccttcgctgcttctgaacaacaattgaacagggttgcaactggcaagacatttctgaagatcacaaaaacaaaatgcacagctttccaaccaatcttccaaggatttctgaactagtacaaagtacatagaaaaaaaaattagctaacacatggtcctttgcagtttgcaccaatttgctcactgtatgctacacttgcacgggatgacgggagtattatattcgttcagacattgttagtgcgttaccttttgccctccgatcatatgatacactgattttattgtactttgaatatattattatacacaaattttaattagtacaaacataatacaaccggatgagatgatacacaaggaatgcagatagataattcacattttttgcagaaattttatggtttttttgcaacttttttttcttttttggcttgaagttgccactgtttatgaactagcaagctgctctctgcgcaatataatggcgcggttggtcgcgaggctcgtcgtgccgtacaccggcagctcgtcgccgtcggcgccgcggaggctctccagctcgaagagatcggagctcgcgtcgctgccgtcctcgtcctcctccacatcggcgaggctccgcaccagctcctccaccctgcgccgcaccaccgacgtctcggcgccggggcagaagcgtacggacctccgctccgacgccttggtgttcgacgtcgtcgtcgccgccgccgacatgcacggtggctgcggaaccggcggcgatgccggcggcagagggacggccgttggagccttgggctttcttgggaggcgcgacgaggagaacagcgccttgacgacgcacgcgaacgtggccggcgacgggccggatgacgacggcggtggcggcggcactgtgcctcttggccgcagccttgctccagggaaacacggccggctcttcttcttcttcttcttcggtttgctgttcggtggcgcggcagcggcggcggcggcggcggcgtcgacgtcctccggctgctgcggcggaggctggctgtggcgtctccggtgcgtggtcgactccgtgtcggtggtcgacgcggacgagcaggtgaagctgctgtagctggacgacgacgcgtccgacgacgaggcggtggacgacgcgtaccccgagtgccgcgggcgagccaccgactcgcgacggctcctgcccgcggcgcccgccgcctgcttcgacttggcccaccagaactgcggcggcacggctgccgctgccgctgccttcatctcctccgcctccgaccgccgcgcgtcatcgacgacagcacccgcgccatcgccaccccctccctcgtccagagaacggtagatcgcgtcgagcagcgacgccgagaacgacccgcccgcgccgccgcgcgccctccgcggcggcgccagcgttggcggcgcgttcttgccgtggcattgccgccgctccataccaaacaaagtaacaaaaaccacccaaatctcagcaaaatatcaccaaatggcgcgcgcgacaaagggatcaggcaagaaattctatatacgccgaggagatcaagacgtgcgcggaggtggaggattatataaacacaagctgcaggggggagtggagcggtggtggcagctgcagctgcatgcgttggcatgtgcacttccgtcccgtggatctcactcgttcgtcaccaacctgccgcgaattattggcagtgagtggcttgctattatcacttgagagaagttgtgagatcgcgtcgttttcttggtgaaagatgcaattgacggacgagcttgactagaactctgtacctggattctgtcagactgtcagggtctcaagagaacttccaaaaccagttaaggcctgatttagtttctaactttttcttcaaacttctagctttttcatcacatcaaaatttttctacacacacaaacttctaacttttccatcatatcgtttcaatttcaatcaaactttcaatttttacctgaactaaacacacccttaaacttatggaatgggaccaggagtgaacagtgacgtggcccattccggcggccccctgaccagctcagcttgcccatgtccttcactgacaaattttgtagggccccgcggtctaaggccatttctaaatggagagtcttcagtgaataatttcatttcgcggtttcatagattagtcatggcatttgagttgagcttttctatggcacggaaaatgtgacaggtaattaggacaaacttaaacaatgaatttatttgaacttctaaaagaattttttatataaaaagatttaaaaacacgcatcatttaacattttgaaagcgtgttaacggacaatgaataagttgtaggttggagttgaagaaaagaacattcccctaatagcgatgcatgggattagatatggttggatgaaatgaaatattctagcccccaatgctagttttaaccaatttcatagttctgtaaattgtgtacacccagtttcatctagatgaaacttttccctccctttctttataattatattgccatgtcactatatttgcttacatggcatttcatttattgagaatggcttaaggctatgtttgggaggagaagttgcgaacttgtccccatgtagaaaacgagatagctcaagcatatgattaattaagtatcagctaaaaacatgagaaatggattaatataatttattctaaacgcaacttttctctagattttttttaaaaaatagaaaacacatcgtttatcagttcagtgaaggtgagtgtgaaaatttgggagaagaatatgggaaagtcagctaattaacacgttctaaagttgcaggagtctgtttgtcctgtcatggtagccgagaacgctaatcggcgaccagtcgcgcgccccctcccccgcgcaactggacgcgtgtcgcggaggtggcgcgggcggtgcggtttttattttttccgaacgatttttctttcttttttttttggacggttttctttctttttgttttttctgtttttttttctttctgtatctttgccgtgcggttttttttgttacgcacgtttctttttctgtttttatttctttccatatttttttagttttttcggttttttaatatgtacatatacaaactttgtatatacgtatacaaactttgtatacgtgtattttctgggttttatacctgcgcataccaattttgtatacacgtatacaaattttgtatacacatatataaagtttgtatacgtgtattttttgggctttttttacatacgtatatcaattttatatacacgtatacaaagtttgtatacgtgtattttttagctctttattcatatgcacacaacttttatatacattntatatacatgtgtatatttttaatacattaaaggttcatgcatataaagaattatatatatatatatatatatatatatatatatatatatatatatatatgaaaataatatgctactacctggagtagctactccctccctatgcgccctcaattcgatcgctactaatgccaatgactgttaccgggtctaatgaatcgaatactcccgcccgtttttatttttctcggtggtcaacagaaggtcgtttatcttctacagtagatccaaaaattgaacgaagcctcccgagtttgttgtaaatatgaaatttgaaacttgtgtttgtttatccaaagcgagaaagcaggatatttcttgcgtcgttaaggaagagcagaacattatcgatctaaaattgttctctgcatttggagggttcataacccaactgaagtcagatttgtagcctcgccggcggctgtgttacagataacggtgaaagccctggcatggaggattccagttccaaggtttgctatcatattcatctgttattttttcatcttttggattcttttcctgatctcgattcctttcttgatcgtttctgctcctaattcgctttctttatgttttgcatttgcagcaactttgtagtcctgcagcaggtgcaaatgtatcaggtggtggtggctctagttctgttttcatcagaaactatcatgctggtgtaaatgtaattaggcggtaagaaattaagaagtcatgttctgctcccagttctgctgccgtacgccatgttctgctacatctctaccaaatctgcaacatgttctgctcctcagaaatcagatagcagatcatgctctgctccaaatcagtgcatgtccatctctaaacccaaaaaaagaagtgaagttctgctcctagttctgccgtgtgccatgatctgctacatctctaaacccaaatacaagcacaagcagaaactacgatccatgttctgctacaagcgcagaagaagcaggaatgttctgctctcgtttctgcacgggccttgctctaatagtagattaaatcgtttgaaggaccagaagctattctattacatatccatagtttaaggaacgggagattagcttctgctgcatgcgcatgcatacttctctgatgcagattagtttctgccattttttttagttgatgctctgccaattttttctgttggctctaataaatatcttctgctggctagtagcagaaaatcaatttgaaaagagcagatcatcaacaatttcatgtgccgccaaacagctgatgttctgcttcctttcaaacagaatttctgctcgatcttctgctctctttccagttctattctgctcctaattggatgagcagaatatcttctgtccgcttaaattttttttcacgtgagcagaatatcttctgtcagcgtatttcattttcatgttctgctcctttcccgattcacattatgttctgccaacgatattttcaaaacagttatgttctgccatttttttagctgacgttctaccggtttttaaaattggtttgcatgcaaccgatgatttagaaattatttgaactaactacatgctaatattttgtgcaaatattattggattatgggttattccactaacccgatccaataagcggagggagtaactactcccggtagcagcaaataggtgtcccccctctctctctctatatatatatatgtatgtatgtatgtatgtatatgtatatgtatatgtatacacgcatatatatattgtctatactacgtataaactttgtatacgtatatacaaacgtaaaatctatttggagaggcctctcgttttttccttaaccagcgacgccagaacatggggagaaatctactatagtgtactacatgcatgctttttttttgagaagtctattacatcacatgtatgttattttcttcttcaaacaaagttttctctcaaattacttatccgatctataatccgattacatcattgtgttcgttacaattaaatcttcacaacaagatcttacatgattatattacgatgaaaaaatatttatatttgtagattacttttattatatatgtaagttacttttatcatatatataagtttaaattactttttagatatataaaagtaaattcaatagagtctaaaagtaattaacatatattataaaactatcttaaaacaaaacggaagtaattttatcacgacattataagtaaattcgttgtagagataaaaatatgactttatctagaaataaaatttaatcagcatatatcaacacacgtaagtttaacaatttttaaaagtaacttcaatgttaattgaaagtaacttttgaatggttaaaaataactctctataaatttgtttaatcatcgattgtttttttccttttattttagctgtgtagtcacgtccaatgaaaaaaggcattcattaaagttactttctttttttataagttatttctataatatatgtaaattacttttagactttattgaatttactttcatatgtctaggaagtaatttagtgaaatctaaaagtaatttagatatattataaaagtaatttataatttttcatcaaaatataatcttgtgggatcttgttataaagatttaattgttacgaatacaacggtataatcggatcatagatcggatgagtagtttaagagaaaatggtatttgaagtatacgtggatagtgtctctaacagatggagtgatagctggtttatacaaatcagctaccactagttgtatagtcacgtccatatataaagtttgtacgtatgtgtagatagtatatacatgtatatatacatatagtagtatagactagaggatatagtagtatatatacactagtatatactagaggggggcaactgatcgcgcgccgcgcgactggtcgctcatcagcgcccccaacatggcagcccgtttgctaaaaaggaaggctgagttgtaaggtggctaatgggcctatggtacaatactggcccgtcttgaaggcccatgttgactcgtccagtccagtccatccaagtctatgcaactggcaggccggccggccagccacgagcccacgctgtctccaaaattttcagctgagctgcatcagatgcatcgctgttctttgtctgcatgttgctaattgtcactttgttactgcaaaatttcactacaagtgaacacaaacttctgttctgttctgaattctgatctagtgatctcttgtattatccgcaatagataccaagaatccacatcaacagcgcgaggctttgatcaagctgcgctctctctgcactccgggcgtcgtcatgggcagctcgccgacgaacaccggccgcacgccgcacgggctcgggctccgcggccgcctcgccggcctcttctcctcgccgtcaccctgccaccatcagcactccgacgaggtagccagccagacatgcatccaatgaaatcctgattaatcgacgagatgatgtatgtagcttgcggatgtttgatcgtgtgctgcaatggcgaaggtggtggcgaagctgaaggaggaggtggagaagcagcgagatctcaaggagacttacatggctcggctggagagcacccaggcgtatctcaggttctgcctcgaggtcgcccaggtgcacgacttcttgcacctcgtgtccaactccaatggcggcgacgacgagccgcaccgcgacgccggagatcaagagccggcaacagccgccgccgccgacgacgacgacgaagatgctgctgaagcaccgccctgtgacccctacttcgccgccaccagagacctcgccgtgcagcacggctggtccgtcgctcccgacgaggtgcgttcgcgtgaaacatttgtccatcgatcacagcaaagcttgatctcctgtccatggactcagatcgagctgcacgagatgatcgggcgagggtcaacggcggatgtgtacagggcgacgtggagggggctcgacgtggcggtgaagtggatgcgcgccgagttcttcgccgccgccgaccagcgcagccgcggcgaggccttcttcgcgcaggagctcgacgcgctgtcgcggcagcggcacccgcacgtgctgcggctgatggccgcgtgcctgcgcccgccggcgagctgcttcctcgtgacggagctgctgaccggcgcgacgctggcgcagtggctccacggtggggacggtggcggcagaagcagggagaggcggcggcagccgtcctcgccgccgccgccgccgccgctggtggacagggtgagccgggcgctggagatcgcgctggcgatgcgctacctccacgagcagacgccggcggtcgtgcaccgcgacctgaagccgagcaacgttctcctcgacggcgactcgcgcgtgcgcgtcgccgacttcggccatgccaggttcttgccggacggcacggcggcgctcaccggcgagacgggtacaacaccgatcttgccccgtgcatgttcatcatactaattacacttcaaccaaaaaatttacagtcgctgaattaactaatttgttttgaattttgataaatcactgatcagttttacattctagggacttatgtttatatggctcctgaaatcattcgctgtgaaccatacactgagaaatgcgacgtgtacagcttcggcatcatactaaatgaactagtaaccggggagcatccatacatagatacaggttacgggcctagtaaggtaaaatcttcattatgctaatctgctccttcaggtaaacaataatcggttctgttcttggctgacacaatgttgtgtttttgtagattgctttggaagtagcagatggaaaattaaggcccaaacttgcagaaagagacgtaaattctagcgtcctgaatgatctcatttgtggaacgtgggatgcagagccttcgaaaaggccttcatttgccactataacttctgcactccggaaaatcaagcagcaacttatgtaacacaaatggcaaaactagcatctttatttattggggcattggttattatttcacgagaaaaaaactgaaaggaatgtgatgtataatattactagtctactgctgctgctcttgctctgaacttttttttctctctgatggttgcatcacttgcactgctctgagtttctgatttatgataggacatgacacactacctctacatgttgaatacctcttctgtcccaaaaaaatttcaatcctaactatgaatctgaacacaagctagagtttgtctttttttagacaaagtagtatagttttactgcagttactttcaaacttgttatccacatctccaacttatgtccaagctaatgccacgtaagcgccacgtaggataaagactcggctaagatcgccatgtagacgccatgttagccaaaactaccaaggaacattgtttgcaccagttttgatggttggaggagtcgatatacccggtttttatggttggaggacatgaatcatacttgggtgatagttgaaggagtcaaaagtatacttttttccttttgctggagggaccagcacctcgaagcccaacagaataatggagagtgggccaaattcatctatcgcaaacgggccttcttgtgggctttaagcccatgcgcgtagatgtagtagcgtccgtacaagtctttgtactacgggtccagccctcaaagacccccttccccgacgccgactccgccgccgccgtcgccgcgccgcctcgccgccatgcccgccgtcaagtggtactcaactctcacctctctctctctctcttccgcgccgccgcggccagccaggccaccccccctaatcgatcgatggtttcccctcggcgcaggctgatgcactggcacccgaaccagggggcgacgctgaacagccagatcctggcggaggcgtgcgcctgcgcggagtccctggggggatccaaggacgggaggtggaagacctccatcatcttctaccgcgcgatggcgcgggacggcgcgtccgccgccgccgcggggggcgggggccccccgcagcagcaccccgacgtgccccgggagctcctcggcgtcgcgctgcacgagcgcccggggctctacttttccatcctccgcgcgcaccggctcgtcctccaggccgactccgcgtttccccaggtcatggagaagctccagtcctacaaggcccgcgtcaccctcaacttcgaggtcagattgctttccttccttttacctttctgatttgttatttgacgcccatgtttaggtctttttaggttggtaataacatgaggattctaagctgaacatgcaaaatactgctttgctcctagtagctactgaattgaatatggtgttgtcttctgattgagtattgaacttatttttgcttgtattgaacttatgtttgattaaataaatttcattacttatctgagaatcttaagacacggtactaccatgagtatgttgtcacacgagaaattaagattgttgtctgggggcaactgatgctgaattgcttatcagttggatcaagataaattaagattgtattactgtaaaataagatctcatagttccttgaaatgttagttagaagtttacaacagaaaactgtctcaagaaacacaatgaattgtgcttaatttggttaacaagtttttccgttacaaatggggttcaagacttcaagggagacataagttacatggattgtaagaaaataattacaccttagtgaaaaatggaactgtagaatcagtatctcttaactcttatcctttcatacttttctcaaaagaaagagtagttcacaaaggagagaaccaggtgtgtggtactaattcatcatatgatttctcacacaaatagttaaccagcattgattgatgccaatgtaaatgtttatacaaatgaatttgattaagagctactaataatgctccattatctaaaaaaaaagtaataacactccaggtgagaagtacgtccaaaagagaaaagggctaaatgaaaaaagacgagacatgagatgacaaaaggtaaatagaaattatccaaagatctctttgcttatttaccatcacaccgtaggttttagatgcaggtgtggttgattttttttaaaaatctcttgctcaacttgcgcattgcggtgcgtggagcttcgtgaggcttctgctggaagtctttctctctctttttttgggggactgctaaaagtctcttgaagccaggttctggtttaaattctttgctgggtctttgactagaagggtgcgtaaatccaacagtttatactgcctgtcgtagcattggatggtgcttaatttatggcttacgtggctcaatcaagatttgagaaagattgattctttcactactttagataagcctttagtgatttaaattatggatgattcaaaaactgttcctcaagtctggtgaggttgcaagaaaccttctccaccacttcttttttttataataattttcttttatgattcaaccacttgccattagggcttctaatctcaagagtgggtgatcaacaaaaatgtttgaaaaatgatcatatatctcacatcgaagctactcgattattttgtttttatgttggcccttcattttttttctagataccttacaagttctatctggtgctttaatcttggtagtgtttattctaccacggtgcgagtgttcattgtctcatatgcaagttcagtttattggatccacttgctattaaactagatgctttcatctgcagggatttcagtatcaactgggtgacttttgcctgaggattggaaaatgtgttcctaataattcggaaacactgaggggaatcatgatggaggtgacattccttttcattttcttttatttgttacacttagcctgctggcctttaaacctatgatatattgtttgctcttttttagtataatatgatagtcaaaccaaatgcagggaagcaacagtataaaatttaggtttgagtaagtattgtcacagattaacagggctttgttgcttagactttcaattcgattcttgatgttctggctcatactagccctcgattactactagtattcaacatcagtattggtagggatattaaatgaatcatgcagtaagtgtgttgagcttgacaaaattatcagacgtgcatgctgacctttgattgtctctccattagtttgcaagcaaactttgcaacttactgtttgtgtcttgctgctaaggaactactaagtagttcttcacagctttaaacttagaagattcttgttgtcatttctgggatatttatgaaagtcggtgcattatttggacttgaacactaaatcgtaagcatataaaaggtctgtacttttgtgcatgtagttctcacttgaattgttaatcgtaagagagagtgaaacttgataggttctcctgcattcatttggctccaattgttgtacttatgagtaatccttattttgcttttgttactcaatattgctagcaagtttggcatgatttttttttttatttttgctttttgtgcaggtagagtattatcccctatcttccattgaaaaatccagggcagtaatggaagacttctttgacatatggcaggaaacagttgctaagaagtcattacctggtcatttcatccacgtagaatctaacttttcagagtatggtctttcagatcactattctttccagcacactgccgttcagtacgcaacttgtttgcaacaacttatggctgccgtgaggccccaatgacatccacaaggtgtgtctcatgcggtgaaatgttattggtcttcaaggactgaggtagtgataattctgaacaattgagtagctatgacctgtattatcacgagttcttattgtcagtagatccttaattttgtcgatgtggactaactcaccaaactaggcatggtaagcaaatattgctaccctaacagcaatggtgtggcaagtttatttagcgccactgttcgtagcatgattttacaacttgcaacatggttgaagaaggcgctactccctccgtctcataaaaaacaaatggatgacatatcctagtactatgaatctagataaatgtatgtccagatttatagtaatgtgtcatatcg

SEQ ID NO: 7497 - DNA, 17140 bp, Oryza sativa
ggcatgctgacgaaagaagagcgagaagactatcgaagcttcttgatggaattccgagattgcttcgcttggacatacaaggagatgccaggacttgaccctcgtgtcgccacccataagctgcgattgatccccaatttcggccagtgaagcaaccaccaaggcgcttaaggccagagttccaagaccaagtcatcgccgaagtcgatcgactcatcaacgtgggttttatcaaggagatacaatatcctcggtggttagccaacatcgtccctgtggaaaagaagaatggacaagttcgagtctggggtagactttcgcgacttgaatcgtgcttgtcctaaagacgactttcccctaccaatcacggagatggtggtcgattcaacaacgggttatggcgcactgtccttcatggacggctcatcaggttataaccagatcaagatggatccccttgatgccttcgacacggcgtttagaacccctaaagggaacttctactacactgtcatgctgttcgggttgaagaacgccggtgccacataccagcgtgccatgcagttcgtcctcgacgatttaatccatcattcagtggaatgttatgtcgatgacatggtagtcaagaccaaagatcgcgaacatcatcaaaaagaccttcgcattgtctttgaccgactacgtcgacaccaacttaagatgaaccctctcaagtgcgcctttgccgtccaatccgttgtcttcctcggcttcatcatccgtcatcgagggatcgagatcgagccaaagaagatcaaggcgatacttaacatgccgccccctcgagaactcaaggatctgaggaaactacaagggaagctggcgtacatccgacgcttcatttccaacctctcgggccggatccaacccttctcaaagctcatgaagaagggcacaccctttgtgtgggatgaagaatgccaaaatggcttcgataatatcaagagctacttgcttaatcctccagtactggcagctcctgttaaagggcgcccccttattctctacattgcaacgcagcctgcctcgataagcgctctcctcgctcaacataatgatgaagggaaggaggtggcttgctactatttaagtcgcaccatggtcggtgctgaacaaaactactccccaattgagaagttatgtttagccctcatatttgcattgaagaaactaaggaactacatgttggcgcaccagatccagctcattgcaagggcggactctataaggtatgtgctaagtcagcctgtgctcactgggcgactaggtaaatgggccctactcatgatggaatatgatatcacttttgtgccgcagaaagcaattaagggccaagccttggcagaatttcttgctgtacatccagtgccagatgactccccactcatcaccaatctaacggatgaagagattttcaccgcagagcttcaggaacagtgggagctttactttgacggagcctcacgtaaggacgtcaaccccgacggcacccctcgacggagagctggggcgggattggtgttcaaaactccacaaagaggtgtgatctaccactcgttctctcttctcaaggaggagtgttctaacaacgaggcggaatatgaggctctcatctttggtcttctcttggcgctctctatggaggtacgttccttaagaacccatggggattctcagctcattattagacaaatcaacaatatttatgaggttcgtaaaccagaactggtgccatattacacagtggcccggaggcttatggacaagtttgaacacatcgaggtcatccatgtgccacgaagcaaaaatgcgccagctaacgctctggcaaaactggctgcagcgttggtctttcaaggagacaatcctgcgcaagttgttgttgaagaaaggtggctccttccagctgtcctagagctcatccccgaagaagtcaacatcatcacgactaattctgctaaagaggaagactggcgtcaacccttcctcgattacttcaagcacggctctctacctgaagatcctgtcgagagacgccaactacagtgatgacttccctcatacatctacaaggccggtgtcctctacaagcggtcttacgggcaagaggtcttacttcggtgcgttgatcggaatgaagccaatcaagttctccaagaagtccaccatggagtatgcggtgggcatcaaagcggaccaaaaatgtaccatagcatccgactggcagggtactattggccaggcattatggcggattgcctgaagacagctaaaacctgtcatggctgccagatccatgacaatttcaagcaccaaccgccggctctgcttcacccgacggtcccttcttggccgttcgatgcctggggaatcgacgtcatcggcctcatcgatccaccttcttcaagggggcatcgcttcatcctcgctgcaacagactacttctccaagtgggcggaagctgtgcctctgcgtgaagtgaagagcagtgacgtcatcaacttcctcgaacgacacaacatctaccgcttcggggtaccacatcgcattacctccgacaacgccaaagcctttaagtcccagaagatctataggtttatggagaaatacaagatcaaatggaactactccaccggttattaccctcaagcaaatgggatggccgaagccttcaacaagaccctcggcaagatcttaaagaagacggtagacaagcatcgaagggattggcatgatcgtctttatgaagcactatgggcgtaccgagtcacagttcgtaccccgacacaagccaccccatactctctcgtctatgggagtgaagctgtgttgccattggagattcagctaccatctctacgagtagcaatccacgatgaacttactaaagacgaacatattcgcctccgatttcaggagcttgatgccgtggaggaagagcgcctaggcacccttcaaaatttggagttgtatcgccaaaacatggtgagagcctatgataagctcgtcaagcaacgagtcttcaagaagggcgagctcgtactcgttctgcgacatcccatcgtcgttacacacaagacgaagggaaagttcgagccaaaatgggaggggccatacgtcattgagcaagcatatgacggaggtgcttaccagctgattgatcatcaaggatcacgaccaatgccgccaatcaacgggaggttcttaaaaaaatattttgtataaaaccctgcgcctcttgttttcttgttttctttaaaaaaaacactgtgagcttgccaacatgcattgaccattgcattgtctggtgctccacgttttgttttacaaaatggatgccacatcccacaaaaaaaaattaaaatggctttccacatatcacactgagctggtagaagaagacaaggcaaccttagaacacctctacaggattcaatggatgaccatgacagactgtgcttacaactaaacatccttcacgccaacacacaagtactacgggtgcatatttccgaggaatagcaaaaagacttgattgggttacttcctagtaacaaggtccccacgccttcatgtccttcggtgtgcttcagacctatggagataccaagccccagggaagactataggagaagagtaagaaagggctacctacctcaacacaagttgtggttcagtgtgcagccacttgccatccctgtgaggcatgtcaacaagggactttacaaaagaaatgggcctgcgaggattacatggcccacaaaggggaatggttgtcctccaagttctaaggatgccaagatcccagatcaatctcaacaaagtcgtgatgatcttaactcaagaaaacaatccaatatcaatctcaatgaagccgtggtgtcatgaagccgcgaagcaaaaaaaaaaagaagaaacaaaaagatccaagcaatcagtgatctccactgcattctgtcagaaataggaggatagccattcatcatcctcggcaaaaggaaaaggccactctcacagccgttcccctataaccctatcttaattcagccatacctaattctctcggttcgatgaagcacaataccaggggcatgggactcgtggtggtacctagtgaactgaaaggctagagcatggattttcgctgccttctgaaagtatcaccatgtatgctactcctatacacaagcacactaggaagttaggttgacagggagcaatcgtcatggtcattcggtgattcccgcgacacgttcttcggcaatcttatctgacgctaccacatagccagtgttcagtgggaaagccaatattttaaaagaaaaatcaacaaaatcattttcttgctgggtttctttctatcaactcacctggtttgctcgactctagcaaccatactctagtttttttttctcttttcctctctcgttttccttttcgtgatgcagggttttcgcttcacgtcatttggaggcaacataacactctgaagtcgccatcgggctatacacctttcaacctgacgggtcggcatcacaacagtcaagtggtcgcgtccggattgataagatatttctttcttgggagcggggcggcgtaccaacgcgtcagcgccaagccgtgaaacccttcatgctgatgaggcaggcaccgtgatatatcaacggtttcaatcggtctgataaaatgtcttcaattgtggcatgggtctttttcgctgcgagtaggagacgatttcaagttattttgttggctggcacctatacttggtcccgacaaaattcctttaattattatttgaaggcatggatcttcgcctcgagacctcaggaggacagcttatacctgaagtcatttttattcttcacctattctcaaagcgccagactttctgaacggtgctactaccccacatgggttgatctattatatgaagcaacttgtacagaaggcaaaccaggaattgatggaagagatcatgcatgcagctgcatgagtacagaatttgtgtatggcactgtagcatggtgatgatgcgtcgtcctctgattgctcggccacattgccacaggatgggtttgttaaaaaggaattatcttaacaatgcaaactgctggctggccttggctcaatatgttgccgccgtgataatcaacagaagttcatatgtattcatgcacttataaattacagccatatattcccatatatcagctctcgggtcccggcaggatcttcagcgggttctatatgcgacggtggccgcatgcgagcagtgccaagtattcggatacagaagggataatacatattagcaagttaaaaaaaacgaagaggacaaaacacaagcactccatatatatcgatgaagacaataagacagactcaaataataaaacaagtactcctaattaatgggtgcatgataatgccccaactttattcaaagattaaaaactagctagctgatcatctaaattaagagcgcttctaatgtgctttacatgactcgaaaataaaatcctaattaaggtaaaccaaggagaagcatatggaggctattctgattcttcgacgtactaccccaaggcgccgattctctacgatatgatagaatggcggccacctctggcggcgcggccactgcaaggcgtttcctctcttcagcaagatgccccaaatagaccttcgcctcgtcacgacgctttatcagttgcatgacgccgtcgatggtactatcataaacttgccggttcttggcggctgcctcctctgattccaaacactggtgctccttctccctcgcatctttggctttcagctcgtgttcctccgcctctttcttccaggtagcccttgcttgcttggacttctgaagatccgcggccacgtcttcacggccactcttgaggaggtcaaggtctagtagcacgtctgaacacgcactctctaactttgctaaggaagagcgcgcctcgccttcatgagcagctaaagttctcccttcaaaggttactgggagctctcccttaagatgttgcacaagtgcccccaagtaagacatcaacttctccaagtctgcggggcgtccaagctcgtaactattttcccatgcagcggtggcagcaccaatgtactctatggtgccctccttgttcaggggtttctccatcaaacaatcttggatgcttaatagatcctcctccaccatgcgggcattgcgacgttcaatgggcgtggactttggaagctccagcgtcggcaattcgtcagtcgccgaactcacagagttaagttggagatagcgaccgcccgtcccgaactcagcaaggtaacgggacgtcttctccatcaactcgttcatctggcaagctgtgtcggatggattgcctgaagtttctacaatgggtatagtacacttttctcagaaaaagcaaagaaagaagaaaatacatcaagagaaagcagaggagaatatgacctctattaggagtctaatcatccttaccttcctgatgcttttgagtcgagggtcccggagttgaagcggcatcagccgtcggcatcacccgagaagagcggacaggagcattagcagccagcacaactgaaggtacatcgtcaataggtaccggagcaacatcggaagaggcagtagctttaagtccacccaaagcagttgcctgctctatcgtatcctgagttgcaagtatgttctaagagacaggttatcaaaccagtatgacatagaattttaagagaaaaaaaaagaataggggaaacacggataccttgccagtgccatcagaagaagaagaagaggaggaggagtcgctcaactggacagcatcaagctccatgtcgggcaccacagagcggcggcggcggcgacgatcatcgcttgaagactccgtggatgacaccctctcgtaaactacggggttttttcctcgcttctcacgcatggtgcggtccagctcggggtgtggagaatcttcaatacgcagaccctttttagaagatttcggcaatggaagtctgtcaggacgagcagttctctccttcttatgacgccagtcacgcaggaattcgattgactcgccgtggcgtttgtatcctcctcgatcatctctacggaccgggatcttcgcgatatgctgggaagggttgtcacccttggtctccttctgttgcttgccaccggatcctcccgggcgcttatcttcgacagtgtgtctatctcctgccgagcgcctatcccatgttactcgcctgtcccccgttctccgcccgtctcgcgggacacgctctccgctgccccggtcgctggcgccacgctcgcctgcacccctggatgctccgtcttccctggccatctcaagatggttgcctgatgaaaaagtacaggatgatcaagaagcgtcctaattccgacggctaaagaatcgacaatggatatatacctgtgatggagttaaacacctgaggcgccgtattgcataatcaatgcacaggcatgaccagcaatatataggcttcatccaaattactcgtaactgcaaaggatttggagtcttagccgatgacggtctagctttgtttttctttcgccgcacggccggagataagcttcagcatgggagtcctttcgtcgcatgactaaactctaccggacatgtatcgcatgagccaacacgacaccaagttaatttcgctcgctccacgatcaaaatttacttggtgggggcatctgtttgatggtattttggtgattatatgtgtacacaagacttactcatgatggacaaagcaaacaagcagtttgtaagttggctagcttatcatttctacgcaatgctcggccatgtatatacacgcaaatacatgcatgcacaggcagctgggaatatatatactgggaatatatatacttggattagtatatgtgcatgtataattaaccaataactagccgtgtgaagattggctggtgaggcaatcacgcgcatgcatgcatgtactacagtagacggtcgtatgtgtgtgcacgcctgggtgattaagcaacctatgcatatccgagtgattaatcataggctcgacccatggccaaagacggtagctgcctacgcgccaagatttcagaagttaatatgcggaagagataaaaccagatgaattaagagataaccaacaaaccaattgattttatctctataacaaacttgatctagttagttacttcgcgcgagcgctggcgaggcgcttatcaccggactgtggcccagcagcagagaaacaaagcgaattacaaatcagatatttgacgccaggagaagctaagagataaaatcaaataaggatatgaacaaataacaaactgatcgatcaaaccttatctgcaacgaacttgacgcggaggaaacgacgcgcggacgcggtgagcaccgaccccagacccctatataaggcgtcgacccctcggcagccaggggcattcacgaactcatccacacattcattcaccaatgcatctagcatccacaagccacctatcatcaatgcatctacccatccagcatcaacacatccatccatcaactctcatcggcgatccatccatcaactctcatcggcgatccatccatcgacgacacgcaccggcggcggcgagctacttcggccggagtcccggcgtccggcaggagagggcgcgcacggtgatccgatcatcagcaagcgcaggagaggagcttgatggctagtccaggtaaaagctagcaagattgttttgttttctttcatatacagcacgcacacatccatgcatagggatccatctgcacgtatcgtcgtcgccggggaagtcgcggtggccgattcatctacgcatcacagaagcctcatcgatgccggtgtctgttcaagccgacgtagtgctacttgtccctggactcgacgctgctaattcaagccgctggtgatgcatctacccgaagctgcgacctggccgagataccagacatccttgatttgcaagcttcaccgcactggagcgggctaaccatggaggaggtcgtcgggaagccgccctgccggagcgcgccgaggatcgccggagctgctgccgactgccaagacttctatcagttctcatgccggaggtcaagcatcacgcatggcgtcgaaaccagcggatgacgatggaggcaagtatggctgcagtacagaggaaggacgacgggaggacggcgagccagtgctgttggatggcaacaagctagctaatgcatgttgattaagttaattattgtggcaacgtggccaaccaatcggaggatgacatgtcatcgctgctacagttccatgcacaaaccaatgcgtgggctaaagaagtcctgttggtttttcttatttgtcccaaatgagatgccgagctttgattaaatccggccgccatctacatcaaccatcttcaataattcctccctaattcttctctaatcgaatctcgatgcaactgctgtgacgtcaagtcgttcaagctacgtaactccatgcatgtcttcaccaacaatctacatcgacacgttattcaagaccgacgaggctagacgacggagggtgggcgaccaacaccggcgcacggaccgacgaggccatggatcgctgtcggcgctcacacacacacacacatctacatcatcatcacaaccatgcatggagaacgcgaagcgaagacgacgagacgaccacaagcagcttaatcggaggttctcttgcaggcctagacctgcggaggtaattaactgggagcttcttgaggccccaggaaccagaagaccacatcgcacaagtcagatctgtccaatgtcagattatggagcgcgcatacatatatattacattgggaatttgtatttatgatcttttaagattaataaagagcatgttccctatgttttgtttacactgtgtatttaggtacactggcacgcccgcatatatatgtatctctaaacaaacgagatctcagatgttattttccaccctaaacataaactttaacaagataaattaatatatgatagactactttacaaatatacaagatcaaatttctacaagctgtaacgaaaaaaaaattaaccatgaatatacgttaactatatatatttaaatttgtttttttataacttgtagaagttgaattttaacttgcatatttgtagagtgatatattacatattaatatattaatatatgttcttaagtttttaaaatttctttagctagctcagtttgtttgtatcgatgggcttagtaattagccggatattgctcctgcgagatggggcaaagtatcgacctgggatccgcccaaagtgggtgcacgccgccgtcagcgggtccaagtcgatcgggtcggcgtcgaggaggccaactcgtggggtgtcttcgccatcgcagtggataccggcgatcctggccgaagttgacggcactgcacggcaccacgcccaggcgctcactcatcgatcggcaggtaactgtcaaaaactccaacctgcagcttctcctgctgcttactgatcgatgcatgggccgatgtgtaagagtacgcgccacatcgagatagctagctaactagagcttgggccctgaattttcaggtggttgaatgaatcggttggcgaagacgacgatggcatcaaaggcagaactacctctgtcttgaaaagtatatgttcccggtttagatatggtacttcatctgtcccaatataaatgcatctaggagaggaggtggtatattttataactacgaatctagactggataagcagctatctagctaaatttgtagttcttggatatgttacatctatactttgacggaaggaatagtaactactacaccggccggccagccgcaggagaagatcgacctcgtcgctgcagaatcctcctgagattctgatggaataatttcgtacacagttcaagattgttcatatatacagtacgtgcaaacggttcaagctagctgctgcctttgatggaagtgaacatacaaatgtggttggtcgttggtaattaagctgttgccttcttctactactactccagctgccgtcagtctcactcagtcctgtacattcatctggcgggcagcacaggctgtaacaacataaatagtcaagcacggaagtaattgaaccggcgaaaatattgcgaccgatgttgaaagattgtgtccattaacaaaccggctaagtacatactataccgtatgagataatgaaagtcctgacctatttgtagtaggaaagtaacatgagctgcaagctttgaagggaagtgggagtacacataccttaaacttcttcttttattatcctacagtataaaacactgcacaaagccgaccagagtgctagcttttgcatattgcaggtagtacgaaccaatggttttcagatgaaaacaaccactcaatatacatctctacagtgttttgcagcgtttgccacatctcaatcgctttgattgggacaccactccaactggcctgtaggcatagtagcatacacctgaaagttttacattttaaccctctttaaaaacataattttgttataaacctcaattaaggatacagacccctctggaggctcatctgtgccgaggttaaatgtctttgcgccaaataagttggtgccaaaatccagccctcgaagctagtgggtttaggtcacctgcgaaacaactttcctttctcttcccatctctctttgaattgtttgctgtccaattttgagaaaactgacaaatcaatgtgtcctattcatttttgctattttttttataattacacagtataacgcagatactcacaatacacgcacactcatccctctgaatgcacgcacgcaaaccctacccctatgagtatcttcgaaaactggactggcaaatccatcttggagatcaggtacgtcgcctaccattgaaagcacaaggccgttcaattctagaaaatttgcttctatgggagtcgaatctagtacctaaggtgctaccgaggctcttgtaaccactaggctgtatgctctttcgcctagtttgattttattgatagaaaacttaatctaagaggaggatgtggttccctccctcctccacgcccttgttccaattatccgcggctaaattttgaaaaagagttgacaaatcaatgtattataattcatttatgataatttatttttatttataggggtaagacttgaatttgggataatatagtaagaagtcagtgaaagaggctggcaccatggaactggtgccaaggctcaatcccagagactgagagttttgcattgagatgtctaacatcagcgacaatcgccgagagttaggtccatttctgtaataagttttttaatacgtctgcatatgaaatatgtttttgaaaaaaaagtccagtatagagcacagcaacaaagaatcaaatgtgtactactactctataccgtcatatcgtactactccctccgtcccaaaataagcgcagccatgagtttccgtgtctaactttgatcgtctgtcttatttgaattttttttataattagtattttattgttattagattataaaatataaatagtactttatgtgaccgatgctttttagatttctcaaaagaaaattaaataagacgaacggttaagttggacacggaaactcatggctgcgtttattttgggacggagggagtacttgagattcagtggcactgtttcctctcctttttgcgacacagccattcatatccttggcgtgaacgagcaaagcatggcttctgaatttgtcagtagtttatagtgcaacaacgtcgtccttcatctggatctgatccctgaacccatcaatcatactctcacgcccccgtagtacatgccaccactgtggtctaggagtactgttcatcctttactactccagcttataattatcatgcagttcatgatcagttcatagacaggacgtgtgtacaggtacagcaacagtggcgagattttagccggagaaaagctctatatcgagagaggcaaactgtggccatcgaccatggatggatcgtcgacgtgacgacagtaacgagagaacacacacacgagctgctgctgctgctaggatcgatcgaatggtagggatcgggcactaactgaggtaggtgaatcaggtttaaggattcacatgagcgttgctgccgccataactgtccattctcctttgtagatgcacggtcccgttcgtcgtcctgtggccgtcagcgacaccggcatggcgcattcaaggcctaaagcatggcgctagctgagggagctagctaccacagctagaattcgatcgcataaatgttcaggaaatgatccagtggttggggacaaaagcatgcatatactagccgctgcatttgtctagctctacctgccctcatcttagtttcgttcccattagttaattattagattcgtttatcaatattcagattagttcgggtagcaatgggccctggtgtttttctgggaccatatatattccaaaccccaatcaactgaatgctgaaactggcttaatggcgccaagccgattctaatttgtgaacacagtagtatgcacatatcacatgctaaaattttggcatgcaattgggtaaattagccttcaaacatagcagtgctaactgggatggattttacattcaagagggtgttctctcgttttttttacatgtcatttaaatagttatatatatattttaaaaaagacaaatagattaatatgtaatatatcacttgataaacatgtaatttaaaatttcacatctgcaagttgcaataaataaacaaattaaactattgcaacttgtagaagttaaatttgacttttttttttgtgaagtgatcggtcactattaatctatttcatcgattttttttataactattttaatgatatgtaaacaatgagggactggttgcttgaaagtttaaaatagtttctcctatgctagctcatccaaggtggttggagaatgttttgtctttcttgtcttaaaaaaatattaggtagttgaattcaacgtggatcctatttagcacagctgtgtcttcggcacacactttgtttatgaaaaaaaaaccttttattgaaaagttaattttcatctgaaaatttccatcttagactttaatttggcatgggttttataggccaaaagtgtagtatgcagcgaggcacgactgtgataattagccatctaaaattgattgttctagtcaaattctgcatacccatgattgcaattcctatacatcaacgaataccagaagtagtagttccaagaaagacaatctgagatctactagctaagctcgatcacgtgcagcggttgcccaaaaagcctagcagttgagacagccacaactgcaaggaccttatcgtcctagctactgcatatgcaaagctgatggctacgtaagcgcgacctgcatatacgttggcgcctgcctcatcatcatcagcaattaatcagctcgcctatttgtggcaagctcggatggtcagagatcggtcgagtggtacaagcgcgcacgcggcacgcatgtacgaacggcccctccttgccttcaaagcgatggctccatggcacccgtccacgacacgagctcgatcagctcgcccccatgcaggtcgcggatggcgaccttgatatcacctgtgctcggaattaatcgttcaacatcccgctataatgttactaccattaccattacttatatgtgatcaatcccaccattctaattctaacatgtatatataatagtagtattatggtagaggatatgaacccctctcctgtgaccctgcctccggttgcctcctccatctatctctcccttcatgcacgcacggcacgatcgatcgatgaactcgagatcttaagatctcactggtgaaatgcctggtcccggcgaagaaaaatctcgagcttttgagattgtgttaatctccctcgatcgcactgtatcctctcatcggatctctgagcagccaatcggaagcgtgggggcatcgggacgcatatatatatatatatatagacgaataatatgatcgatgtaccggcactctttgaattgaattttggctctgctaatttaactgaagtcgtagattcgagggatatatatatgcacatacacgtacgaatatacgatcgagcgtgcatgtgatcgtaattgtaacctggtcctcccgtttttatggcaatggccaggtttgcattttttgtgccattcattgcgctggtggctgccatcgatcgatcggatcgaacgaatgcgagttcatcatgtgtacggttgagcttttgcttcccctctgtccggtctctctctagcgatttttttttcgcgaaaatacaaaataattgcacgttaatatattagaagaaaattaaaaaattttgttgcatgacgcaatcaaccagattagcctatgctaagaaaagagaaaaaaaaaacacaaccaagaaaaatggaagagactactacaatgactaaacgcaactccaatcagctaggaggggggcagagccacgctacgctcccaagaaatccaaaaaaagcttctctctcgcgatggttcagccccgaccgcgccattcaaatcaacggatcgatgcgcgtacggacgtgtccgtccatccatcggttggtcagggcaggagcacgtcctcgtctcgtcgtcggatcaacggcgatcgatcgatcgatcgagcgcccgggcgagggaggaatggcggaggatgtggtgagccaggtggacttaattcggttttttgctgtatagctagcgttaatggaagacgtgtgacctgtaactctaactcgcggtgtatttggttgattgatgggattgaaagctagctagctagcgaagcgatcgatcgattgcaatgttgctcgctaggtaaccagacaaatatggggcctgctttgttagcttgtccggtttacagtcgtacggtgtacacgacgattttaatagtgtttcgatcaacaatattatactagtactatctccgtcccatattacttatctttttgagtttttgtttgtcaatgtttgatcattcgtcttattcaaaaaaaatctagaattattatttattttgtttatcatttgctttattatcaaaagtactttacatatgacttatctttttttatatttgcactaatttttcaaataaaacgaatggtcaaacgttgcaaataaaaagtcaaaaacgtcacctattatgagacggagggagtagctagcaaccccgtattgaacacatactagtgctatgaccttagatacatgatatgcatgttcagattcgtagtactagtatgtgtcttatattttgggatggatgaataattaaattacttgcttttgtatttaaatatatgatgctgttagctttattcagtcaaatttgtcgaactttaattttgcacttagaaccatcaataattctaacaataattggtctgaaaatataatccaagtaaatttacagtaattttattatttattaccgttgttctaaacttctaatcgaaaaatgatgatcagagaatcagagttacacaacaaagaacgaataaaggtaaccgtgccatctcgttcctagtagtaataatgcacagtaattaaatccatcatgccacaggcctagcagcctagctatatgatcgatcagattaaggatcactggtgtctcttgtgttaaagttactgttttatctctggggggagctaggtatagggagataatatcgctagttagatcgaggaccacgtacgagtatacgtaaatagactgcatgcatcgatcattcaaagatgggcacgaatgcatgccaatggcgtggtgcgcggcttctgaaatctgaatacatagtaagtctgagctctgaccaagacatgcgcaagagtcagcgtgctcagcgcgggggggggggggggggggg

SEQ ID NO: 7498 - DNA, 24167 bp, Oryza sativa
acaaaaatattctgctgaaaaatttgtacatatttttattttataaaatttaaattgctgggcaaagtcctggcaataatttcagtcaaaaaaatattctgctgaaaaagcaactcgaaaagaaatagatgtttcactctgcctttttattccccatctgaatggctaggctgaatttatgtttttatttttataactgatagcatcatagtatatgatttttagagttcttatgtaactatttgcatttgcacccaatagagatgtcaaactgccatttcttgccatctaaagcagactagcaaattaactagaaggttggagtggagtagctggcagtgaacatggaagctaggatctagctactaagagcaagtttaatagtatagccaactactggtatcaaatcatctatagtcaatctaatagtcaatttatacaatagttaactataaatatatattacatcactaataattggtcccgcatgtcatacacacacaatgttttggagttcgtgctgcaggtggctacaaatctgtaacccgcttgtcttctctctcctctcttatctcctccacgtaagcttgtagccgacttatagtctattattatatatgctctaatataggcaaccacgtgccaaagtaggtcgtgaacaagtggtgtgtaattaattgccaccacctatgtttttttatttatgatatcattgattttcgcataacggttaaccattcaccttaactaaaaatttaatataaatataagttgagattatagttttccaatgataaaacaagtaaaaatagatatttatattttaattaatatgaatggttatatgtgacgtcaagactcaattacgttatacattaaaaaattaaaaaatagagggaatacttattttgtttcgtattataagatgtttcggattttaaacatattcatgtatgaatccatgtatatatgtgtttcatatataaatatatgcataatcatacagatgttaatgagttagactataaatcaagagaccaaaacgtttataacgtaagacatgggagtagtatattaatgtattatcaagagatcgaatgaatgttgagtactgagtacagactacatgcacaaacaaattcagcacgcatgcaacgttggaaaataaaaatatcccagatcgaacaatagaggaagaaggcaagcaagcgtatgatcctgcttagctcaaaaggatgcgatgaacagtgcgacagcggctatcagcagtaagcacgcatcagcaaacggtcatctcgcccctagcaagttgcagttgccgtagtgcattgactacacagtggagatgtttttttttttagtaaagaccatcaccggtctctaaacttgtaccgctgtatcatcgcggtccctaaactcgtaaatcgaccgttcaggtcctcaaacttgttcaactgtgtcatcccggtccctcaaattgcatatcactcgtttagattctccaacttgttcagttgtgtcacctcggtacctaaacttagatttgaatatcatctgggtcaaataggacggtctaaagactttatatttaaaaataattcataactttttcatgtgaactctaataaaaacaaactttatatcaaacttatagccttgacgcgatctacaactttatagttgattttttttattttaagtcattttttgtcccaaaatgtaattttaaaattaaaatttcaaaatctataaacatacaagttggaggacctaaacgagtgatctgcaagtttagggaccgggatgacacagttgaacaagtttgaggacctgaacggtcgatttgtgagtttagggaccgggatgacacagcggtacaagtttagggaccggtgatggactttactctttttttttttctcttgaaaaattgtcccttgttcgttacatatcacctaattaaatagaatttctttataaaaattcagcaaagtaaatcaattatatcacttcacaaatatatatagatttaaattcgacgtatacatgttaaaaaacactctcactagtatgtgaactattcatagccatgcgtgtttgtacgttttttttctaatttgtattatttggacttgtctgttttattgagttatggagtatgtcacatttatctatggctgtgtttagttcccttcaaacttctaattttttcatcacatcaaatatgtttggacacatacatggagcattaaatgtggacgaaaaaaatcaattgcacagtttgcatataaattgtgagacgaatcttttgagcctaattacaacatgatttaacaatgtcatgctacagtaaatatttactaatgacagattaatttggcttaatagattcgtttcgcagtttacatacagaatctgtaatttattttattattagtatatgtttaatattttaaatgtgtgtttgtgtacgtcaaatttttattgccacatcaactaaacacggtctgtgtcaacttatcaatttttggacatagaaaaacaaagtgacaacggagaaaaatgaaaaactcttcctacgcactgaacagtgtggcagagagatggaagaggttgttgatcaagcaaccgccgtagcttgatgtgaacacgaagcaatattgtcagttggcgagggatgcactgatgactatgctagtgcctactagtaaccagtatactcaatgatacttgtgttataaaatccctaatgctaaaattcattcgagcacaaatcttaaagcaaatcgaatgctgaaaatttatatagtgaaaaagaaaatgaaataatagttgtaagttaggattaatctcacacaaaatctatatatcgtgcactgtcgtacaagcaattccactgcacctcttgtgttagtaaaacccctaatgctacacttgtgttataaaaccctgatgctagaattaatttgtccgatcacaaatcttgaagcaaatcgaattttaaaagtttataaactggaaaaggaaatgaaataatagttgtaagttaggattaatctcacgcaaagggtctcatcttttcgcttattcttatacttatcagctaaaatttaaattttcaaccttaaatttggagctaatttaaggtttttttcatcgaagtttattttttagtctttgcttttttattgctaagtacacgtatataaaagttttatttacaaattactttttttacaaatataccgtttaatggctccggaaaaatatatatcgtgcactatcgtacaagcaactcctctgcacctcttttctttaaaaaaaaaaaacaaaacatcatctgcgtgtttactcaacgtgccctcgcgccatcaacacaaccaacgtcccattgccaccttttatacttctaccttcttcagtagttcatcaatgtcgcgagcaccccaagaaacgtaggatcatccaagcaaacccgccaccacctgccggccggccatgggcggcggcggcggcggcacgccgcgcagcagcatcggccacatccttcccggcgccggcttcgtcgccgtcggcgtgtggcacctgttcaaccacgtcaagctcttctcccagcgcccggacacctacgtcgcgccggcgtggttccccgtgccgggcgcgcgctacctggagctcgccctcatcatcgccggcagcggcgtggagttcgccatggagatgttcgtcggccactcgacgctcctccccttcgccgccgacgggtccatcccttccgaccgcctccacaaccacgagcacgccatcatctgcctctccctcgccgtctacgcggccgccgcgctccacctcgaccgcgcccgcgccccggcccgcggcacgctcggcctcctcctcgtggcggcggtgttcgcgcaggagctcctcgtcttccacttccactccaccgaccacgccggcgtcgagggccagttccactggctcctgcaggtggtcgtcgccgcgtgcctcgccacgtcgctgctcggcgtcggctacccgcggagcttcgccgtcggcctcgccaggtcggcgtgcgtcgccttccacgggctgtggctcgccgtcataggcgccatggtgtgggtgcccagcctcgtgcccaggggctgcgagctggtgcgcgaggacggccgcgacaccgtgcgctgccgcagcaaggagagcctccaccgcgccaaagcgctcgccaacctgcagttcgggtggtacctctcgttcatgacggtgttcgtcgtcgcactctacctgtacgtgagcaacaggtaccccgccgcagaggaggcggcgtacgcgccactgcagaaagccggcgccggagacggtgacgacgacggcgatgacgacgcgcacaagggtggcggcgccggcgtgcatgggttcgctgcgttggagatagaggtttgattggcaaaattgtaggacagaggtttctgtgtgaagaggattttgatcgctcgggggatatcccttcgttttttacatgtcacttaaatggttatgaaaaaaatttaaaaaaattgagaagatgtattaacatgtgatatatcactctataaatattcaagtaaaaattcttctacatctcgcaacgaaaaaaaaaataaatttgactctgaatatacgttaagtagctccggtttaatttgttttcttcgttacaagatgtagaagttaaatttttacttgcatgtttgtggagtgttatattacatgttaatacacattctcaattttttttcaaatatttcataaccatttaagtaacatataaagaacgaggggatatcccctcgagggattaaaatagtttcccgtttctgtgtacagttgcttgtattgatcgatcaaagtgcaatgaatttcgtttgaagaatggtgaagctcctataaaaattcatgattggtttggaatttggaaacatattgtacatatatatgaatgtgtttgtgtcgtgctgagatcatgatttttgttttttggcgaaagagagataatgaattatttgtacggagtatgtgatttgctatccatcatcatgacgtgtgcccttagaaatgtgaaggtgtacgtccttgctccgaagccaagtcatatgatgaaccatcgatctaagaccatattagttccactgggcactactaatgcttaataacgaggaaataagcaatatatttgttagccctctgaatttctgaaataagcaaaaatgcatcttatacagtaatttttttaattactggattttacatggatttttcttctaatgtaaaatgtcataaaagtttgttttttattgctagtaattagtggatgactcgattatttttctagattagcatactgctgttttagcaccaatcttgatgtcaattcaatgcaccacaaaccgacgtatttttaaggaaaaaactgtcgccactattttagcgtttccgtttgagaatagggttagcgaaatatgttaaaccaataggacgcgtgggagagctcagccctacaattaattttacaattaatttatcgaatatctcatatccctgccgtagaaaatagcaatgcctcagagtcacttgtgctatatactcactccagtttcatatttttttttgatgttttggataagattaagatcaaaattttctaactttgagtatcaataacttcaaaaatatatttaatttaaaggcactagaataacatatttgtcttataaactactacaataaaattaaaattatatttatttattgtacataatataataaaaaatagttaaagatatttattttagagactgtgttattatttaaaacgttaagaattatgaaactgaaggtaatatggccatgctaacactaaacacattgcaaattacaataggcttgcatggccaaggaacctttagctaatagctttctgaatggccaaggaacctttagacgagtaggttcgctcctacatgaattccacaacaccctccattcctccaataactagtagcttttggcggcatactggcatgatgatatccatcgttgatcatgatgtgtattctttattgactccccacttgtagtcattcatatgtgttattcttcatttctttccataaggcctgtttagttcacaccaaattcccctccaactctcaactttccatcacatcacatcacatttaaaactttcctacacacataaactcctaattttttttccaaactaccaatttttctcaaatttctccccaattttagaaactaaatacaccctaagagtatttgtaacactacatcatagactatagccatgcatgtagcgtccccttagagttgagggatgcagggcccacagcccttctgggcacatgtcagcctccagtactatacatacaatactagggatcttaattcagagttgagccttgttggtagaggacaacacacacaaagagcaagggggtgtcatgtctcgtgtggtcttagagggaatcagcatgccttgcagaggagacgaatgctttaatttagtgagattaggtggagagatcgagcatggctgagcataccatcacaaaatgagaaatgttgtgtagaacacatatttaatcatgatatgtgtcacagatgcaatgaaagaagaaaccgaaggcaagccaagttaaaagaagaacaaattaaatcgaacgcaaagacatgaaaaatcaaagacaagtaggagctcataggccaaatctagtaaggacatggttagatgcagtactacaacgccgattgcgagaagtgatggatgagaaaagttcacggtaaatcatgatgggtgatggaacttgtaaagggacgttctcacctaaactagcggttaacggtgtagccatttagggggcgtggagaaaaaacaatgacaacacgttgaagctagattgctttactactactactccatctattttatattataagatatttaattttttcttagccaaacttctttgaatttaactaagtttgtagaaaaaatatattaatatttttaatacaaaacaatatattaataaaatatagttaatattaaatttaatgtactaatttagtatgacagatattactattttttttataaatttgattaaataagtttgacaaaaaaaaaaagaaacggagggagtacttcacaatgccaactagagccgtgtttagttcacccccaactatcctcaactttcaactttccatcccatcacatcgcatctaaaactttcctacacataaactttcaacttttttttctaaaattttaacttttttcaaaaactaaacacaacctagctgtacagcaaaggttagcttgaaaggcaaaataatgtgtcgttttttaggcggggaatgtgtcgtgcccagaaacgtctttcatactgctgtctcacatgtgatctgtactccaaccgtgtccatcctgaattttgttgctactaaaactcgtaaactcggcagcaccggaatggccaagcaggacacgcatgacgcagcacgcccacgctgagagtcgtgcagtgcgcccaagcacgaatctcgagggtggtgcatagaagctccccgcccaatcaccgcccgccacgtcgcatccccgttccacacccttcccttcccttcccttcccttcgccaccgctttgcttcctcctctcctcctcctcgcttctgcttttatcccactcccactcttcctcgcccccaccccaaaaaccctagccgccgccaccgccgccgccgccgccgtttgctcgagcatgtactactactcgctgcgaggtggcgcgtgcgtctaccttgtggcggcgtgatacgatacgacgcgtgcggggggaagggaagccgaggtttgacttgagtggtgagccgggcatggaggagaggccatagatcgaagggaggcgcctccgccgccgaaggaagcggcggcggagaaggtggatggctccccgcaaccccagccccaggcggagctgcggctgcggctcccggcggagatcgactgggaccggctcgacaagtggaggttcttcgtcctcggcgccggcctcttctccgccgtctccaccgcgctctaccccgccgtcgtcctcaagacgcgcctccaggtcgccccctcgcccgcgcacgccgcggcgtcgtcgctcccgccctccgccgccgccgcggccaccgccatcctgcggagcgaggggcccctcgccttctaccgcggcttcgccacctccctcgcgggcaccgtcccggcgcgcgcgctctacatgggcgcgctcgaggccacgcgctcggccgtgggcccgacagcgctcgccctcggcgcgccagagcccgtggcttccgcggccgcgggcgccccggcggggctcgccgccgccgtggcggcgcaggtggtgtggacgcccgtcgacgtcatcagccagcgcctcatggtgcaggggaacccgtgcccggcctcccgctaccgcggcggcctcgacgccttccgcaagatcgtggccgccgacggcctccgcggcctgtaccgcggcttcggcatgtccatcctaacctatgcaccctccaatgccgtgtggtgggcgacctactcgctgtcgcagaagacgatttggagcggaattggttgctacctgtgcgagtacggtgttggtgtccaagaaatcgatgccggggaaggggattcctccctgcagccgggttacaagactgtcatggtggtgcagggagtgagcgcggcgatggccggtggcgcttccgcccttgtgaccatgccattggacaccatcaagaccaggatgcaggtcatggatggggaaggcggcgagccgattacggtggggaggacggtgaggaggctgatcaaggagggtggatggggagcgtgttacagggggctcggcccgaggtgggcgtcaatgtcgctgtctgccaccaccatgatcaccacgtacgagttcctcaagcggctctccgccaaggggcatgagagcagcctcccctgacgagacgaatagatgatgcaaataggtgaccttgctttgttactttcattcctttccaatgcttgtttcatcttttaggtgttgcaaagagttgtttgtagatagtctttgtttgctcctctaattaagctaagcaaatcaatgcaatccactctttcagaatgttttctgtgctatcaataggttttgccttttagcttctgaatcttcacaacggagtaattcatgtatactgaaaaattcctgtccatctatataaacggctggttctccatgctgcaatgttttactataagaaattaagaatcatgctcattgtattatagctacaacctaaacaagcgaggtgatttggaaattgtgatggcactgatgtggccactaacagtgttgcacgttaaatccttaactctgttgaataacagtattgcattagcgagtttctttaggatgacaaattgaattattcaatcaaatgatttgcaaagacgctgctttgttactgaatggtagagtaaacatgtttaatgttgccatccaaagctggagctgattctggtatagtggcatgggctattgttgcctattcgctgctctgcaaatccaacttgtcatgcaggcacctgttccatagtccataccactcttggatggacaaaagctcatttcattctcttttctctgtccctattctgaagccacaccaggaatctgaatacgttgagtggcacacatacagactaggatacagtactaacttacacagatgcttttgtgcagtaagttgcaagtgatctctattccacacatagcaatgaacaataggcacaaggtatgcatggattggattggtagaggtgttctcatacgccctagtgcattgctgctcctggaaacatggaagatctgctcatcctttttcaatgttctcccatttgatgttttatgccttttctgatttgataagtatgctaaagttagtgtggctgaggaagtcttttcttcgaattaataaatactcgcagttgatgctgttccaactaaatgcattcttgcccgtcctagtttaatgttgattaggaattagtacaagcaaatctcccattttaataattataaacttttgcccatgatagtgaggcgtgtgtttatccattgtttatgctatcattatcttgatgatgggtaggcagaaaattaggtagccttctttcctattaccctgtttcttaattgttgctttgatttggatgagttcctctcttggttcctccacttctactcaagtctactactccactccgtactacatatcagaggatactcttggacttagattggtaccgctgccttatcttcatctgctatcaggaatagtaggatatgccttatgtttctgtatgttttgattagttgattaccacagtgccccaactctgtaatcctccaaatggtgcttttgtatatggtaccgaaccaaaatcttttgcttgacgaaaatgtgtggttgttggctaatgaaaacggctttgatagaggataatcccactactactttaaccatccttgctgagtgaggattagcctacccaaagtgattcgcctgctgagtgctgacctagattaggacatgaaatgtcagtacttaattagtactactactacaaccactatgagccgttcaatggattccaatgtccctttgtccactgtccgtgcaattatggtataggcatttggcttacctatgcttgattctgacaactgattagcgtaaggtagaggtcttattagcaccagctaagcttggcttgttcatgcacaagccctttccttttcatatcttttctggatcaaagcaagatgagtttagttctgagctgacaatactacaatcactgggtttcagaccacagaaaatttttttcaggaaacattgtgcttgcttccatcagtgatcagtcaccatgattagcaccaggaagaagccgataatagggtctccgactccagctccagatgtgcgtgacatggacgtattgctatctgctgctttgccttttttttctcactactttttgttcactcgcgtagccatcaatacatcacgaagtggttgcgagccactggagtgccaacttgctttctttatctgttggccaagccacactgagcttgtgcaattggtcagtttattaaagagaaaatttgcatatggccgatatgatattttgtactattgtaataccattgtctagctaccatctaaaaacttgcgtttggtgggcatgacatttcaatattccatatttcacataagctcgtgaaatgggacaaaaaccaatttcaatttactgatgaagagaaaaaaataccaagtactggtgtatggaacttggaagaaacacttttggttttgcaaactacaggttcagggaatatggaatttctaattattatttttctaggctaatcactctacgatagtcttgagttcctcaacaaaagcttcctgtccaaagcaaaagccaaaaccatgaaaaagaacatgtgaatttgccacaacaagagcctaaggttagtagtaacaaagctttaaaattaagctcacatgcatgcacaatcagtatcaactgagacggctgctgctgcccgcaaagggcgtactgttagtgccaaatgtacaactctggattcattgttcgttgaagaaccacttgtgtgtgtcgcgaggacaagttctttttttcatctcagagatactgttcatgtatcctcgctcggttttcttcccaccatagcctggcatgcatctcgctgaacctctctcggctgcaagcaagagagaataattaagtctctttccatgatcatctgctagtagctagcaattcagttgcttccaaattcttcgatcatggagattcaagcaattagcattaggctgttcttgaaatcagattactgaccttttctactttgtcaatttacggattaccaacaagacaatcctatttacaaagaaagacgttacaagaaggatgggagacaaacctgaatcgaacacgccggagttctctgataccaccaggcaaagcccggatggtaatatatacaccaggctcgtcttcctcgacccactcccgctcttggtcacttgcattgctgatggacaccgagagctcaccagatctgtcgacctcttcaggagatgagctcgtcctcattgatgcgtccattgacgaggtttctgtcttggctccacttatacttgacagcttcggtgttgagaccagccccactgaatcatagcactggtgtccatggtggtggtggccaccattacagtagtggtttgaatgatgctcaagagaatctgatgaagatgaacccactgcaccaccacctgacaatggtctatggaacgaacgaggtaaccgttccttccccagtggtggtgtcaccgggctgtcctcctttgagctctgtaggaaaagaaaaaatagacatggaatcatgtcaaagtcacattactaactgcaataactagaatggtaacttgggggagtgctagtgtcgtcacctcgtcttcagattttggagtagcaggaagaggaacagcttgatggttaaatctctgtacattgtaaagctccataactttgtcataattttcagcccaccatctttgtgcttgccacttgttgaacatctcacggctataataaaacaattttattcaccaaacagaatcagcaaggtaatgttacagctacaaacaatttatatatgatttttttttcagatatgataagaaagcattcatacgcaaatatagattgccttgcttacatttggattcacatactaattagttatacattatctcatttagactagtttcctgcaagccacgctattatacgaagtaaataaatgatgatgtatattgtgaggactgatgacattctgtgcgcataatcaaacaatgagttaagagataaacagcatggcataacttaaaactactaaagtacatgatcagtcaacaagtagctggaaggttaaaattgtacgaaaatcaaatcagagaaatttatacacaatcagcctacaacatacatcaacgaaacaatgattaccatgaccacttgcattagtttcaccaagaacttatgcagagaataatttacaaggaacgagctttgaatggcctgaatagaaaaaggaagatgatatttaaaaatcaattaggtgaatcagatgaattcattttcaatagtacagtccaaaatcgatgacattccacgcttcagttttctggctcataatcatgatttaagcctgccttacagtttcctaagttacatcttgctctacagatttctaattggtcatgtataatttacttggtactgtggtgactatgacagattcaactcagactaatagttgcaacagaaatccgcaatcaactgcacaagtggctatgcccaagaggtaaattggtagtctaaaagcacattaatcaactgaccaaacgtctatgacaacattagcagccaaaccaatgttaccaaacccaaccatggatccactcattaacaaattttaaaatgtccctacttgccttagatctagaactaataataaagtaaataacaagaacactgcactcatcttaagatccagcttgtgttccatcaataaagtagtattctatatctaataccagtgggggctgatcaacgtagctggccatgaggaactccctccaagaatattattttaacagtataccctgcttatagacaaatcttaaaacaaccattctaaactcaatctgaacactacaaatttataatgggcatattttcacatgcacaattttcttttatagtgtccagattaagtctgcagtggtagtttttaagatctcattacaagtgcagcagcataagaaccaaaagtccatccattaggaaagctgctgctaatcagaggtccaggttggatggttcccctgataagccggtgtggagggaccctattacatattaataagaccagaagcctccaaccatttctcaataacaaacggccaaagaagagagagcagaagaagttacgcttctttgtgccattgctctctttccatatagcttctttattgactacctagatgagatgtggcttgtgggcctttgctgtctctatcccatgctaatactacctcttcctggagcagaagcagcccctaaagcaaatgaatgatatagataaagtacaaatgtgtgagctggacttgcccccacatagtactggtaaatttaaagtttcatagagcctgttgtttactagatcttctagccctataaaccctccagggtgaacaactgacatgatcccctaactttaataatgtatggcttaaaattctgagtctactaactggacataacatgcatgctgacacatcaggatttcgacctggctgcagcacatcaggggttaaatcttaaatgaggtccattgtcatagagttgacaatcaaggtatcactttctaatgtaatctccattaaccctacaccagattgttcccattatgagcataaccagccgtaaaatctaaaataataagggatttactatttagcgaatacgtaacggctatgaggttgcataggagtgagggaaaaagtgaagttaatatacagggtagcatatccaatggtacgggtgtgctttttatccaccctcgagtaaaaataggattccagttaagtaagaaattggggtgtacaagaattttaaaactcacacccctccatccagtgtttaaaattgacttacggcaatcagtataagctacctcttaatgaaattttccttttcaatagataaaacaaataatacaaatagaatgccacaaagtgtgaccagtagtaaactagaccacgaaaaattattgcaaaaggtaaagaaggaatagcaatgttgacagagcaatcggaaaaaaaaaactaaaacatggctagttgaagtatgaagatttaacaatctattgtgctgttctccataaattgccagtgccccgaggcaatgatcaatgaaaatttactacctcatccataggggcttgggagaaattactgcctcatccataggggcttgtttgattttaactggctatcaaaagtcaaaactactcgcttttgtccagtttgcttcttgactaaagaagcaggttcagaacaaagctcctaagcatgacatttcgcccccatttacaccgcaaagttactatctcaattcaatatactttgatctaatttatatttagcacgaccagaattcaatcattcatacgagcgcaaactaaactttcaatcatatatgctaaggactaatgcaaataagtagaattttcagtctttcactgatcaaagaaccgagttatgcactggaaatgcagaatttagctcgagcatgctcaagaacacacctgaaccggatgcgtttgaggtcgttgccgccctgtggcagcgagacgaaggttatcagcacgccgggctccacctgcgccacccactccttcgcgtcctcctccttgccgccgccgccgccgccggttgacaccatctcgtcgtcgtcgtcttcctcctcatcctcctcgtcgccgatggggaagtcggagcgggcgctcatggacggcgtagcgtccccgctcgacagcgcgccgccgccgccgccgccgcggaagcgcggcgtcgaggccgccgagctcgtggcgcggcggtacgcgtagtggaaccggtcggagcccgaggccgcgtcggggtcgccgaagccgccgccgccgccgcggtggtggtacgggtggtgccggcgcgaggcccccgccgccgacgacgagccggcgcagggcttgcagtgccggtacgcgcccgacgccttcaacgcaatgtccttgatctgaaacgaaaccccaaaacaaaaacctcccgtcaaaatcaagcccgatctggttgattacgacctacccgaaccaaagattcaaacattcaaagagcttgaacatcccaaaaaaaaattatataccacgatcaaaacgaagcaaaatctgaacagaaaagcaggaacccttcagaaccaaaaccatcatcttctcttttcttttctttttcattgaattaatcaacaggataagaaaagaagagcttcaagcacacacagtgacagtctcgactctcgagagtgaagtaccgagaaccccacctgcgcagtgagcgccttgatggccagccgcgtgctgggcgtcgccccgccgccgccgccgccgccatcgacggcgtcctcgtcctccggcggctcgtgcagcggctccccgccgccgccgccgggctgcttcgagcacgcgatgcacgtgagcatcccctccgcctctccggtgacagcaacagcaaggtcacaggtggcagagccgcccgggcgagcgccgcgcgtgagcttataatggcaggggagggaggcggcggagccgtactactcctacgcctcttcttcctcctctgatatcgagcttggagttaagggcattaaaggcggattaggatctggtgcttaatggcaggaagaggcggaggagcccaattggggggggggggggggggggtttatttatgagcggcgcagcggctgctcacagacgttactgctgcctccattaaacagcggtcgatcgatccatcgatgcagagttctctgacacatctcatctcggatgcgtggtggggctcacgtgcgcgcccgtgtggactgtcaaacaggaagttgtgtgcgggttgtgacagtaagaaacctttttgtgtttgcaggtctcttgcacgttagtgaaaaaggaaagaggaagggagagaaattggtggtggtactagattttggtttatatggattgagtcactgtaacaatatttatctccttttggagaagtagatcctctaatgtgatcatagacatgtggttatgtggatgatagggttcacgtgttaacgatcacgtctctccgatatgagaatgtcactgcatccccatccatttcatgtttggcctaataacgtgaaagaaaatagagataacgatgaagaggatgattctagcaaaggcaaaacttgaagatagcatcttcgttgctgcacacatctctaacatctttgctgctaagcacgtaataatcgcacggtttatcatggtttttaaaaaccgcacgtaataatcgcacggttccgatggaatagttaatatggagtagaagcatcagccgccccgtaaacttcagaaatactactccagtccggagacggcctaccgggcggctggccaccgcaactctgacgtctcgaccaacaggattccttcggcaacgtccctaactcccaagcggccaagccctcaatcttacgaccttttttcttttatctcgtatcccgtgtgcccgccgcccgcgcgtgggtggtcgtcctccatgctcatcccatcatcagccccgtgcgcccgcgcgcccgccgtccgcgcacgcaccgtgtcgccgccgactcacactacccgtcgccgcggcagcgcggcagccagccgtcacgcacgctaccggccatcggccccctcgaaaaccgaccgaaataacgcgcgtcgcgtggtcgcagcccacagctaagcgcgcgcggctccgccgcgcggccccatcgcctcgtctcgcccacacgcggctgacaccgtaatcctggccctttttcctggccgcgcgcgcgcacgcacgcacacggtgggaggcgaatgatcgacggcgggcacatgcgcgcgggccgggaggcggctcgtgccaacagcagggtgggctcggtctgtctcccctccccagcttgcgcttgatcaggagcagcggctgccgctgctctagtggtgacaaactgatgctccaagcgatcatcgctaatgatagcgctccaaagctacacgctgtgagttgttaacgggttcttttccgggtggggttaggtcgctgattgaaggctaatgcagctctaacaactatgctcattgctcgctgcctttctcgtcttatttggaaattattttttcgctcatcttgtctgcggctaggcgtgcacgcagacttcttaactaaaagagtgatactgcgacactgcgcgtgtttgaattattgattggaacgaaggtcatcgatcgattgatccaacgaaaaggagagtttggtccgttctggagtagtagtttttagctgggcatgtaccgtgtgcaggcaactttggagttgtggaggattcggcccatcatcgcatgagcacagccgccgaaaggccgaaacaaacatcgctagtctttgggctgaatttctctcctgtctggattagccatgatggcagcgctctctcagtctctcgttctctctctcgatctcgacatgctacgattaatctaccagttaattaatgaaactatacgattaatctactagaagaaaatgctctagtttgattttttttcctttctggaaagaagacataatgccctgaaagacttttcttttttcataaaaactctttcatgtaaccatattcgagtaactagtatattctagtcaaaatgtcggggagatcatccattccaaacttctagtactagaagaaaagctaaacattataggcaaaataaaatatgacttagcaattagtaatcctcaagcaaatagaataatagataacatgtctaacacaaactatttacatatattcatttagacagcaacctgatcacgccaaaccacacatttccagaaggttgcttacccataccacacatttttagcgaggatgaaatatccaggaaactatcagaaatgtgaccaaatactgcgtcataaaaaagaatctgcaggcagataaatggaaacgaaaaaaaacttccatcagctcaattgtaaaaagaacttattccagacagtggtgtcagtgttcccctaaaataacctaatcatgttggaactaggatcaatgctacaaggccggcccactgccgacgcctttgtaaatgcagacatgctaacacttaacacctttcccgtgtggaacaggcaacaacttaaaaaaaaaaagaaaggtctttttcacgtcgcaaccatggcttcaaattttgctccctagaaaacgatttgtgtacagtgcatgacagggacagccaagatatgagcattaaaatgtggaatcgactggctcacaaatcgtgtttatgctctgaaactgtcaataaaatcacgaaaattttcaggctaataatgtaacgtcagtgcttaggagaaaaaactactgtacttttcgggtcagattctttcgctgacggaatcgccattattatttcccccaagccaaccaacgctgcccccaccgcctctgactgacaacctggccccacgaccccagtcaccccatccgatcccaggtcccccctgtcccctgcaccgagtctttctgcaccgccccctcactttccacctccgggcccacacgacagtaacccaggggacccacgtgcaccgggttcacgggccccggtcgagacccccggtgcgccggtggcattcgaggaggctagcctctctctcctccccgacctcacaagcgcgaaccccgcggagccgccacctctctcgcctccccgcctccgccgcgccgcctagggtttccaccgcccccgggatgcgcgcgccccctcgccggtagcctcccccccggttcccgccgcctccgccgccgccatgtcgctgctgcggcgccggaagcagccgcagccgccgccggagcagccgaacgaggacagcagcaacggctccgacctcgacgagaaggggaagaagaagccgggatcgtcgtcctcctcggcggcgcctcctccggaggcggcggcggcggcggcgaaggaggcgacgaagcggacgagggccaggtggtcgtgcgtggacagctgctgctggctggtggggtgcgtgtgctcggcgtggtggctgctgctcttcctgtacaacgcgatgccggcgtcgttcccgcagtacgtcacggaggcgatcacggggccgctcccggaccctcccggggtcaagctgcagaaggaggggctgcgggcgaagcaccccgtcgtgttcgtcccgggcatcgtcaccggcggcctcgagctctgggaggggcaccagtgcgccgaggggctcttccgcaagcgcctctggggcggcacgttcggcgacgtgtacaagaggttgccttccctctcctccgcctcttctctctctctctctctccccctcaatctgtctctcttgaattaccacgatcatttagtgcccgtaaaaattaatttatgcaagtaacgttggaggttttttatccgagttatggagcattgatctttagttagtttgtcattggttgtgtctatatcggtttagatgttgctttcatcattcgtgctctactttctgcttttgtttgttcgtcagtgttagttttagaaatttaatgctgtgatgctttaatttgagaagtgtctgttacttttttgggtgcctttgttgtgtgacttgtgatttacgatttcgggaatgagattagcttatttcaatcattcttggttgcaaaatactacactttctaagtgttacttttaagtgttgtatttcgtaatatctttgagctgaggaataagtatttgtcccaattttgttgaaatatgactatgttgaatgagttgggtgctaaatacaaagaatgagtattcatcttcctggtcagctttgtactaattgcttgagatatctcaaattttctcgaccaagaaaaaaattgaaatgttggcgtagctgtttctttcatagtttcatttgtcttcaaatgttgtaaataatcagtatcaggaaagtaggatggtgaataggcaagaggtaaacttgtgaaactggatcatattcttgcttttctttcaccatttgatttcactgtttactattaccagcaaactcaaagtggtgatgatttgaccagatatagaaacagaattgatcaagagaaacaatatgcttctatattgcgtgctttcagggtttttagaagagaactgcaatttgcatgaaaaaaagaacttttggtatggtttcttacaggcacgccttataggtttcaactgagggaatctgactgttccgttatttaattattcttttcttgaaagacccatgttgcctactgtctgttgaacaacttgggatttctgaacaattttcctcctagtccttgcttctaagccttgtgttgttgagctagagctgtccatgtatatatattgacagttagtgaagttgataatttacatattaaaaacaagacctaaatgtttatactttacggcgtagcttcggcctaaaagaatccatacaaagaatagacaatataggacaacacactgcaatatttagcgtaataacacgacttgactccttcatgtggtattacttttgtaattattttttattgtcataacagcaattttcgttgctttgatgtttttgttgatggttacaaaactacaatgatatatgggtaagtgattatgcatcatggtgtgtttaccttgtttgatacagtattacagtcaccagtacagcctgttaattctgaagattgtttcttttagatttttagtttgtctttccgcagcccgtttctcaagaaaacctctagctaggaatggcatgtctcattgttaggcttgcatgctaggcctaattgaagtgtcccttggccaaagtggtgtgattatgccatcgtgatagtcgcaccacaaggacgaggagagaagggagaaataagtacttttgtttatttcttgcttgccggtaatgatcacagtagactcatagtgggccttttttcctaatatatatagatatcgatttggttaataccctgtctagctaagagataatataccaaataaccagatagacatattcctaagtaataaatatgtccctaatccttgcatggtgatcacttaaacatggtacattaacaccaaccttaggaaggcatgattactattctattgctccatcacatgggccttaataggttgcacacggcattgattagttcactgttgctctttatgtttcatcctttagtcattgaaccattgttctttagtctagaagttgggatgccataatgacctattcttcttttgttagtgtaatgcacttttgctacgtgtgctgcacactaatacttgggctgcgtatactcccactttctcattagttctcttgaaatattttcaggcctttatgctgggttgaacatatgtcactggacaatgaaactggattagataaaccaggaataagagttcggccagtcacaggcctagtggcagcagactattttgttcctgggtattttgtttgggctgttttgattgcaaatttagctcgtattggatatgaagaaaagaccatgtacatggctgcatatgattggaggttatctttccagaacactgaggtagccatatttaatgcacttagatacatggatttcctttgatgcttggctatgttctcctcagaggtttagactgagttaaatgatgcttgtctgtaatgtaaattaccacctgcaggttcgtgatcaaactttgagcaggataaaaagtaacattgaactcctggtagcaactaatggtggaaatagggtggtggtgatcccacattctatgggggttctctattttctgcattttatgaagtgggttgaggctcctcctcccatgggtggtggtggtggtccaaattggtgtgcaaagcacatcaaatctgtaatgaatattggcggacctttcttaggagttcctaaggctgttgcaggacttttctcatctgaagccaaagatgttgctgttgctaggtaattgaaatcaaaagtctgcaattctactgtacaattgttagtattatttgaggttttactatgttgaaaccaaattagttcataatgcagttgtttataggattacgtacttgtcaattcaatttataactgttatgtgtaacaacatcctctagcttgaatataagtttgattaatgctctgaggactatcagttcacaacaggatttggcacctctgcttgtggcaatccagttacctaaccaatggagtattttttttctcaaaccttagtcacatatataatttgcttggtatcatcggaaaatctcagagttggaaaataccattatacgtgtcactgacatgtgggtcccacatgtcattgtcacatactccatccgtaccataagaaaccaacctagtaccggatgtgacatatcctattactacgaatttggacatatatatgtccagattcatagtcatagaatgtgtcacatcctatcctagattcattttttatgggacagagggagtacgatggtattttgcaactcatgtatctccacgatggtatcttttaaattttctccatataattattatataactgtgctaataaaagaattttagtcagtactgaagttgtcaatactgtatacactactctaggtactgtacgatttgattataggtcaatacctatgatctgtgataaagtttgtgggaaccattgaattacttgatttagcttaaaaatgccattgcataaatcctttcggtaattgtgtaactatcttcttgatactttattgaaggtgaaatataaagaaaacatgataccgttttcaatatatcaatgaaatgatagatgatagaactaggcaccttcttaatgctaataattatgcttgagattgagaaataagtaactgtcgaaaatgctaatatagagatgtaacactattacaatgtgccatctgaaatattgtccttagttcaagattagagttgtaaaaccattacttgtagtaatatttacttctctggtttcacttgaactataaattttttgctgtgta

SEQ ID NO: 7499 - DNA, 11174 bp, Oryza sativa
gatccccctcttgttgttatctagctggtagtgaaagagttgataagtctgaggttgtaggagacaggctgaaggaagcacagtacataaacaagtcactttcagcattaggagatgtgattgcatctcttgcacagaaaaattcgcatgtcccttaccgaaacagcaagcttacccagcttttgcaagattctctaggtactatctgaagttaatatgctaacttttcactcaattactacatatattcatagggtaactattttattccaatgtcaggaggacaagcaaaaacgctgatgtttgttcacgtaagcccggaactagatgctgtcggtgagacaataagcacattgaaatttgctgaaagggttgcttcagttgagcttggtgcagcaaaagcaaacaaagaaggcagtgaggttagagagctcaaagaacaggtgttcacttaactcctgattgctcatttatataaactatctagatgtggtacttctgtttagatttatataatcatcgtttttctctgctcttgtttcagattgctaccctcaaggcggcattggctaaaaaggaaggagaaccagaaaacattcaaagcacacagtcaagccctgacatgtatagaattaaaagaggcaatgcaatacctgccttccctaaaaatagacagccaatggaagaagttggaaacttagaggtattaactgctctttcacacaagatcaactctttttcttggaaatcacaaaaatatttccttttcacattgaagtttttttgtgagtgctagttatgattccaatcaatgtcaaataggaaaataacctaccaaacattctaaatggagatgggctatttatgcatttgtacataagtttagagtcattttgtcaataatctgaacaactctaaaactgaccaaagggtagttcatggtcttattgagagtacttatgtttaccttcagtagatttatgcatttgtacatcaagttcagaatcattttgtgaatgatctggacaacactaaaactgacgaaagcgtagttcatggtcttgttgagagtacttatgttaccttcagtagattattattccttttaatcttttcacaagaaaggtaatgatgttcatttaatgaatattatatttctttatgtaaaaggtccggaacaatgccactccaatgcaaaagaaggccagctttcaattttctggtgtcctcagtgagaacaactcatccgacttggctgaaaattgcaatggcattcagaagaccgatagaatggctgtcggtaataatcaatttgagaatggaaattccattctagagctggagcctggcgcaactcagcttccaacatttttctaccaaagatatgatcccgacaagcaaaggcgtagggctgaaccagtagaaactgatgactcagatagctttgatgctgctactagctcgccttccgaccaagaaatgttgttgtccaccagtggcctcaaagctgatggtattgccagcagaggtgcctttattataaagaaacctcaaacaaagaatacgaaaattacagcaacgaagtaagtccaatttaaatcctgtattttccatgaaaattgtgtgcattggattgctttaacctgttgtgctgctttgaatttactcaggattccaaatcttgcaatgaagtcgccaatgtcagagaaaaggctgcaaaccccaatcaggaacagcaagcagctacctttcagcactacgggtggaagaagaactcgaaatggcaaaattaacactccaaaataatcgactagtgcgaaggtggatcccactatgccaaggtgagatcaataggaaactgaaagaaggatgtttctaaaaccctgtataaggatcagtggattgttcagtctgatggaaaaatggttttgagacatcaaagatagagataaacagataagacctccaacaggacagagaaattgtaaacccagaaggaatttttcaaatttgagatcagtacatagctcacacgcagaagttacggttgtattgtatgtacattagcctggaatagatgcccgccatgtgccattacaacaaagagaagttcaatgacaagtttgtacgcttcatcatgttaattgtcaaatttaggccaattacaatttttttaccattgcatcatagatgtgaactttcttaaaaggaaatttctctcaaggatcattaggtgcaaaaaaggaatacattacatggtctttttgtttacatggttctaaattcagagataacaaagaggtcagaatcctctgctgggaaatactaacactaaatgaagtacaagcaggctctactatgtacagattacatacacctaactttttgacaaaatcattagtttcagttgaccagatgtctctagaacttctgcatcaacaccaagatcgatctttaatctaaattttttacaacctgttttcaccaggctcatactattgggacaagccttggccttgctggggggcgatgcgaagcctttctcgaggctctggagagcctacccacagatgccagcttcagcgctgccctgatcttgacccacttgcgtggggacaatggcaccgcaactctttcgttgctagaaaactgagaaatgaaattctgtatgagctgatcacatgagctggagtcaaagctgtttgttcttgatggctggaatggagcggcaatttgctgtgaggtttggtcattgcttgataggttgagcaggttactgaaattctcgcctgcagatgccatccttagtaattagcatcaagatgaatgaatcagatgtagccaaaaaaaaatcagcatagagtaattactgttgcttggaggcactaagtgaggttgcatcaaagccacaacttcatctgtatggaggaaattatctggagaaaagcgctgtcaacacaaatacagaatggattagttctgttgaatgaagagcacaagtaatgtcaaatttttactcttcgatttctatctagacaaaatacatagatttttacataaaaaaaggttcttaccttgtatgattcttcaggtgaatgagatcgctcattatgtgcatactggccaattcgtgtggcagcatgatcagcctggatgctgctatgagcgtttggattaaaatatgttttttcggtattaggtatacacagaggagtgattcttggtctgggtatgaatgttccttgatttgaatgatgtgggataaaattgcccatgcccaactgttggctaaactgcacgttggaggtttgaccctgcacaaatcttgacatatccactgaagcctgctagaaaattgatgaaactatcttagactaacatgcatatgtattttattatgtactgtattttgtatatttcaaaatatcttccttacattagaggcttcttggaatgaagaaaagttctccgttgattcaaatggttgaccagccagggctgaattgtattgacctgtaaacaattggaatagatgaccaaaaatccccaaaaaagtaattatcgctagtgattgaaattctcagaacaagatattaccacaagttgggatctgctgtttaggaataaagtcagtcaacatagaagttcccccacaatggaacctatgaagcggtacaggatagttgttgaccatcttatggtcatactgaataccacttatattcgcataagccaattgcttcattgtttcaactgcactctgtgaacaaaaaacaccaaattattaggaaaatagtgagaaaatctcctgttgaaggaagtgaggaaacagtacctgctctatttcgtcgagctcatttatgggcttgtaagaatcaccaaacttcaccccaacaagctgatatattgcatcgaagaaaagtcccacgttgttgcccttcacttcatacaagcaaagatcgtcaccgacttcacatgtcatggcatggcttatgatggttttccaagctgcctgtgacatcttgctaaaagtctatagacaaatatcaaagatcttctgtcagtcactttttttagggaattcggtgagtctatttttttctcttttgaaaccaacggctcatctatattatcaggtccttgtgttatggaaacatcatctgaaatttaatatttaaggaaattcatagaacctctacctgaaaaagcttcttttcgtccgtaaaatatgattgtaagaacttctgtacagtatcaactccactgtttgtcaaggcctggtggtgagctccattgcggccgatcttttccaaacgccaaacttcgtcatccaacattggcgggtagtgcttttcaaatcctgcaaaaatagtaagttgcatattattagtctcagctataaggtccaaaagacatttctgaagaaacaaacaatctgaatcttagggacaatggcataccctccaccctacgctcctttacacgaaaaggttcagtgattccttcaagaaccctatcttcagaattgttggctagcctcaaacccagcctgaacttcttagtgctagtgaagctagagttatcagtgaaggttgcattctcaagtaatgcttcccctccattgagcttcagtgtcagatttccggtgagaagttgtgcgcttttctctcgcccgcatactatctgcttgctgaagtcttcaggggtccattgttcctcatttttagcattaaagttgccgtggaggactacaacttcaaccttagcagaagcaagatgaccgaacctgacgatgcgcatctgattgttttcgagtctttcgactatagccaccttaagacccggtccatccttggcttctaatttcatcagtgtgtaaacaggctttagttcattcaggaacacgagttgataccttggacgctgctgattcaatcctgctagcagtctgcagatgaaagaaccaaattaagtatgttagagcagaaagaaactaaacatcaaattttttttattacatgtgaaatttagtaatcataataaatgaaagctagtatatgtctcaagcctcaccttggaggcgctggtgtgctgacttgtctgaaaattgctttctctacttcttctgaaacctgaaaaaagcacaaatttcaggtcagcggacagggagcacttctaaattctaatatccaagttgaaatcaacaacaatgtccgcatgtctcttcttttattgggatgaacttatcaatctaacatatctttgctctgaatgttgcacaaaatcgataatatatctcaaaattggtagatgcatgtgtaaattgcaccaatttggggtaaaaaaaaacttgcaaaagaaggaaagggaaaagggtttttaaaattggggctatttgtgttattcttgaagccgctaagccttttagagcccgtccccccccagggcgaactttgggcaacaaggggggctaaaaataaagggacgggactttttttaaagaaatttaagaaaaattgaggggtttaaagtagagtatggaatgagaaatccattgaccactattactgaagccatgcttggccaaagataggggaaggaaacatggcccatgaactcctcccccatcatctccctgaacccgaacaccccctccatgctcctcttcctcctcaccccgagccccctgcaaccaaccaaagaacaaaaaaaacacaaattcatgagcaaccaaaccatctctgaacccaaccaagaacgcagggttgactcggccgttgactcacaggacaagcgcccgccaccgcctgcgagggcgggacagctcgccgccggcgccggcgccgtcgtcgtcgtcggaggaggaccaggagaggagactcgtggaaggagccatcggtggaggaaacaatggaggagaggcatggttgcggggtgatatagaggagaagagaatgggagggaaagctcctggaacgagctgggaatgttcgcttgagctcacattttgttactgtgttcgcgagcgagtgcacaagtggagtgtttttgagtaatccatgacgtgttttgagtaatctatgactctgttggctcgtaattgtcgattggttttgggtttgatcccttcttttgtggcaatgggtttttgcacttttttttctttttcagtttgagatgttaaaagtacactttagatagcataaacttttattttgcatatttgtgctcatttaaaagaagacagttgtggtggactccgcctactcttattacagtaagtttttacaaattaccccttgaactccttaatattaaaaggatccaatctaaatggatagccacataaaattagattaagatgaatatttcgtttagaaaaagatgggtaacacattaatacattttctttaatccatagcaaagcaccgtcatttagctagtatatatatatacacgcacagatactcattcactacgataggttagatactcattcactacgataggttgtttatgaatgttactctatccgtttttaaatatatatggtgttgacttttattgtggtagcatttgattattcacaatgtgaaaacatttagtgcatgataaaagtcgtattcaaagtacatttaacaataataaaatataagtgacaataaaatgaagaaattatacttttatgtttctcttaataaaacaaatggtcaaagccatatctaaaagcaaacggcatcatatatttaaaaacataagcaatatatatatatcatttttaagaataaaaactttatattattggcgtctaacagaccatatatcgctagtagaaatgcttctcgaaatctttagctcactaaataaaccagtgttgatgtctataatttctccctctataaaaaaaatgaaattctaagaacgaatctggataaacacatttgtacattcgtttttataagttgaatttttttcttttacggagggtgtactctttataataccaccacttaccagcaactacttcgcttaaaagcttgaggtgttttgcagaagaatggttcgaatttcaaaacttttgctcttgtccgttctattgatgcatgtccacttcatctaggctgcagtctacaaaaaaggaagaagaggcgaagctgcagcctgcagaaaatggagagaacgatttacgtcgactgacgactacgacagcggtgatgatctggccggccttgtgattgactttggattttggattactgtatgtgtcgtctcgtgggcttgatttgttcctcgtttagtcccctaatttgaagttgaagttgacaaatcgcgttcacagcgctcaaaccaaccatgcacgtacgcaagcaagtgttcatatgcaactgcacttatgtcgtcaaacttttagattatattgcacttttagattaactgcactgtgctatatggttttcttttttttagattatcttgtaattcctccgtttcacaatgtaagactttctagcattatccacatttatatagatgttaatgaatctatatatataataatgtctagattcattagcatctatatgaatgtaggcaatgttagaaagtcttacattatgaaacggagagagtagttgtatgagagacatgatgtatgttttggcgaaattttgataaatgttatccttttagaaaatttatttgaagggtaaaccgtgccagaaattattttaaaaataaaccatacctcagcaccatcgggattagcgatgaggtccaacggcatagtgctaacgatcatggcgctaagcgctgccaccttggcagggccgtatgcaaggttggataggatcatttcatattatgaaaagatatagcgcaagatataaatcacatttaaagtacctttaacaattattaaaaattcaagtaacaataaaataaataagtgatagttatattttttaatatggcaaagggtcaaagtcatatctgaaaattaataatatcgtatatttaaaagcagaagtagtgtatatctatcttaaaaaaaacttgatgctaatggtgcctcagaaagcacataaatatccgtcgtagaaatgcttctcaaaatctgtagcttctcaaataaaaccaatattgatgtccaaaactgcattttataataatctctacatgccaaccaaataattcacttaaaaaggttgagatgttttactctagactagttagaatttcgaaagttctgcacttgtccgttctattgatgcatatccacttcaccttaggatgcagagcataggaagaagaggcgaagctgcagcctgcagaaagtgcagagaacgatttatacgtcgactaccgacgacgacgacggtgactacgtccttgccggcttatgatttgactttggattttggattagtgtcttgtcgtcggcttgatttgttcctcgttttaattagtcccttaatttgaagttgaagttgataaaatcgaattcacagcgcgcatagcaataaccacgtttatactgaagaaagtgttcatatgtatgtgcaattctgtcgtcaaacttttaatcttttagatcatcttgtacttgtcttgaatagttagttgtatgagagaattgggagagatgatgtgttttggtgcgctctcgtactagcattttgatagtggtagaaacaattaattccatttttaggcctttttccaaattaagactttatatagcttcggatttgtctcctctcatgatccggacagtttcctatgagcaagttaggcttggattatcgtaatttcaagttctcaagtaccctaaatgagtgttccaatattagtgcaacactagttgaagtgtcacttcttcattttatagagcattttcatctcttttcttttcttttctttttatttcttttttttttttggaaaagctcttagctctgagatcaattactcatcatatgtaatatactcatggtgggaattttcccggaagaatctaagtgtaagtattattttatcggtgaagggggatccatcttattatatatctattcggagttttcatggaagattctgttaactgtaaactgtcatggaggtgagcagggcagttgatgagatctctgtcgcctgctgattggctgtgtttagatccaaagtttggatgcaaacttcagtacttttccatcacatcaacctgtcatacacacacaacttttcagtcacatcatctccaattccaaccaaaatctaaactttggatccaactaaacacagcctgagtgaggccagttgttcggcagaaacctctgaactttcctgaatggttcttcacttcacaagcatactagttgtagttcttataacagcttaaaagtcaacgtcatgtattctatgcctttgttggaaaaaaagttaattattagcgtatgattaagaaaattagtcattcaccaatgattaattaattattaattatttaaaattaaaaaataaattaatatagttttctaaaggaacttctctaaagaaaattttttttaaaagaaacatatcgtttagcagttcgagaaacatgtgcgcggaaaacaaggaagttttcttccctttctcggaacgaacacagtctgtgttcggcataagctggtcgagaggaaaggtaccccagtttttgcatacttcccgaatggtttaattgtgtgtttttaaaaaaaattatatatgaaagtttctttaaaaatcatattactctattttttaaatttaaaataattaatactcaattaatcgtatgctaatggttcaccttattttgtgtatcttctcaatcagcttctctcaaacatttgcttaagaaagtggggaatgacaactcgcagttgcctcaaatatgacaccgctctagtacatcaatgaactctcgaagttatatataaataacattttcaatatacgatgagttgtatgtgaatggattagaaaactggggtggttcaaagtgacacaaaagataaaagatatgtttacctagtccaaagtgaaaaatgttaggtaaaggatggttcaaacggaaaaattttctgtttataaatataaatgtgtgtgtttttatttggtgcagagtctaaaacgttgtacttcaatcgttaaaataaaagataaatgagtcgtaccgtgaagccattagctgtaaccctacgccaactagtcaaccctagtggtctttagggggaaaaaaaatcgaagatccataaaaaagttggatcttggcattttgcttcgtactcctactactgttgtttcaccgtgaagtatagttggccataacgcccgaggcccaacggcccggcccaaggcaggggattttggcctggcccaggcacggcacggcctgatcgttgtcgggcccatgccggcacggttcgggtgttgggctgtgcctggacctatgcctcggcacggtgggccggcccggcacggcacgaactttagcgaggtgaaatagacttattttcaaccatatagacgtatagacgtattatatggcacgactagagagtagggacgtaaaatagacttatttagttttttatatgtcacaacccaaagagtatggaggggaaatagacttatttcaaagaaaacatgatgggctgcatgtgccttcgggccggcccagcatggcccgacccttattgggccatgcctgggccacagtggagcacgtgggccgacgtggcatggcccggcgtattggtcgggttgtgccggcccaacaaatcttggcccgagcatgatcgggcctggaccatgccatgccgggcagcccatatggccaactataccgtgaagcatatgaggagagaaaaagtcatgtatataccggagtagtttggaaagtagagtgcaaacacttctccactattataaaaattgaagatgtttttgccaggaccttggtaagtcgtccgaatccgtatgtgcttccttgcatatatctctctatctcttcccaatagctttgtctgtcgcccggtatctgacctgtaggatgtatttagttcatgctaaaattgaaagttcggttgaaattggaacgatgtgacggaaaagttggaagtttgtgtgtgtaggaaagttttgatgtgattagaaaa

SEQ ID NO: 7500 - DNA, 2125 bp, Oryza sativa
atctagaagagttcgagttcaagaaggatgcgatatgacagttatctgttaattaggcatagtttgttagtttccttttatctttaggaaagtgtgtttagtgtccgataagaactttatcttttcctttttagtttctttcttgtccgacaaggactagtatctccttatgggtataaatatgtacacccggggtcattgtaatctatcaatcttcacgatcaatacaattcagcgcatcgccaccctttttaccttttctactttattttatcgtccggcgtaacttggcacccgacggagggctgcatcggtgttcgatctccggcgaaggggtaagtccaatgttccgtcggtctaggcagttgtatcgtctacgtcggcgtcgttcaaggctgcatcagtatattcgacctcttggattgctctggtttggatgatatatttgcctacctatttatcatatgtctctgttaatctagacttagcatatcaatttagctctatcggctgcttctggttttagggtttctgccggtatcggctaaatcgtgttgctagattagattagcttagacatctaccaccttaaaaatcagtcaacggcttgattgtctagatattatgtttcttttcatacttagtgctgcatcacttaagtttgatctactaagtcgtgcttaaaaccataatctctatcctgcttattgattgccaacaagggtttcatcgcggtttcagccggtgagttatctgaacgttgcattggctcataaggattgcacatacatgtaagttggatttagccgatgacaacaaaggtttcactgtttaatctaatcttgtggatttcatgacatcggacctccagccgatgtgtgctttaaccttcggatcgatgcttatttatcatatcattgctagccgattggtttatactggattatattgttattttattgcatcatcatcagccgattgcctttatatcattatctacattggacatatagccgattgcatagaccctatcgctatcggctggtatcggcatcggctattattggctaccaggctggaactactccatcggctgtctagccgattggctgttttgatctactacttgcatatcttgtcagttgcaggatcaaactgactggcacgcccgcatctcatcatatttggacctgcactggagctaagcagatctcccaggccggtgtgttcgattttttcgtcaacagcgggcaggcagcctgcggcggcggggggcacgcggcgggccaggcggcggccggcggcggccggcgcgggtaggcggcctgcggccggcggcagcgggcgcccggcggggccatcaacgcaggcggtagccggagtcctcccgttttcttgcctgcagctggagtcctcccgttttcttttttcttttttttttgtgatttgtgattcactggatgtataatttctagaatttgtgattcattgcatagatttgttatgtgttttattttgtgtgtaatttatttaaggatttgtgatgtatttgatttgtgtgtataagtaacttaggatttgtgaggtgaatgatttaggatgttacttgatttggggatatgaatctcacctgatttgggagaaaataaagagattaatagtaaattaacaatgaaaaaaaaaacaaaagcggatcaaccgggacgtggctctatcatctttagtcccggttggtaacatgaatctttactcccgggaatctgaaccggtctttagtcccggattccttctcccggttcgctacctgggagtaaaggtagttgtgaaccgggagagatgtggggttctccagtagtgatatataagattggcatacgtgaggtgataccttgaagagaatgacactgctagtgttggcaccagtaaaaaaaatggttgcttaattttctggacatagacatacagtagaaatggaaggtattgggacaaccactacaatctaatagaatcgataaagagttaaggcattccttcatgctatgggccctaatatgagctcgacatattcaagttatgagcatggccgacaagtttatagctaggctcgatcgagcttggctcgatc

SEQ ID NO: 7501 - DNA, 13788 bp, Oryza sativa
tcttcatctgggctcagctagtagcatgtctttttcttccccaatctatcaaaaaaaatacgactcgggccaatacaacagtagagtaaaagtctgaaaccaacatcacaaccaaaccaaattgcccctctcaacccacaaaaaaggaactaatcttttcctgcaatttggaccaaacgcgagtaggtaaaaacaaggggattaattcgagaggtgaccaaccgacgacgcgacgatgcggccggcggcggagacgcgccccctggccgccctcccgccccacgcggcgctcagcgcgacgcggccgcgggaccccggggaggcggcggcggcgaaggagacggccgccgggcgccgggacaccgcgggggaggtcgcggcgaggagggtcggggcggggcgggaggtcctcgcgagcacggccatggcgtccatcccggtagctgcttctcctccaacgtccgcgcgagcgagcgagcgaccaaagcagccgcctttttttggattagggagagcggagaagaagaagatgatgagcaggagcagagcagagcagcggccatcttgtcacatttttcaagatttgtttattctcgagttgtgaagtgccgaaaatacccctgcctctcattttcctcctgcatgggggtgaaaaaatggacctgatttgtcctcatttcgagtcgctatatacctcgttcgtttatgaaaattatattaggagtagtctttttaaggttagctgaacataaaattaataatttctatgcaatgtcgaagagtcctcgtttagtgggattgttcatattgttacaacctctagcatatggtcaatgatttgttgtcataagtttgctcgattgaatttagtactaagatgtttgaattttttcaataaaagtactttttcgagataaatctatttatattgttttatgttttcaaactaaaagttatcccgattattgataggccaagcaataaaaaataaccagatttatcatagagcacaaatatttgtgatcacagggtgtacgcacccttgtttcaaacagaaatgaatgtatacgtgcttcatacaccactatcgactccttgattgatctcgcctctaccatgtacaacatgttattagtcgttttagattgtttttcctagtcccgtttctctctggttgaaatcaataaggttaatatggtatgagtttttgatatagccgtgttctatatggttttattcatcgggagataccattcttctataaattaaggtaagatgtacaccgctcttctacactatgctggtcctcgaatcatcgctaaacggtgatgcttaccttcttggcatggtacatgtatatacatgtgatgtgatgcttattttacaagtatatgcattgatacttggagcgaagaataacatacttttcttcaatgttcacttcattagaagagaaaaaagatgcctctccatccaaatgcccaataaaccatagctgcacaatgattgactttccttacaccccttatggttgcatacttaatcaacaattgccatccaaaaaagtgtgattccacaaagaaaaattgtgagcatctatcataaatgtatatctacttcatcctagtatcatatatgtacggcaagtataataaccttagtttacatgcaaacgttatcactcaagccatatcaacctacatcctacatgaatgagaaagaagtaatcatatgttcgttgagtgtgagcgcatagccaccaagtactagctgttgtgcatgagctagtccaaagtaaaagagaaagatttgagactcggtaaaagataaaataatttttaaagaaagcattgagaaatattgttgtatatgtatatggctttcaaatttaggtgattattctttagagccaacaaaaggtcatcttattggctgttgccaatttgaaagtgagtttagcttttgcaactcgttcgtttactatgagtatgtttcctaaattattagacggtgtatttttaaaataaatttttatataaaagcttattttaaaaaaaatcaaacaaatctagcttatcgatttaatacttaattaataatatgttaaatgtttttatttcacgtgcagaaaaaagctaagtcaaattgttgccactgcttcctccacactgcccacttgtccagtggttgccgaggtgcttattcctacacctaatttatggaggtcaataacaaaattattattgtaatatacttttttttatatagtactagctcatttcacccgttgttatgtaaactctttagcccatattgtatatgtggcatctgacgaccgtccagtataaaaagcatgaggcctactggcctacttaccgtaaaaagtcaaatgatacactttgtattcaaaacacatgttaccggtgtacacatgcatagaccaaacggaacacctcattttagtaaacctagtctgacgctttctatacagcaacgcggtacctcaaggtttacgccttcaggcggatcacgcacggtggagacggacgagcgcgagaaaggaacaaaccgaacaagtggacccacccacccgtgggcccatccacttcgtccaccacaccgcatcgcacaaaccacacaacaccggttccgaccaatcacatccgtccacgtaccccccaaacatcccccggccccacacaccgaatccccccgcacagcgcgtaagccgccaccgacgcgctggcactcccacgttcaagccctcctcaccaccctcacacctcacagacaggtgggaccaacaaaaaccagacccacctgtcagtgacgcggttcggacgaatcccccgtagccgtaacacgatctccaactttcctcgtgggctccacgtggcagtggggaaagcacgggtcccgatgatatcgcccacacaccacctctctctcttctctctctccccatctctctctctcctcctcgactcaccgtctctctctctcccctcccgtctccggcgatctctccggcggcgtctccggcgaccgggccaccgccgccgccgccaaggagcgctccccctcattccccagatcggtagctgtctcgtcgccgtccccgatcctcctcctcttcctttcccccagatccacaccccccccctcgcgtactcgctcttagcctccgcggcgggaggtggtggtggtgtgggcggggggtgagctcgtgagtcagatccggtgatctgtgcgctgttgcggttgccatggacgacttccagggcctcctggcccgcgactttgggctgcgcccgcaggggaaggcggcgcccatgtcggccgcccgcgccgccgcgtcctccggatccgcctggtccaactccagatccgcatcggcgtcctccgccgccgccgccaccgccccgcccgcgcccttgtacgatgacctcttcggggccgcggcgccctccgccccgccgcccaaggccgcgccctcgccctccctcgacgccatctttgactccttcaaggagccctccgccccggatgccccacccaagccgaagcactcgtccatgccggtgtttgacaagccggtctacgatgacgacatcttcgatggggttcccggggtgaagagcagctcctcggcgcggtttgacgatgtattcggtggcagccacgcgccgccgccacctgcgtacgatgatctgcttgggggatttgggagcaagccggaggtgaaggaggtgctgccggaggagaagaggaagcctgagccggccgcttcatcggctgggtttgatgatttgatcccagggtttggcgggaggatcccgatgcgtgccaggtgagcacacctttttgcatgggaatttcgggcattatgttgtctacatgtgcaatctaggagtaaatttagtagtagtttggatcaagcggaagctttgtcggtatgagccaactcggcaacgagagaaccatgtgataattcagttgagttggacaaattatggactcccatatctaatttatgttgcatttgcttagattttagcttgttaatgtgcacgtgcgattgtttgaattggtaacttataccagttgaggtaggaaattcattgatggcttatatcttcaaatctatttggtaattgaatttataggctattttccattaggtatgatctgtgttgaccattgaatatcaatggcatcttgtggataaacttatgggcatcttgtgaattttatgggctctacttcgattttactattagaaacgcctaggaacatatgctatgctttttataagcattccctactttcctaaagataccagtgcactttctcaggcaaacttgctttggcctctatattgcgttatgtggataatacagtgtatgctaggtttattatggtttatttaaattgcacatagttcatagagaatgttcagcatgcattaatgaccggatgtggtaggttcataggctgcacaactttgattgcaaattaccttaggttcaaatataacgctttatagtgatggaatatgtagtgagttatgcaagaagaatatctacgaggttctgaaattgctttgtttaaagaatgatttggatctttttaatctaaaatatgtcaatcatatacagatttgttaccataaattccctcatcctttttttttttgaatcatagggagactgttggaactaaagataagaatgtgtccatgtcaacgtctaagccagctagcatggcaagtgacccatttgatgttcttggtacaacttcaacctcaaagcatacatcttcagggatattcacggatcccttggatgaactgggcaggcctgcaaaatctcaagggaaaaaacatgataatactgctgttgacagtggcctattcgaggactcaagcacttttaatcaggtcccaaaatcagaacctctgtttacctcagagttgaatgatgacttgaaagataggaatggctccaccaaagatcgagattcaagtcctgtgcaaaatttttccagaaaaaatacaacccaaaaaccttctgtggagaacttcgaaaatatctttcctaagtcacagtctgctcgatattctgatgttcatgttgacattggtgcctctggttcagagaaatacagtgggaatggtatggatgaccagtctccaagatctgatgagtccgaagatgagatctggcttacagtttctgagattcccctcttcacacagccaactagtgccccaccaccttcaagaacaccaccacctcttgctgttaagcaaaaaccacatggatcacaagcaaaaagaaaagatgacaattatccacgccggtctaaccaaaaccacaatcatcacagaagctcgtcaaatcaagctggttcttcttcaatagatgaactggaagattttgccatgggcaagtctcaaagttctgcctatgacaatgcaaatccttttaatgaggaagaatttgagcatagttcatcagcagcagcatctgcagctgctatgaaggaagcaatggataaagctgaggcaaagttcaagcatgcgaaggttgtacgggaaagggaacgcgatgcaaaacatagaaatagagaacagcaggaacaagatgatgaagcaaggttcaacacccaggatcatgaagagagagataggcaggaaagactagaacgggagagagagatgagacaaagggaggaaaaggagagagagcaaagaagacttgaagaggagagggaacttgagaaacagagagaaagagagagggctgctaggcaagctgtggaaagggctacaaaggaagcacgggaaagagcagctgcagaagcacgtgcaaaagcagagagggaggcacgccagcgtgcagagcgggctgctgttcaaagagctcaaaaggaagcacgtgagagggctgctgtagacgctagggaacgagctgagagggcagctgctgaagcgaaggagagggctgctgctgaagccaaggagaaggttgcaactcaagccagggatagggctgcagcagaaagagctgcagtggagagagctcaacaagaagcaaggaggagagctgaaagagcagcagtagagagggctgcttctgaggctcgggaacgtcaagctgctgaggctcgagaaaggcaggctgctgctgctgctgctgcagcagctgcagcaaaagaaaaacagagtaaaccggacgatcttgagtccttctttggtatgggagctcgagccaatagtgcgccgaagcaaagggctccaacagcggtgattactctaccaaaacatgcatgctaaaattttgttcatggcaatttttgggttattgttttaccaactgtggacgtttcaggattcgatgttcaattctcaaactcaaaatagaggggcagcatcttctgcttcagcatctatgcggaaggcatcatcaacaacaaatattgcagatgacctatctgcaatatttggaggaggtacggatcaacccaaatgcagcagttctgaacatacaaggttttgcaatattattggctatcgctataactcatttggttgatttcttttcttttagctcccacatcatctgaagaatttcaagaaattgaaggagagagtgaagaaagaagacgtgctaggttcgaacggcatcaaaggacccgtgaacgagcggtaatgttgctaatgattttagtaactaaaatagatatttgtttgtaacttgctgttataatttggtactgtggacattcattttatgttcctgaattttatcatttacatgttatttttttctatttattaagagttgtgatgcatgaatttgagttgcagtgccatttattaacttcaccgtgtatgcaggcaaaagccctggctgaaaagaatgaacgggatatgcaggttcaaagggagcaggctgaaagacatgtaagtactttttatctttcaattgcccaattttacttcttttaaatacttgtcatactggttagtctccatttattttcatatacaagtttactgatgatgttgtggtgcattttatttgttgagtaaattacactcacggtacatggaacttgtgtggtgggtgcaaatagatacaaccacttgcaaattgctcactttgatacaataacttggctagttggtgtttaccgggccaaaatgatccacacaagtaaaattgctctaaattagcacacactaatgatatgacagcatacacgtatgactgtgatttggagatcttatttcgaatccaaataaaaagaggaattagatgtgcaaaagtttatttttcatgtccaggatagagtatttatttcatttattgggaaaatttgatcctctatataactcgtctaatgtttatttatctgttcaagaccaagacaatttttatctgtacatttaactcctaaaagaacactttaattttcatgttcatgttcagatactctttcatcgaaagtgtatttaatgattgggcatttttaattattttacttttttgttggtctaaatcttgaaaatatacgttgtcagtataaaattttgatgtgtaacaataattacacaccagtatgtaatgtatcatatttgatcaattttacttgtggatcggtttggcccaggtttgcacaaactggccaagttattgtactggaataagcaatttgcaagttattgtacctatttgcacccaccatacaagttagtgtaccatgaatgcactctctatcaatattttgctaatggctagttcctttgtttcgttatctgttaatccagagaatttcagaaacaatggactttgagattaagcgatgggctgctggaaaagaaggcaatttgcgtgcattgctatcaactttgcaatatgtaagtccttattcctgatgctgctaaaaattgaatcaattatccttgtcttctcaatttttctattcattctctcggtgttattcttgcaaagaaagttgcttgactcttttgcttgtcttctggaagccatacttttccctgatcagtttggtagtgcaatttttaacgtagagtgtgttcctttatcatggtcacatttcaacacatgatattttctatccaagggtagttccgaggtaattttgttaagcatgcaggttccagtaattgtattccctgctacagctttttgtaagctttgttttcacctgtggtgaccaaaaccatggtattgaggtgaataggtgatatcagatagttttggtttcttgctgatgtttgaatgtaacatagctgagtggctcaaagaccagattgctggatgggctgaatatcttttgtttttctaagtcttccagtaaaaacgtttatctggtgttattctcttggtttgccattacctgcatacagtagctccttcctcgcaagctataatacatactctgtatgtaagtaaatagaaaattgtgaaggactaataattactcctattcaacaaacattgcattttagggctagtttgaagagaattattattaattctgttctttctgacaggtactttggccagaatgtggatggcaacctgtatccctgactgacttgattactgctgctgcggttaaaaaggtatatagaaaggcaacattgtgcatacatcctgacaaggtgcagcaaaagggggcaaatctacagcagaaatatgttgccgagaaggtgtttgatctccttaaggtgtgtatgctgccaaaatatattcacaaaccataatagcagcatgctgcttcacactaacaattggtcaaccgtatgtttttatttcccttttagtttattgtggagaaattagggactgcctagctacagagcctaacaggacttattaatgtgtttttccaattttaggacattggcctctacatggaaactgactatttgtcaattatgaatatttaggatctttcactgtacattttgagatattattattcatgtgtggtccattgagccaaataaggcttcctctatgatttcacatggaaagtgccaaggtttgacagttttcatatgattgatggtacactagaataacccatattaatgcaaactttggtttgtgtccacctggaccaccacctggtgccaacgcaagtatatctggcatgccctgcctactatgcccacaaccaaattaatgcaaaccttagtaatggcctgatagtctgcctagaggaacccaaaagcaaatgcttgacatatacacgatacgataatttaatacatcagattgatcttgttgatatttagtactttggctagtatatcttacattagcttacttctttatacaatgttgcatatttaggatcttattatttatttttagcaagaaaaaagagcttgtactcaattgttttccctaaaattgtttaccaagtgccgggacttttaaagagttctattttctagtgtttcccattacatccttttggtataaactttaattaaacctcctctatgtttgcacaaaacaggaggcatggaacaaattcaactcagaggaactcttctaaacggcctgcgcaaatgaaacatattgctcaccaatcttcacctgcatgaggcaatcggggtgggacagcacctcatagaacaaccgagctggagcagtcggtcggcggacccatgaaacgatgaagtgaaagttccaccataattacaattgtattgttattaccaatattgtttgttttattatacaccctcatcttctcccttctgtatgtgttgattcaaatgacatttcacagccacatgtggtggccctgcggcagaccctcatccagtaggtgtatattagcgttctttttgctcggttgatccagggttgtgtagcagcggatttggggtggccagtgttgtggtttttggattaggcacagggtttatttaccatggagggcccaaattgcatggatcatgaatgttgccagtttgatgccatgggcttttcgtaagttcaattatcttgtttatagtgaacttctggaacacacattggggatgttcctctgattcctgtgtgattttgtataaagttgatctggaattttgatttcctcttgttctctgttaccgcttcgttatttgctcgttccttgaacgtataacgctagtatcacaaaatcctgtagagtttcctttaaagagtaaattttacggaacttcatgtattaaccaattgtgcataagtcatttgttttggcatgttgcttataatggtattatgctcctataacttcagaaaacagcagcagtaaccaaaatttcatctgagttctttaattcgatcatataaaagttatagtaatctaagttaattcttttttattttgctatagtgttaattcagattgattactagtagtgtggttttgtgaaatctaataccgatggtcactgtgcaatatgccaaaacccatatatcttgttccatttaaaaccataataaatagggttatgtgatatttaataaaacagatctgttaactcaaataaagattgaattgggaagtgttttaatagtttattaaaggttggattgggaagtgttttatagtgtagtggcttgatgaaatcatgggtctgccaccgtgttgcatcgatctcccaaattcttttctcgtttcactcgcatcctcatcatcttcatgttacttctacctacaagtatattgttttctcactattttatatcttttgctcgttaaaggacaatgatttgggtgtattcccaatttcccatcggatccagtaactcgtgtaatcaagcttaacctcatcccattttgcttcttttaactattttcttttttctaatgggtgtgttcagctgtcatttttcagcagcggctgcggctgcaactgttcaaaattgctgcagcttgcagcgactttgaactgcggccgcagcgactgtggcagccctagctgccgaacagggccaataatggaatagaataccatctcaacctttgctcaacgagttatagcccagtccagattcatagctagagatgattatattttaggacagagagagtaggcgagtagctattatgtttccaccattgtttatcaacttaaagtccggtcactggatggatttgaactatttccattgtttatcaacttaactatttccatacgtcagggtgtcctcctcgatcatatcttaaccacgtcttggtagcatgcttttctcgatcatctccatacatccgttaaggccatgatatcctccacattcatagcaacattacgagtgtgtttggttggtagcctagatgccacacctgtaacaagtctgaacaacatacaaatttgtttggttacttatctggagagttgcctgactcaggccacaaaaaatgaacaccacaaatgaatgccacacctccattcttttttcatcaacgtgactataatactaacatttgtcaccatccgactcaaataagtgtactttttatctatactattttaaaatatagtagtgatggactggtggtagcagtgagtctgctactatcacctctatcgctaacatattaggcctccttatcggtgaaactcacgtgctcactggattcaaacgtaaaaaaaaaagtatgtctaagcaaaataatgtcaatatttttttaaggtccggtaagtacgtactcccttcagtttcattttaattgacgttttggacaatgatacggtctacaaaatatatctttgaccttatttttctattataatatatataataaataattgcatatttacttttattgtagtgctttgaaagacaaatctatatatgttgttctagttcttttaaattaaatatttttaaagttattaattgtcaaagttataaaagttcgatctcaacctcatctaaaatgccaattaatatgaaaccggagggagtagggaattaatccatatagttaaaaggattagaaagagccagtttgcagaatcttcaaaaagataagtgtgcacaacgtgactttgttttttgccattgcaacatacaggcagtcttgtcccaaaatgaaactatttttttcactcttcacccaaaatgaagctattttttcactcttcccctcctctcaacaaatcataaccattctccatttaattatctcgtctactgtctgttctcagctaatcacaaccttactttaattatttctaccgattttttaaatacccatgctcactaaaaaaacctacattttgaatagaggtaatacaaagtactctctctgtttcgtattacatgtcgttttgacatttttagttaaactttttaaagtttgtccaagtttatagaaaaacatagtagcatttttaacacaaaacaaacatatatctactattataaaaatcaaagatgttttttgtcgaaattttgatacgtcatccgtttttgagttgttatatatcgtccgtatccaatttgatgtgagtatagaataactattatacatcctatcctagcccaacccctcccctccaagcccaacctaactggcccacactatcccgccgtcctatcgtgcgtttaataaaatatattcaatgctagatttaataaaaactaattcggtgttttagatattactaaatttttctttaaatttggtcaaatttaacaaagtttaactaggaaaaaaatgtcaaagtgacctataatataaaactgagagagtagaaatatagcattgcacacgtcttccgtacaaagatatactaaagtggtgtttggatccagggacttaactttagtctctgtatttagagtattaaatatagactacttacaaatctaattacataaacgaaagctaatttgcgagacaaattttttaagcctaatcaatccataattaaagaatgtttactgtagcattacataggctaattatggattaattaggctcaatagattcgtctcgtgaattagtctaagattatggatgagttttattaatagtctacgtttaatatttataattagtgcccaaacatccgatgtgatagggacttaaaagttttaatcccatctaaatagggtctaaggccctgtttaattccagggatgaaaagttttgggatgtcacgttggatataaagacacacatttgaagtattaaacgtagactaataacaaaacaaattacagattccgcctgcaaattatgagacaaatttattaaggctaattaatccgtcattaacaaatatttactgtagcactacattatcaaatcatggagcaattaggcttaaaagattcgtctcgcaatttacacgcaatctgtataattagttttgttctttgtctatatttaatactctatatctatgttcaaacattcgatgtgatagggtaaaaaaattttgcgtgggacctaaacatggcctaaggaaaaagccattatccagttcctcttagaccctctagacttctggacccacattccagtttccaacgttaaacccacccaggacccagcacaccgcaccaacctctctcctccccccccccccaactaccaaaatttcaaattcccgcactccctcctcccccctcgccgccggccatggacgccgccgacgagatggacatcgacgccgccgccgacgagacgggatccccgccctccgcctcgggatccctctccaccttcctctccgag

SEQ ID NO: 7502 - DNA, 38072 bp, Oryza sativa
tccctcgcctccctcaccttcctctcctcggcggcgtccccctcctcctccatcttcccccgcctcgccgccgcgggcctcccggcctcctccctctccgccccgctcgccgcctccctctcctccgcgcaccacccgctccccgccgccgtcgcctacctccgcctcctcctcgccccggcctcccctctcctctccctcttctcgccgctccccttcctctccctcctcctcgccctccgcaagtcggcgtcgtcgtccgccgcgtcgcacgatgcggcggcggcggccaaccctagctccggctccggctccggctccggctccggcaaggggaaccaccggaaccggaagcggaagagccaccagcagcgtcagtcgccggcggcggccccgtcgctcctccccagggcgctcgcgctcctcgccgacgccgcggggaggctgccgctcggggagcacccggacgcgcggaggtcgctcgtcgacaccgccgcggagctcgccgccttcgatgtcctcgtcgccgtcctcggatctggctactacgccgaggcgatgcccgatttggtgcgcgcgctggcccccgtggcgctctcagggtccagatcggcggcgcgggcgtccgcggtggaattcttggcgaggaaggttgtgccgttgggtgtggagggaggggaggatggggtgaggaaggcggtgggttacctaccgaggtatctggcggcgaaggcgccggagaagtcggaggctagggcgatggcggtggaggccatagtcgaggtggtgcgagcaatggggcaattggagatggagggatttgctgggtatgtggtggctatggcgaaggggaaggcgaaagggcggctgcttgctgtggatttgatcttggcgatgctgccattgctgctgccatcggaaggggatgattgtggtctacaggagggttcttgggggctgaagtttgtccgggtgcttgtggagaggtgctcggatacggtgggaggggtcagggctcgggccttgacgaacgcagcccaggcgctcgacgttttgtctgaaagaggcatggaggttgaccggttgcaggaggtgatgaggatagggaacataggccttggcgagttgctgaggctgcggtgcgctgatgataaggctgctgtgaggaaggctgcgcttgtgctcattactaagtcaatcagattgatcgggaggcctgttgacgagtcgctactcagtgctatgggggctgcgtgctctgatccgctagtcagcatacgcaaggcagctcttgcagccatctcagaggtgttcaggaacttcccggatgagagggtaacaaaagagtggcttcaggctgtgccaccactggttattgatagtgagacaagtatccaagaggaatgtgagaatttgtttcttgaattggtcctgaacagggtctgtcaagctgccaatttgaatctaaatgatgattccaatgatatggaggaagtgtttcctaaagggacactggatttgctgaaaagtatctgtgatggagaggttgcaccatgcataaaaaagatatgtgcaagccttgggaagaagaaaaagctgaaaccactgcttgcaagttcattgcagaatatcataacaatatcagagtccttgtggttgagaggttgtaaaccaattgagatgtggactgcaccagccggggcatggtggcttctttctgaggtctcatcatttgcacctaaatcagttaactggaaattcctctcacaccactggaaactccttgataatgttggccaagataaaggcaaagttcgtcctaaaggggaaccaaattctgcattatgggctgtggatcgtgtttcactcttgcaaactatttcaaatgtttccatggagctgcctgtggaacctgcagcagaacttgcacacagcttgctcacacggattgaaaattttgacatgaaccttagtgaggtaatcatttaatgtatcaattgcaaaatttagtctagtacaatagatttattacatagcaacaaatcatgtactctgtttgtggtcaggactaggctgcaatttagttgtaaaaaccactaaatcattaatcatcttgatttgtaaatccactatggcactacgctgaaatctaccatgccacattgcattccaccctagtcatgttactctattggaaatgggactagggagtatttatttttatgaagaatttgatctagccagtgcttttaatggtgtctttaatttgaatgaaggtgaacatgtcagtgatctataaggtaaagactgggtatatatacccataactataataatccacaatattttgaattagttttctgaatgaggtatccttctagcttatctgaaggttcacatcatagtcccaactcccaaaattgctctgtggaaacctacttgttatgacaagattatcccgtatctgtatgctcagattatttgttacctaccttgtttttacctgccctttttttttttctctccatagttctgcaatggtgttacttatccacttgtattatttttattcatggcattgctacctttaccttctttgttagatgaataccatttttgtgtaccacatcgctcttgatataagtaattcattgtgatatgttcaccataatgtcttattttcatacacatacaggttgatgctcatgtaaaatccctgaaaacgttatgcaaacgaaaagcaaaaacagctaaggagggcgaaacactgatcctgaagtgggtgcagcaacttatatgtaaagctgttaacattcttgatgaatacataaaggagacatcagaagctgctaagggtcctaaattttttacacctttgagtggaaaactcaagggaagaaaagatgcatctgcacaaaagtcaatgtcacatgcagttattgctgtattcaccattggatcgctgatcctagcttgccccactgctaatgtgcaaggcgtcattccttcgctgcacacaatcataacatctggaaactctcagccaagaccaaaaaatcttgctggtgggactgtttctttcaaagagctagctccatctttatatatacagtcctgggatacaatggctaaaatatgccttgtggatgacaaacttgcgaaaagatatattccactttttgttcaggtgcgtagccttgcatggttgcacttccatgtctactcttaatagaaacactcaatgctacttctttgactcaggaacttgagaggagtgatttggctaccctccggaataacatcatgattgcactggcagacttttatgtccgttataccgcaatggttgactggtgagcttacatctccattggttgacttttatatctgttatgtccttccaaaatcctgttactgtgtttctttcaagtggatttgcatttgcttgcttacacagtcacataatataaagcatagatatcactagtgtgtgcatactttgtaaaattagcacatactgtcaatattcacaaaatttgggtttatctttgttacagcttcagttgcaaaagatgtaaaactgctttactgtttgattaagatcttatcagttaaactgcacgtgggaaacagggaaaacattaaaatagttcaacttctaactgacctcccctttttattcactctgcagttatatgtcaaaaataacaaaatcgttgcgtgatccctgtgaggtagtgaggaggcaaacatttatcctactctcaaagttgctgcaggtgctaataattttcttaatatcacttccacatgtttggatcatggtttattgaaacttttcttttatttagagggactatgtaaagtggagaggtgtgctcttccttcggttcctgccatctttagttgatgagtcagagaagataaggcatttggcagacttcctttttgggaacatcttgaaaggtttaccctgcgttctgttttatcttttacttgattttttttatttgaaatttgaaaaaaattgtggccacacgttttcttttttcttgggaaagtcaagcactcaagttctttttctgaaggatttaccccctttctgtgttatctgtctaatgttgacataaattttgcagctaaagcgccactccttgcatataatagtttcatagaagctatctatgtcctaaacaattgcttgggtaatggtgcgcaaaccgaatctcagggaaggttggacggaggaccaaccctttttgcaatacggtaaaatatgtagaaattcctcatgcgtttttgagaaaaaaaaagatatccactttgcaaaaagctgtgcttcatcctctcctgagttctatcatggttatttttttctttttgctgcagaggcactgacgaaaggtcgaggtcgaaaagaatgcacatatatgtatctctgctgaagcaaatggcaccagagcaccttttagctacgtctgccaagttatgtgccgagatcttggcagctgcttgtgatggcttgctcaatgtcgatgatgccgctggaagggctgtacttcaggtacataccataccaatattgatattttggacaagtttcacgctaatgtgaagtaaattgttcatgcacatgcagccaaggaactgagattaactttcatgcttacagtttacacgtttaggtcccctttgattcaaaggaaattcataggaattttaaaggattccattcctaaaggaatttttcctatatagccctttgaatcaaaggaatgaatcctatgaaatcctatgaaattcctatggaatgtctaaagacatggaagttttggaggaaatctagcatgaggttctacctcatgaaaattttcttacgagtcttcatctctcctctaattcctacgtttttcctgcggtccaatcaaacggtcattcctgtgtttttcctgtgttttgcaatcctttgttttacacttgtactcgtatcaaaatcctacgttttttctgtttctacgttttctcaatcgtatcaaaatgtttgctcagcaatttcctccatttagcctttgcttctttcctttgtgaccatttagctacattttcacaggatgctctacaaatactggcatgcaaggagatgcgcatccaccccaacatttgcacggacaattccgagatggatgaggaatgcggcgatggcgggtcgtccaatgccactctccaggcggcgaaagggagagccgtcacccaggtggcgaagaagaacctgatccagatcgccatcccgatcttcatcgagctgaagcgccttctcgagagcaagaacagcccgctcaccggctgcctgatggagtgcctgcggaccctgctcaaggactacaagaacgagttcgacgagatactggtggcggacaagcagctgcagaaggagctcctctacgacatgcagaagctcgacgtcgccggcaagggcaaggccaaggccgcagctgctgcggaggctgggccaagcggagcctcgccggcggtgaacggtggcggcaagagggcggcggacggctcggcgagggccacggcgaggtcggtgctcaaggaggtgaaccggaacacgccgacgccgccgctgaactcgatgagcgtgcccaaggtgaggtccatgctgggcgtcggctcgcgccggcccgctgtgctggagtcggtccggcggcttgagccgtttgggtccgacgatgagaattagcgtgccatatggcagaagctttaggttggcctgatggtcagtattaggctgtgtttatgatgctaactttgaccggtttaggagaaaattacaagctcagtttctcgctgacggttttgtacatggagtatatatttaacgcattttagtgatgttcagagagatgaaacaattttactgtcgcattttctccttagtttggatgtgacatgaaagtatatatgctttacaccgaagattgcgatgtctcttgactgaatactctaacttcttatagtggaattcaggttcgcaagcaggaaatgtataaaaatcatggctacagatgggcgaacttgttaaaaaaaaaaaacaaactcaaaccacaccaggatacatacaaattgatatgtgagcaattttgacatttcatctgatggtgtgctaatgagcgaattagattatcaatatgactttctcaaaaaaaaaatcaatatggcattttagcaaagccaaccaacttcatggtatttataggatgccatcaaactatgtggcaaaggagcgataatagcgaagggttccaagtatttttctatatttgtttcgaaaaatagtggaaaatggtttagtggaagctgttgattatttgaaacgggaaatgtgcagtaaaaagggaacttctaaaataatcaaatcctagaaacttctcttatgcttttttagctagagagtagtaaaacattctcattctttacttgtaggcttatcagttggagccagaatttaaatttagaaatacaattttagagttaatttagaattattttattgtagtttatttgtagcgttggcttttaaaccacaaatagtaaagatataaaagttttaaccctaaattattttttgtttgcttggttcatatttatacggcttatagccatagcttaactaatcacagcaaattaccattaacttaagagatcgaggcagaatcccaacctaaccaacttacggcatcagggaccgaagttgcccaaaacctgacacagcttggctctaatttcacacatatctaagccaaacaattcagcaaccctatttgaattgagctatgtctacgcctaaatagagattttgtacgctagatatgattaggactgtgaaatataacgggttgtcaaaattttgtaccgacgtataggaatcgacttctacttttacttaaaccagaaccaattctcttcttgagaaacaagaaccgattctgatgagtccatataattgacgaccccccctcccccaattcgatctcttccatataaatcaaatcaatttgatttatataattcgattgatttgatttgaaagagagagaaattaagcggctactagcgcatcacacatggcgaagaagaagaaggtgttcatattcaggaaggcggcggacgtcgccatggccgtgtccgccgcctacgcgccgttcgccgccgcggtgtcctaccatgccgccgccgccgcgccggcggcgctggccttcgcgctcggccacggcgcgctcctcttcatgctccccttctccgtctacgcgctcgcgttcctccgcgcgccgcgcggcctccaccagacgccctacccgatgctcgcgtgcgccgtcgccgcccccgccgcgctcctcgccgccgtcctggccgtgcccgtgctcgccgccgacgacgtcgcgctcgcctgggccgcgaacgcctccgccgccgcggcgctgtggtggtgcctcacgaacggcggctacacggcggtggcgttctcgagggtggaccagtacgccagcttcatggacgcggtggagcggacgccggagatcgcgttccccctcgtgttcgacgtccccgccaccgccaaggccgccaggcgcgacgccgtccgcttcgccgccgccctgtccgccacatgcgcggtcgccggcggcgcggcggtcggcgtcctcggcggcctctcctcggccgccgccgccattgccgccgccctgtgcatcttcgcgctgccgatgtgcctcctgtacgtgccggagaatcacatggacccctaccccaccatcgacggcgtgctccagcgcaacccggcggcagcgtggtgcacgcttctggcgccggtggcgctcgtgctgtgcggcctcgtcagggcctcggccgccacgaacgccggagacgttggcacgttcgccacggtcatcgccggcgcgttctgggccatggacgccggcgccgccgtgctgctggggcgggtgatcgcgggggagatcaccatggcgagggagacaggcaagcattcgatctaccggtcgagctcgtcggagatcatgtcggcgttgctcatggtttgggtgcggtatttcgtgtacctccatgttttccacctgattggctgcggtggacacctcacatggttcaactcatctcactagcttagcctactaaagttcgaagtcccaaatatggacttcgtctcaaaaatatactccatccgtttcataatgtaagtcattttagtatttttcacatttatattgatattaatgaatctagatatatatatctatttagattcattaccatcgatataaatatgagaaatgttagagcaatcatatctgggagtaccgtcttacagtacagtattagactcagtttattgttgatatagcagaggatccacatcccctattcttttttttagataatgacatcccctattcttctgaagcagaggatcaaatccttcaatctaaacagttactatttttatttttatttttatagagactagaaaaaatacctgtacgttgtaacgggtgaaggctatgttaatcttattattgctatactgtttagttaatgtgaaatttactgtggaaattcgcttagagatatattttttaagaaactagcaaaaatgtccgtgcgttgcaacgggtgaaaaaattctaacgataatttatttttttcatacataaccatgtcaatgataatgtttgtatagattgtttatagctaagacaatcaaaaagttggaacatcttcaatgtaatggcccaacctcaacgatgacaaccttaccgatgcctgctttacctaaaataattggattatccacgtgacagcatatatataatctaaaatactctttcaatcttattcttgcaaccaataataggattaatcagatactacattacctcgcatggtcaagtctacacaaaatagagtcactatgcactcttctctaaataacaattaaaaatatgtttatttttcagtattatttctatatcatatgttatcagaaatattagctatacttaacaaaaatagtctaataattgcatatagagacgaaacaaaagcatggtaggagatgaaaaaaaattgatgatcctatccgacctaagagtccatcaatttagtgttttttttgagcgtccatcaatttagtgttttttctgatatttttttcagagcagcttgtttttttatatacagtgtttttttcatgcgaggtttttccaaaccattttttttagaaatggcatgttttttctaacagttttttcttcgcatgttttttttattttttagggatgacggaaacattttttagcgcttttttctgacatttttttctcacgcttttttaaccatttttattttctcgtgtatttttttatttttagttgtacgttgaaaacttttatttataattgtacgatgaaaacttctctttttagttgtactatgaaaacttctcttttcaaatagttagattagattagattagagatagagaagagatatatgcggactactaaaacgaatagaaatcgaactttttttaccgcgctttttcccgctccttttactttttttctcattcttttttattttttacgaactattttttcgccactttcttagggaatcagatggagcttttttagatgtgaattttttaagtaggggcggacgaatgaaatgttttgaattttttaagtagcagtgatagagaagcatacaaagcttatatacatgcgtataaaaaaatatacagtttacaaagtttgtatacgtgtatataaagtttgtatacatatatagtattaggaaataaaaaaccaaaaaaagaaagaaaaaaaagaaacgaaaaaaagaaggaaaacagaaaaaccatacgtgggaataggattatataggaataggattttcccccctttttaaggggaattagatctactgtttttttccggcttgcaaatcggacatgttttttttttcgccacttttttccgccttgcataggaatcggacatttttttttgttgtttttccctttttaaggggaactgaatctacgatttttttattttattcgctattttttctcaaacttttgggaattggacttctttttttttttgctattttttatttagatggacgaaggaaatgttttgtattttttaagtagtagagaataatgagatgctattaggagtccaatgtttttttaaaagaaatttcttatacaactccttttttattttaaaaaatgaacgaacttagaaaccgactcaaatacaaatatgtatttctaaaagcgaacaaacttaaaaattgactcatacacgaatggcgtaccaataaaaacatctttaatttttataatagtagggaatagatagaaagaaaatacttgtgcgatgctacggaacaaaaaataaaatagcaattaacattaaatagagaatttagttttgattatggaagcccttttgaaacctacatctattttctatacaccacctccaaacatgagctaaggctagtgtgggtggtatgcattatgcaatatctaaaacatatttttgttttcgcatgtgagaaatgagaatcactattagtattatgttctctctccgccaatctaataaaaaatatccatgcatgttttgattggtgagggcatggaatatttaaatcatcgctagagattgcagaggtttggttttgtttgcagtttgtaagaaactactctctccgtcccataatataagggattttgagtttttgattacaacgtttgaccactcgtcttattcaaatttttttttaaatgtaaaaaacgaaaagttgtgtttaaagtactgtagataataaagtaagtcacaaataaaataaacaataattttaaatttttttaaataagacgagtggtcaaacgttaaagcaaaaacttaaaatccggacggagggagtatcgagatgcagtttagctgctcaggttgaagccttggcttgcctggagggtgtccaattggctgccaattgggtacagatgccaataattttagaatccgacaacgccaaagtcgtagcaggactgaattcaacacaagactcaagagcagactggggagttataattgctgaagcaaaagcggtgatgcgatgtttggtgcaggtgcaagtgcacaagatagataaagagagattcaaataacatggctcatatgttagctcaaatggttatgagatcaggagttgaagcggagtggaggttatgcgctccgccagaaattcttgcatcgcttaaccaggaatgtaaatcctatgttctgccattaataaaatctctctttacgctaaaaaaaaaaataaaggctgagtttagttctaaactttttctttaaacttctaattttttcatcacctcaaaactttcctacacacaaactttcaacttttccatcacatcgttctaatttcaaccaaacttctaattttagcgtgaactaaacacacctaaagataggttgtcagggttacgggttaggcataccctttacccttcgataaatgttacatatcgatatgacatacccacgcgcatgcggatatttcctgtatattctaagggaacctttcatggaatctacagacgggaagaatcctactcgggcagaattgggtcgttgacgtatcgtatagggtctgatatctccgagttctacgtggagacctccagatctgcgatataaaagggaccccccggggagggtttaagggattgaatctcagagccaacacaacctacacagcctacgaggagccaagtcatcgagagctagtcgaaacaactcgactacaatcttgccggatccgacaagttcccttgttccctttgtaacctgtgttttctaccatataatcccacatcaactggattagggttattacctatcaagggacctgaaccagtataattcttgtcttttgtttgcttgatgtcgtactacgtagatccttgtaccaacgtactccaataccctctatatccggtctacgggtatcacccgtcgacagtggcgcgccaggtagggagccttggtactcaaggttctactactacgtcatccagcttcgtcgacaacaacgtcagcaccagcctcagccaagtactccctgcttcaacaatgctggtatggactcaagtcggcgaaatcgtcttcccggtttacaccacgacgctgatctcaaccggtcctccaaggactggagacgagaacgcagtggctacaaaccaaggcgattccatgtcgaaaaatcctcccgttgagacggagaacggaacatcgacgacatccaagctcgggaaggattttgatacggccaaaccttgtccttccgacatgaaccatgagccgacaaagatgacttccgaagccacaaggtcttggtgtcctatccacaaaaccaagaaacacactctgcaagattgctgggttttcctcaacgtccgtgctgaaattcgcgcctacaaagaacgtggaattcggcgtacttctccaactcgggaggtctattgtcctattcacaagacaaagaatcacgacctctcgagctgcaaagtctttctcggcgccatgaaagctccgtctcctaagttatatgtccccatcagggataacggcaaggaacaaggagcgactccaacttcagatcgattcgttggggtaatcgatcctcacgaaccatcggtcttacatctcctcgaggactatgggtcatcgacaacgagcgcgccgcgggaggtattggctatcgatgacgttggcacgtcagtgcacgccaacgcagaagcggggaatcaatcgactactccagcccagcacatcagggccgttcaagcgatactgagggaaactccttacgatcccgttctgaacgatgacctcgatcgttggacagaacgactacgggaatcggtgactaacctcagcaatacgtttgaagaagccgctaccgcagcacacaaggagcagccaccaactggcgatgccaatggtgaagatccggaacggagggaatcacctcaacgagctacccctccacctcgcggcactagcgatcttcgagatcaaatcaacggccgccgagaagcacgacgcacacgagacaacgtgaatcgctctcggcgtcatgtctcttcacagcgccatgataacggaaatcgaggagaccgctcaaacgaggaccgggaccacgacaaccaccacgatcacaatgatcgcgaacgatgggtgccagacaatactggtcatggctgccgccgtaacgacgacgacgatggagatcggtgccgagacaacagcggaagacgacgacaggattcccgagatccaggccgtcatcctcgtaatcgtacgccggaaccaagcgacccatcgtcatcgtcatcatccgcgtcctcctcatcgtcagacagacatccacgaaggacacacgaccgccgacaacccaccgcccccaacgctgggtgtagggctttcggtcgttccctacgtgatgtccgatggcctgagagattccgacccggagcaatagaaaagtatgatgggagcaccgacccagaggagttccttcaagtctactccacagtactctatgctgccggagcagacgacaacgcgttagcgaactatttaccaaccgcgttgaagggttctgcacgttcatggctgatgcatcttcctccctactcaatctcttcgtgggcagacctgtggcaacaattcatcgccaatttccaaggaacatacaagcgccacgcgatcgaagacgacctacacgtgttgacacagaactcgggtgaatcattgagggaatatgttcgacgcttcaacgagtgcagaaacacaattcctgaaatcaccgacgcttctgtaattcacgccttcaaatccggtgtcagagatcgctacactacccaagagttggcgataagacgcatcacaaccactcggagatgattcgagatcattgagcgatgcgcccacgctgatgatgcgctaagacgcaagaacgataagccgaagaccgggggagagaagaaaccagccacggacacatctgagtcaagcaagaagaaaaatcgcaaaaatgggaaaaggaaagctcaagcggaagtcctcgcagcagaatacgcgaaccctcccaaaagcccagacccacaaagcagcgacacaaagaaatcatggtgccccatacacaagacggacaaacattctctggaagattgccttgttttcaaaaagtcgctcgagaagcacatggcatttgaaaaaggcaagcgagtacgcattgtcgagaagaacgaagagacggctcctcacgaatcggattcagcatattcagactctgacctgcacgtctcacacatcttcggcggttccacaacgtactcctccaagcgagaatacaagaaagtggaacgtgaagtctgctcgacatggcagggggctgcacccaagatgaagtggtctaagcagaagatagagttctcggaagaagaccaccccaagaccgccgttatcccaggacgatatccgatcgtgatcgaacccactattcggaacatcaaggtagcgcgagttctcattgacggtggcagctcaatcaatcttcttttcgccagcactttggacgcgatgggaattccgcaaagcgagttgacaccaactgatcaacccttccatggaattactccccaatcatcgtccagacctttgggcaagattacgttgcccgtgactttcggccaagccaacaacttccgaacagaacagatcacctttgatgttgctgaattcgatacagcttacaacgccatcatcgggagaactgcacttgcgaagttcatggccgcatctcactacgcatattaagtgcttaagatgccgagaccgaagggaacattcactattcaggggaacgcaaagctggcggtgcaatgcgacaagcggagcctcgacatggtcgagcaaacgcctagcccacccgccacgactgagccacccaggaaaatgaccaagacaaacaagacgccgaaaccagacggcgccatcaagatcgttccactctccagtgccaaccccgacaagaccgtcaagatcggggcgacactaaacgagaaataggaactcgcgctcatcaccttcctccgcgacaatgccgacgtgttcgcttggcagccgtccgacatgccgggggtccccagggaggtgattgagcacaaactcatggtgcaacccgatgccaagccagtaaagcaaagactgcggagatttgcaccagaccgaaaacaagccatacgagaagagctcgacaaacttctcaaagctggtttcatcagagaagtacttcatccagagtggctagccaatccagtcatggtgcggaaggccaacggaaaatggagaatgtgcgttgacttcaccgacctcaacaaggcgtgccccaaggatcactttccactccctcgaatagaccaactggtggattcaacagtcggttgcgagctattgagcttcctcgacgcttactctggctaccaccaaatcagcatggcaaaagaggacgaagagaagacagcattcatcacgccgttcggggtattttgctttgttaagatgccgttcggactgataaccgctgggaatactttccagcgcacggtccaaggcgcacttagcaaccagcttggcaataatgtcgaggcttacgtcgacgacatcgttgtcaaaaccaagacaggcgactcattgattgacgatctgcgggaaacgttcgacaacctccgacgatatcgcctcatgctcaatcctgagaagtgcacgttcggagtaccgtcgggcaagctgctcggattccttgtctctggcagaggaatagaagcagacctcgagaagatcaaggcaatcgagaacatgaagtcgcctacaagactcaaggaggtacaaaagctaaccggatgcatggcaacactaagcagattcgttgctaggatgggaaaacgaggacaacctttcttcgctctgttgaagaaacaagacaaatttgtatggacacaggaagccgaagaggcattcattgcactcaagcgctacctatcaaacccccctgtacttgttgctccccaacctaatgaagaattattcctctatattgccgccacgccatattccgttagcactgtcattgttgtcgagagagagagagaaagtacatcgaccagtttattacgtcagcgaagctctccacgacgcaaagacaagatacccatagatccaaaagctgctttacgcagtcatcatgacatcaaggaagctacgccactactttcaagcccacagagtcacagttgtctcctctttccctcttggcgaagttgtgacaaacaaagacgttgtcggccgcattgcgaaatgggtagtcgagctgagccagtttgatgtccactttgtgccacgaacagccatcaagtcccaggtactcgccgacttcattgccgattggactatgccagataacaaatcagacaaccaaggcgacaatgaaacatggacaatggcgttcaatggcgcactcaacagccaaggagcacgggcaggatttatcttgacgtctccctccggagatcaattcaagcacgcaatccacctcaacttcagggcgaccaataacactgcagaatacgaaggactactcgccgggatacgagctgcagctacacttgaggccaagcgactaatcgtcaaaggggactccgagctagtcacgaaccaggtgcacaaagattataaatgctctaactccgagttatccaagtatctcgcagaagtcaggaagctagagaaaaggttcgatgggatcgaggtccgacatgtctaccgcaaggacaacgtcgagccagatgacctagcacgacgtgtttccagacgagaatcgctcgagcccggcacttttctcgacatcctgatgaagccatcggtgaaagaggttagcggcgaagtcagcccgaacacccccgacattagctcggaggtcaccgaggcagaacgcgccattgccgacatcgaaaccacagacgactggcgcatcccactaatcaaattcatcagcagtgaggagttgcccgaggacgatccagaggccgagaaaataacccgtaaagcaaagatctactgtatggtcgacaatgatctatataagaaagtgccaaacggggtacttctcaaatgcgtctcgaccgacgacggcagacacctcctcctcgacatacatgaaggcatatgtgggtcacacgccgccggtcggacattggtcggcaaagcttttcgacaaggctttttctggccaaccgcccttaaagattcatgcgacatggtccagcgatgtgaagcctgtcaattccacagtaaacacacaaagctacccgcgcaagcgctccagactattcctctgacttggccattctcgtgctgggggctagatatacttgggccattcccacgaggacagggcggctacagattcctattcgtggcgatcgacaaattcaccaaatggatcgaagcaatacccacgggggaaatcaaggccgacaacgcaatcaaattcatcaaagggatattttgcagatacggactaccacaccacatcataactgataacggctcccagttcatcagcgccgatttccaggactactgcatcgggctgggggtcaaaatatgcttcgcctcggtctctcaccctcaaagcaacggacaagtcgagaggggaaacgacatagtactacaagggatgaaaacccgcgtctacaacaggctcatgtcacacgacaaaaagtgggttgaagaactcccatcagtactgtgagccgtacgcaccacaccgacaacgtctaataaggaaacacccttcttcctcgtgtacggctctgaggccatgctcccaggcgagctacaacatcagagtacacgagtacagaagtactccgacgagaaccaggaggagcagcgagatatcgatgtaaatcttctcgaggagcatcgtgaacgagttgccgtccgagcagccagctatcaacagatcctccgccgttatcacgagaagcgcatccgtgcacgcatactttcgatcggcgactatgtcctccgacgagttcaaagccaagcagggcgaaacaaactctcacctaaatgggaaggaccttacacgatcacacaagtcttgcggccaggcgcattcaaaatcgcagacggcgacggtcgcgaattagcaaattcttggaacattgaccaactacgtaaattctatgtatgagtcaataccatccatacctgtaagcacccttacagtatcaataaagcctatttctaggcccatatcacaattaaagtgtttcgcccgatgatccctcactctgatgacacctagcgttgaaacctgtccttatgtccctttacgccgtctcgacaaggcctccgaggaacctaagggatcttcggctggggacacccagagccgataaggccttgtcagatcctgtagagacgaaagaccatgtaagatctggtcgtgtaagagttctcgccgtgcgtattaaccaagccgtgaaatcggaaatcaactttccaacttcatggctgggggctaggatcagagcttattcaaccaaggcagttcaaaggtccaagagccttatcctccgagaaaattcctccgacgacaaggctgggggctagggagagtgtacgactcaaacggctgactaaagtcgttaactgagaacgcactcttacacatgacatctagagtaagagacatttgtcaaagatagatttctttattcacaaaatacttcttacaattttttcaaaaatctttcgctacattacatcttttcctaagatatttgtcacagggtacgagtactaccaagaaggccaacgccagtccatagactggaagatcttctcggctgtaacattctgaaaattcgaccaacaaaatcaaagactccaaaaattcagatcttcaaaaaaaaaaactttttaaataaattgcatcatgccaattttattcgaagattttattggattttgatttcggatttcatcgatcacaaatgggaggaaattaactaggaataaaccctaaaaatcaagtgggctaaataaataattaaaatataaattaaaataaagattcggtgggtttggaaataaataaaatgttatcgcaaccatattaacaataattaaattttaatacgatggaatgagaattaactttaattaaaaattcaaatgaattatataaacaaaatatgagtgatattaaattaggtgaatcttcaattagaataatataaatatggggtaaaacttcatttatacaaaaaattaagaatttcggaatgaaattcatatgagaaacactctaaaatcggtttattggaaaagtgcattgttcattgcccgccacgtgttcgacctggtccccaacctttcccctcccctgccacgcgcgccgctccgcctcccctctgccgcgtcgctcgccgtcgcatcaccgtcgtcgtcgcgtcgagccccgtgccgagccgcgcccgtcccgctgccgcgccgctccccgtcgcgtcgccgtcccgcgtcgcgtcgccgtcccatcgccgcctgccacctcgccccgcgcgcccacgcaccccgtcccgcccgtcgcgtcgcagtcccctcccgcgccgagccgctccggagccccgcgccgcgccgcccgctcgtcgccatcgccgagcgccgtcgcccgtcgcgtcgccgtcccgtcgccgctcgtccgtcgccgtcgcgtctcgcgtcccgccgcgcgccgagccccgcgccgccccgagccccgcgcgccgccccgagcccagcgccgccatcccgtcaccacagccgcgtcgccgcccctccccctcctctctttcccctcttcttcttcccctcttcccctcttccctcttccctcctcctccttcccccttatctctctcccttcccctataaaagcctcactattcccccccttctccccgtctccaccacccactcctccacgccgtcgcgccgccatcgtagtgccgccgcgccgccatcgtagtgccgccgcaccgccgccgtcgtgctgccgcgccgaccgtttccgtgcccgcaccgctgttctcgcgccaccgtgagccgccgtcgctgccgccgtcatcgccgctgccgccgccggtgagtcgccctccgtttccctcgagtccgccgtcgccaccgctcgggtgggaaagagagagagccgagagaaagagagggagagccgagaaagagaaggagaggaagggaggaggaagccaggagagaaaagaaaagaaagggagagaaagaaaaagaaaagaaaagagaggagaggaaaaagggaaagaaaaagagaaagaaaaaaaaattaagagggaaatttaaaatatttacaaatattagaatttaattgtaggattaatgaaaatatagttagataaactcttactaattaaatacctaaaatactagcatttaaatataggattaatgaaaatataattggataaattcctatagattatagataacttttagtactctccataagaaatcaattcgcggtattaatttagatgtaattaataattaaacaaatgtatgaattctcgtaaattattgtggattatttctgggaaatctctataaataatcgatcaacggtagcgattcggatttaattactagggtgttagccgtgtattatatttaatcatagactaaattgagtcgtataatattataagataattttaggattccgtccgacatttagctcgcgataagaaatttctaacctaatatatggatataatgctagggtagattaaattaaaaacatacgacaacaaaatattgtaaccgcaaaataatttaaaccaaaattggggtttgccatagttcgcggatagtaaaattaataaaaaggaattgactttcgcatttgacttccatttggatttacttggatttttatttgaattctaaccgaattcaaatcaattttcgcacgtaactatagagaccgagggagccgcggatccaggtgaaggccaagacccgcaagacctcgagcaaggcaagtcatcactattccttgaacatgttgatcccaattgcgaaattattttgtttataaataaaattgcatgcaatgatgaatatcctacttgggattatgccatgccttgattattgtttacccttaaatctttgtaaccatgtctacgtatgagtccctagtcaattatgacaattgcttagaaatgctattctagaatcatgcatactcatatttatcaaatgctatatgcttgggcaattacctttgggaaggtaattgagatgcggcatgtggagacatgagcaccacattgccatgatgttgatgacatgatttgtgaaaggagaaataaaattaaacaaatgttttcgactggggcggctggaggacttgggtggtgtccggtaaaggctagtgccgtccctggtcagttaaggactgagccatgaagttaaacatgaaacgacctcagtacagccgtacttctcgaatgggtatagacctagcggagtagatagccgagcggaggcagtatccctgcatagtggtttcacttaggtgtgtggacgaacaagcagtctgctggcggatacccgatacggatggccaaatggcggatacccgatacggatggctagagactgacttggcaagactacaagactacaaggagatacccaaaaggggacagcgtggattgggttcaactacagaatgcgatgttaggcttgcgtgagttttccccctcgggagcgccagaactcctctcactgctagaaaccgtgtacgcctagagtgcatgagggcctaagttcatggagcggatactgccaaagtgaggttattgaaaggctttgccgtggcaagtctcattcgttgggacgtaggctcatgtgttgggcaagttgcggagtacgggtaaagtgtacatccactgcagtgtgagtaaaccaaatctattcgaatagccgtgctcacggttattgagcaccgggacatgtattacacttggctagactctaaattcttaacttgtgtgggatgggatattgcatgatgaattttatgctgttggagccacttcctgagaggcgggaaggtggacgtcctcagaaaaccatgacgaatcaatggcgggaagctatccttgggatcacaatggatggtggacagaaccgtcgttgtttaaatacaaactctggtactaaaatttgatcagtcaatgctaggtcttaggcttgtgaaaagaattacaaaacttgctttgcgcaaaagaactatggccatcctttgaactccccctttcatatgcattgttgctgtggtggcttgctgagtacggttggtactcatccttgcaaatataaaatttatcagaagcgggagatgaagcctcggaggatccctatgcctactatcaggagggagatgaagacgatggcgtccagtaggtcttagtatggtcgttgcctgtggcaatggcatgccgctgcctgaattctgctgccttatctatttctgcttttggatgtattccggacctctcggtccgatgatttaagactatgcctgcgggcctatgatgtaataattcgtattagatactcgtgtatgtgcacttgatattccagctatgaattcgtgtgtaccaaactacttgatccagggaaatggtactgtttacacgattgattcctgttataaaaacgggggtccacatcggccaacggcgacattgaccttgccagatggtctatctccgccggagtcctccgagaacgagcaaaaccctcacggagatattcgaggtccaggcgcgggcgatgatttcgtaggcaagccaacacgtgccctccggcgtatcggctcgatcgacgacactcctgcttcaaggcctcgtcgatacgcttgccgattccatcgagttgggcacaggccccattaagccacgagatgtacccggccgccgactcctcgggatctccgcggactactcgaagctccttgcatactctggccatggatgtgcagcaactcttcaagtacgagttaaaccacacctcacgacctcggagcgtttccacagcctgctctttcttcacggccagcatggttctctcgagctccgccacttcaaacttcgtcttccagtattggatatgacgatcttggctagcaagggcaccctcgagatctactaaacgtaataaccactaagtcaagctatacatctctttcgggaacatggctaacctagtcaggagggcattaaggggtgaagggactactaacctgaggaagtcgtcgccatcccctctatatcaaggggttgatccacatggtcaggcgagacgtgtggttcaaactcgagtaccggaattattgccagtgactcaggctgcccgcgctgctggacatcctcgtcatcagcatctctagaaaggacaaaagttcccgaggtcagcataccaaagtaagctgggatagtaatcgcacgcacgaaggcggtcagagttcaagttttacacattatctaggaaatacaagaagtcctactcttcaaaaagggggagaacagactcccctagatcaccgacttcttccatcacctccttacgcgtgtcgctggccgccctctggtccaagatctcgcgcagatcgagttcaggacgcgacagccttacacacgcgaggacatgacacgccccggtgtagatcctgttcgacgtctcctccgcaatcctggccgcatgcttggaggggatttcccccatcgccgtcaccagttccgcgagagaggaggtcagcgaaaactcatcgggattcaccgggatcgtggacttgacgccgcactccccggcgagctggtgaaggccagtgtaggtgaccctcaatgagccccggatctcggataggttgttcccgagttccgacattcggtcctcgagccccttccgttgtcactcgttgtcggccaccaactcgcgtactagtctgtcagcacgcgcgttcgccgtcgccgcttccgacctcgcctccgcaatctcgcggccgatgccgcgagcaccagcttcaaggaggcgccccatctcgacttggagctcctcccaggtgaggactgcaactggcagatcacgacctgccgcggggtcgctgactgggccactaggcgtcgcctcccggctcccggctgcgggcacgacatccgtcgaggccacgacgggcgacacactggaagctcatccggacttggctcgcgcagcctttgcccgcgcctccctacaggacgaccacgagtcagacaacaatcgaataagaagcgcggggattcaagaattcatctacttacttctcgctaatcgtcacaatgcgttgtcgtcgtggaggtgggggagacgcgtccgaggcttgaaagacaatcaacgcaaagtaaggaaaaatccttcttgctgcatgatttaacgacaaaataaattaccgagggggtcgacgccttgcgacgatgtccgcttacagacgagaatttcctcggctttgtcggaacattgccaccgctagtggtggcagcatcagatgcctccttgacgaccttcactttcagagatgtcgccacctgatggtccgcgagcggtccaatgatgtcagtcaaaggaagggcctacgcttaatcaagtcataaagtgatttcgaaaggagaatgcgggatgcttatcgaatatacttacgttgatggcttcatcacgttccgccgcccccttttcataaaggggcacagggatgtcactcgccgtggtcgggccactgatcatcacctggccgacgcggcgctccacgatttcgctgctcagacctgttaatcgagaaccaaccttcgataaatcaagaggaacgcgaacacaagcatgtcaagataaatgcgagaaagataccccgaggagaaacccgggtcgcgtcctctggcccggaatagtcataagctggatgggcccgagcctgaagcggctggatccgcctaccaacgaagtctgcaacaacttcatatcccgacaaaccctgtgctcggagatcgtcgatgatgtcgataaacgactgaagagagggggtcaaggggggctttgcggtccaagacggaatcttgtccggttgatcttcaggaaccacgaagacagggttcgagttcttgatctcaagataaaaccacctattccgccacttgctgcgagaagaagggcactggaagggaatgtaacgcgacttcaggccatcccgaagtcggaacccgacgcaaccagataccctgttggattccatccaacgcagttcgtagtaaaagcgaaaaagatcaagaaaaggctctaccccgatgtaggcctcacaaagatgcacaaagatgctaaagaaggcgatggaattggggttcaaatggagaagagaaagaccatagaaattcaaaaccaggagaagaaattcggaagatggagggagaaaaccgcagagaacacaatcttcgatcgcaaccatgcgacccaagatgagctgaggattagtacctcctgcttccctctccatggttccacggccaggaagagcgccatcctcctggagtttcttcaacgttgcactggtggaagccgatttgccgaggtccattgctgatcgaaggtcgccggaaaacgagcctaggttgttgaactagggtttcttgtggtggcggagaaggcaaatagtgcttgcaggtggtgtgtgtttaacaggtttggtggacttcaaaatggactctcaaaattcctttaaataggcgcactaccgacggtgcaaattccagggaatagagagagatgcccgccagaaatttctgggtccgttacgcgcggcggttttctggacttcagtataaaattcgctcgtgaccgttgggcttcaaatggcgtgctcgactatggtctatctccgcggtcctcacaccgggaatgacaacagtctcgacacccgaagtcgtaaatggttgcacgagttcattttaagcagaagtcggggggctactgtcagggttacgggttaggcataccctttacccttcgatatacgttacatatcgatatggcataccacgcgcatgcggatatttcctgtatattctaagaaaacctttcatgaaatctacagacgagaagaatcctactcgggcagaattgggtcgttgacgtatcgtatagggtctgatatctccgagttctacgtggagacctccagatctgcgatataaaagggaccccccggggagggtttaagggatcaaatctcagagccaacacaacctatacagcctacgaagccagagcctacgaggagccaagtcatcgagagctagtcgaaacaactcgactataatctcgccggatccgacaagttcccttgttccctttgtaacctgtattttctaccatataatcccacatcaactggattagggttattacctatcaaggggtctgaaccagtataattcttattttttgtttgcttgatgtcgtactacgtagatgcttgtaccaacgtaccctaataccctctatatccggtctacgggtatcacccgtcgacataggtcgtcaaagaaaaagtgtgattattacttgttcgtcagcatctgaaccaacttcatacatgtacagtccaaatcactccatgggctgctggcaatctaaattaacgtgatccaaagccattaacagtattgcaggttgcagcctatacagggcacctacaaacgtacgtgtaagcgggcagccactggcggcaggcgggatgtcggcttcggctccttggaaaggaaggcactccctccgtacctacgccgtttatctttttaaacatatttttaaacatatttgactattcattttattcaaaaaaattaagtaattattaatttttttcctatcatttgattcattgttaaatatacttttatgtatatataaagttttacatattttacaaaagtttttaataagacgaacggtcaaatatgtttaaaaaagtcaacgacgttaaatatttagggacggaaggagtattatagatcggagatggacggccgagtttacttccaaactttttcttcaaacttgcaacttttctaatcacatcaaaactttcctacacacacaaacttccaacttttccgtcacatcgttccaatttcaaccgaactttcaattttagcatgaactaaatacatcctacaggtcagataccgggcgacagacaaagctattgggaagagatagagagatatatgcaaggaagcacatacggattcggacgacttaccaaggtcctggcaaaaacatcttcaatttttataatagtggagaagtgtttgcactctactttccaaactactccggtatatacatgactttttctctcctcatatgcttcacggtatagttggccatatgggctgcccggcatggcatggtccaggcccgatcatgctcgggccaagatttgttgggccggcacaacccgaccaatacgccgggccatgccacgtcggcccacgtgctccactgtggcccaggcatggcccaataagggtcgggccatgctgggccggcccgaaggcacatgcagcccatcatgttttctttgaaataagtctatttcccctccatactctttgggttgtgacatataaaaaactaaataagtctattttacgtccctactctctagtcgtgccatataatacgtctatacgtctatatggttgaaaataagtctatttcacctcgctaaagttcgtgccgtgccgggccggcccaccgtgccgaggcataggtccaggcacagcccaacacccgaaccgtgccggcatgggcccgacaacgatcaggccgtgccgtgcctgggccaggccaaaatcccctgccttgggccgggccgttgggcctcgggcgttatggccaactatacttcacggtgaaacaacagtagtaggagtacgaagcaaaatgccaagatccaacttttttatggatcttcgattttttttccccctaaagaccactagggttgactagttggcgtagggttacagctaatggcttcacggtacgactcatttatcttttattttaacgattgaagtacaacgttttagactctgcaccaaataaaaacacacacatttatatttataaacagaaaatttttccgtttgaaccatcctttacctaacatttttcactttggactaggtaaacatatcttttatcttttgtgtcactttgaaccaccccagttttctaatccattcacatacaactcatcgtatattgaaaatgttatttatatataacttcgagagttcattgatgtactagagcggtgtcatatttgaggcaactgcgagttgtcattccccactttcttaagcaaatgtttgagagaagctgattgagaagatacacaaaataaggtgaaccattagcatacgattaattgagtattaattattttaaatttaaaaaatagagtaatatgatttttaaagaaactttcatatataattttttttaaaaacacacaattaaaccattcgggaagtatgcaaaaactggggtacctttcctctcgaccagcttatgccgaacacagactgtgttcgttccgagaaagggaagaaaacttccttgttttccgcgcacatgtttctcgaactgctaaacgatatgtttcttttaaaaaaaattttctttagagaagttcctttagaaaactatattaatttattttttaattttaaataattaataattaattaatcattggtgaatgactaattttcttaatcatacgctaataattaactttttttccaacaaaggcatagaatacatgacgttgacttttaagctgttataagaactacaactagtatgcttgtgaagtgaagaaccattcaggaaagttcagaggtttctgccgaacaactggcctcactcaggctgtgtttagttggatccaaagtttagattttggttggaattggagatgatgtgactgaaaagttgtgtgtgtatgacaggttgatgtgatggaaaagtactgaagtttgcatccaaactttggatctaaacacagccaatcagcaggcgacagagatctcatcaactgccctgctcacctccatgacagtttacagttaacagaatcttccatgaaaactccgaatagatatataataagatggatcccccttcaccgataaaataatacttacacttagattcttccgggaaaattcccaccatgagtatattacatatgatgagtaattgatctcagagctaagagcttttccaaaaaaaaaaaagaaataaaaagaaaagaaaagaaaagagatgaaaatgctctataaaatgaagaagtgacacttcaactagtgttgcactaatattggaacactcatttagggtacttgagaacttgaaattacgataatccaagcctaacttgctcataggaaactgtccggatcatgagaggagacaaatccgaagctatataaagtcttaatttggaaaaaggcctaaaaatggaattaattgtttctaccactatcaaaatgctagtacgagagcgcaccaaaacacatcatctctcccaattctctcatacaactaactattcaagacaagtacaagatgatctaaaagattaaaagtttgacgacagaattgcacatacatatgaacactttcttcagtataaacgtggttattgctatgcgcgctgtgaattcgattttatcaacttcaacttcaaattaagggactaattaaaacgaggaacaaatcaagccgacgacaagacactaatccaaaatccaaagtcaaatcataagccggcaaggacgtagtcaccgtcgtcgtcgtcggtagtcgacgtataaatcgttctctgcactttctgcaggctgcagcttcgcctcttcttcctatgctctgcatcctaaggtgaagtggatatgcatcaatagaacggacaagtgcagaactttcgaaattctaactagtctagagtaaaacatctcaacctttttaagtgaattatttggttggcatgtagagattattataaaatgcagttttggacatcaatattggttttatttgagaagctacagattttgagaagcatttctacgacggatatttatgtgctttcttaggcaccattagcatcaagtttttttttaagatagatatacactacttctgcttttaaatatacgatattattaattttcagatatgactttgaccctttgccatattaaaaaatataactatcacttatttattttattgttacttgaatttttaataattgttaaaggtactttaaatgtgatttatatcttgcgctatatcttttcataatatgaaatgatcctatccaaccttgcatacggccctgccaaggtggcagcgcttagcgccatgatcgttagcactatgccgttggacctcatcgctaatcccgatggtgctgaggtatggtttatttttaaaataatttctggcacggtttacccttcaaataaattttctaaaaggataacatttatcaaaatttcgccaaaacatacatcatgtctctcatacaactactctctccgtttcataatgtaagactttctaacattgcctacattcatatagatgctaatgaatctagacattattatatatatagattcattaacatctatataaatgtggataatgctagaaagtcttacattgtgaaacggaggaattacaagataatctaaaaaaaagaaaaccatatagcacagtgcagttaatctaaaagtgcaatataatctaaaagtttgacgacataagtgcagttgcatatgaacacttgcttgcgtacgtgcatggttggtttgagcgctgtgaacgcgatttgtcaacttcaacttcaaattaggggactaaacgaggaacaaatcaagcccacgagacgacacatacagtaatccaaaatccaaagtcaatcacaaggccggccagatcatcaccgctgtcgtagtcgtcagtcgacgtaaatcgttctctccattttctgcaggctgcagcttcgcctcttcttccttttttgtagactgcagcctagatgaagtggacatgcatcaatagaacggacaagagcaaaagttttgaaattcgaaccattcttctgcaaaacacctcaagcttttaagcgaagtagttgctggtaagtggtggtattataaagagtacaccctccgtaaaagaaaaaaattcaacttataaaaacgaatgtacaaatgtgtttatccagattcgttcttagaatttcattttttttatagagggagaaattatagacatcaacactggtttatttagtgagctaaagatttcgagaagcatttctactagcgatatatggtctgttagacgccaataatataaagtttttattcttaaaaatgatatatatatattgcttatgtttttaaatatatgatgccgtttgcttttagatatggctttgaccatttgttttattaagagaaacataaaagtataatttcttcattttattgtcacttatattttattattgttaaatgtactttgaatacgacttttatcatgcactaaatgttttcacattgtgaataatcaaatgctaccacaataaaagtcaacaccatatatatttaaaaacggatagagtaacattcataaacaacctatcgtagtgaatgagtatctaacctatcgtagtgaatgagtatctgtgcgtgtatatatatatactagctaaatgacggtgctttgctatggattaaagaaaatgtattaatgtgttacccatctttttctaaacgaaatattcatcttaatctaattttatgtggctatccatttagattggatccttttaatattaaggagttcaaggggtaatttgtaaaaacttactgtaataagagtaggcggagtccaccacaactgtcttcttttaaatgagcacaaatatgcaaaataaaagtttatgctatctaaagtgtacttttaacatctcaaactgaaaaagaaaaaaaagtgcaaaaacccattgccacaaaagaagggatcaaacccaaaaccaatcgacaattacgagccaacagagtcatagattactcaaaacacgtcatggattactcaaaaacactccacttgtgcactcgctcgcgaacacagtaacaaaatgtgagctcaagcgaacattcccagctcgttccaggagctttccctcccattctcttctcctctatatcaccccgcaaccatgcctctcctccattgtttcctccaccgatggctccttccacgagtctcctctcctggtcctcctccgacgacgacgacggcgccggcgccggcggcgagctgtcccgccctcgcaggcggtggcgggcgcttgtcctgtgagtcaacggccgagtcaaccctgcgttcttggttgggttcagagatggtttggttgctcatgaatttgtgttttttttgttctttggttggttgcagggggctcggggtgaggaggaagaggagcatggagggggtgttcgggttcagggagatgatgggggaggagttcatgggcatgttcctccccttctttggcaagatggttcagaaagtggtaatgattttcatccaacctactagtatttattacctttccttcagggagtggtaaaaaaagccatattttttgaagttttttacccaattgtgaatttacacatgcatctaccaattttgagatatattatcgattttgtgcaacattcagagcaaagatatgttagattgataagttcatcccaataaaagaagagacatgcggacattgttgttgatttcaacttggatattagaatttagaagtgctccctgtccgctgacctgaaatttgtgcttttttcaggtttcagaagaagtagagaaagcaattttcagacaagtcagcacaccagcgcctccaaggtgaggcttgagacatatactagctttcatttattatgattactaaatttcacatgtaataaaaaaaatttgatgtttagtttctttctgctctaacatacttaatttggttctttcatctgcagactgctagcaggattgaatcagcagcgtccaaggtatcaactcgtgttcctgaatgaactaaagcctgtttacacactgatgaaattagaagccaaggatggaccgggtcttaaggtggctatagtcgaaagactcgaaaacaatcagatgcgcatcgtcaggttcggtcatcttgcttctgctaaggttgaagttgtagtcctccacggcaactttaatgctaaaaatgaggaacaatggacccctgaagacttcagcaagcagatagtatgcgggcgagagaaaagcgcacaacttctcaccggaaatctgacactgaagctcaatggaggggaagcattacttgagaatgcaaccttcactgataactctagcttcactagcactaagaagttcaggctgggtttgaggctagccaacaattctgaagatagggttcttgaaggaatcactgaaccttttcgtgtaaaggagcgtagggtggagggtatgccattgtccctaagattcagattgtttgtttcttcagaaatgtcttttggaccttatagctgagactaataatatgcaacttactatttttgcaggatttgaaaagcactacccgccaatgttggatgacgaagtttggcgtttggaaaagatcggccgcaatggagctcaccaccaggccttgacaaacagtggagttgatactgtacagaagttcttacaatcatattttacggacgaaaagaagctttttcaggtagaggttctatgaatttccttaaatattaaatttcagatgatgtttccataacacaaggacctgataatatagatgagccgttggtttcaaaagagaaaaaaatagactcaccgaattccctaaaaaaagtgactgacagaagatctttgatatttgtctatagacttttagcaagatgtcacaggcagcttggaaaaccatcataagccatgccatgacatgtgaagtcggtgacgatctttgcttgtatgaagtgaagggcaacaacgtgggacttttcttcgatgcaatatatcagcttgttggggtgaagtttggtgattcttacaagcccataaatgagctcgacgaaatagagcaggtactgtttcctcacttccttcaacaggagattttctcactattttcctaataatttggtgttttttgttcacagagtgcagttgaaacaatgaagcaattggcttatgcgaatataagtggtattcagtatgaccataagatggtcaacaactatcctgtaccgcttcataggttccattgtgggggaacttctatgttgactgactttattcctaaacagcagatcccaacttgtggtaatatcttgttctgagaatttcaatcactagcgataattacttttttggggatttttggtcatctattccaattgtttacaggtcaatacaattcagccctggctggtcaaccatttgaatcaacggagaacttttcttcattccaagaagcctctaatgtaaggaagatattttgaaatatacaaaatacagtacataataaaatacatatgcatgttagtctaagatagtttcatcaattttctagcaggcttcagtggatatgtcaagatttgtgcagggtcaaacctccaacgtgcagtttagccaacagttgggcatgggcaattttatcccacatcattcaaatcaaggaacattcatacccagaccaagaatcactcctctgtgtatacctaataccgaaaaaacatattttaatccaaacgctcatagcagcatccaggctgatcatgctgccacacgaattggccagtatgcacataatgagcgatctcattcacctgaagaatcatacaaggtaagaacctttttttatgtaaaaatctatgtattttgtctagatagaaatcgaagagtaaaaatttgacattacttgtgctcttcattcaacagaactaatccattctgtatttgtgttgacagcgcttttctccagataatttcctccatacagatgaagttgtggctttgatgcaacctcacttagtgcctccaagcaacagtaattactctatgctgatttttttttggctacatctgattcattcatcttgatgctaattactaaggatggcatctgcaggcgagaatttcagtaacctgctcaacctatcaagcaatgaccaaacctcacagcaaattgccgctccattccagccatcaagaacaaacagctttgactccagctcatgtgatcagctcatacagaatttcatttctcagttttctagcaacgaaagagttgcggtgccattgtccccacgcaagtgggtcaagatcagggcagcgctgaagctggcatctgtgggtaggctctccagagcctcgagaaaggcttcgcatcgccccccagcaaggccaaggcttgtcccaatagtatgagcctggtgaaaacaggttgtaaaaaatttagattaaagatcgatcttggtgttgatgcagaagttctagagacatctggtcaactgaaactaatgattttgtcaaaaagttaggtgtatgtaatctgtacatagtagagcctgcttgtacttcatttagtgttagtatttcccagcagaggattctgacctctttgttatctctgaatttagaaccatgtaaacaaaaagaccatgtaatgtattccttttttgcacctaatgatccttgagagaaatttccttttaagaaagttcacatctatgatgcaatggtaaaaaaattgtaattggcctaaatttgacaatttaacatgatgaagcgtacaaacttgtcattgaacttctctttgttgtaatggcacatggcgggcatctattccaggctaatgtacatacaatacaaccgtaacttctgcgtgtgagctatgtactgatctcaaatttgaaaaattccttctgggtttacaatttctctgtcctgttggaggtcttatctgtttatctctatctttgatgtctcaaaaccaatttttccatcagactgaacaatccactgatccttatacagggttttagaaacatccttctttcagtttcctattgatctcaccttggcatagtgggatccaccttcgcactagtcgattattttggagtgttaattttgccatttcgagttcttcttccacccgtagtgctgaaaggtagctgcttgctgttcctgattggggtttgcagccttttctctgacattggcgacttcattgcaagatttggaatcctgagtaaattcaaagcagcacaacaggttaaagcaatccaatgcacacaattttcatggaaaatacaggatttaaattggacttacttcgttgctgtaattttcgtattctttgtttgaggtttctttataataaaggcacctctgctggcaataccatcagctttgaggccactggtggacaacaacatttcttggtcggaaggcgagctagtagcagcatcaaagctatctgagtcatcagtttctactggttcagccctacgcctttgcttgtcgggatcatatctttggtagaaaaatgttggaagctgagttgcgccaggctccagctctagaatggaatttccattctcaaattgattattaccgacagccattctatcggtcttctgaatgccattgcaattttcagccaagtcggatgagttgttctcactgaggacaccagaaaattgaaagctggccttcttttgcattggagtggcattgttccggaccttttacataaagaaatataatattcattaaatgaacatcattacctttcttgtgaaaagattaaaaggaataataatctactgaaggtaacataagtactctcaacaagaccatgaactacgctttcgtcagttttagtgttgtccagatcattcacaaaatgattctgaacttgatgtacaaatgcataaatctactgaaggtaaacataagtactctcaataagaccatgaactaccctttggtcagttttagagttgttcagattattgacaaaatgactctaaacttatgtacaaatgcataaatagcccatctccatttagaatgtttggtaggttattttcctatttgacattgattggaatcataactagcactcacaaaaaaacttcaatgtgaaaaggaaatatttttgtgatttccaagaaaaagagttgatcttgtgtgaaagagcagttaatacctctaagtttccaacttcttccattggctgtctatttttagggaaggcaggtattgcattgcctcttttaattctatacatgtcagggcttgactgtgtgctttgaatgttttctggttctccttcctttttagccaatgccgccttgagggtagcaatctgaaacaagagcagagaaaaacgatgattatataaatctaaacagaagtaccacatctagatagtttatataaatgagcaatcaggagttaagtgaacacctgttctttgagctctctaacctcactgccttctttgtttgcttttgctgcaccaagctcaactgaagc

SEQ ID NO: 7503 - DNA, 39465 bp, Oryza sativa
gatttaggatgttacttgatttggggatatgaatctcacctgatttgggagaaaataaagagattaatagtaaattaacaatgaaaaaaaaaacaaaagcggatcaaccgggacgtggctctatcatctttagtcccggttggtaacatgaatcttactcccgggaatctgaaccggtctttagtcccggattccttctcccggttcgctacctgggagtaaaggtagttgtgaaccgggagagatgtggggttctccagtagtgatatataagattggcatacgtgaggtgataccttgaagagaatgacactgctagtgttggcaccagtaaaaaaaatggttgcttaattttctggacatagacatacagtagaaatggaaggtattgggacaaccactacaatctaatagaatcgataaagagttaaggcattccttcatgctatgggccctaatatgagctcgacatattcaagttatgagcatggccgacaagtttatagctaggctcgatcgagcttggctcgatcaaaggtgggctgtacttgagctcagcttcgatcctccagccatagctagaggtggattctggcaaagatcctaccaaattgtttttctctagtttcttcaatttctcatagttcttaccatgtatttttcagctaatcatccatcttgtttttctatgtactggtcagtgacttttggatgtggctgtgttgtgctaccttacctcttcctaatgaatgatgggattaatttaacaaagggtaataataataatgtgtttagtgtgcatgtatgatggtgatctttcatgtagactgtatattccagttggtacaagccatctgtttatctatatttgatccacagatggggttttgttctgtttccagagcactggtaggtgtgtaaatcaagtttcatatagatgaaacacatttattttctgtcttaataattatcatcatgagatgtcatcagtttagcctatgtggcatctcatttaataaggttgaaactcttatgaaacttccactcggaatagccatacaggagtgcactaagacaaagaaaatattaataactctcccataccatatttacctcggtaacaaactcgaagcatgtatcatcccactacttccgagtcactaacaaccaagatattacctgttagttgtaaagtgttgtgtaaatgaatacatgcattagggtgtgttcgctggttctggttcccatccagcacagtgagcacggaaaacggagtgatctattagctattttttttaaaaatagattaatttgattttttttaagcaaccttcatataaaacttttttaaaaaaacgcaccatttagtagttcgaaaagcatgcacgtggaaacgagggagagaggttgggaaaaggggcatccgaacactctcttttttttttagataatggaatataatatcccggcctttcctcaaaaagaactacagccaattattacaaagatccactccagaagagagtgtagtttaagacaagttgaacacaccaaacaagagaagagaggacccaaactgagaaaaacaaaacaaaatgtggagctagaaggcctcgtcaaggcctaggactgaagttcgaagccaatgcatagaccaatgacaatatccttgcacgaagaggtttctccaaagtggtgcccccaaggaggatgcgacgtggatcgccgccaccgctcgttcggaaccgaagcaaggtttttacccagagaatatggtagggaaaggaaaggggtatgctaaaacaacgcctccaaggaggggaacgacgccacacggcgtcgccgttgtcagctagccaaatggctcgacaaggctttcgcccgcgattccctgtccaaacccacaccaccaatccgcacaagaaggatcgtcgtcggtcaacaacattgtcccttcagcgattcggccaaagccaccacccacagttgttgccgccgtcgacggcgcgcccgcacccggactcctccttccccgccgccagaccccttccccgcctccacataccgatgccgacgacgacgcaccatcagccggatgatggccttcaaccatcgccgccataggtaccatcgtagacagccgccaccgccactaccacagccaccaacgtcgccagccgccaccgtcagccaccatcgccaccaccaccgccaccgccacggacacccccgtccagccaccaccgtcagccaccaccgtcgctagccagcgccgccagacgccagccgtccagatccggccggggtagcgcggatcggaggtgcagcgcgaaacgcaggtcgccagcatcatggaggaaggcgtcacgggcacggcgttcacagccggagcattgacagctgccaccgtcagccaccatcgccaccgccaccgccaccgccacgaacacccctgtccagccaccaccgtccagccgccaccgtcgctatccagtgccgccagacgccagccatccagatccggccggggtggcacggatcggaggtgcagcgcgaagcgcgggtcgccggcatcatggaggaaggcgtcacgggcacggcattcacagccggagcattgacgagggcgccgcgcctccctcgtggcggcgaggttcttgacaagggccggcgtcgcggcacgcaccgcagtccgccgccattgtcgccaacttcgtcgccaccacattcgccaccatcgccgccgctagccacccccctaccaggtccgcggagcggcgccggcgacgaccgagcgcgtcaccggtcaccccggccaagcggggagaccagatctggcgacgccgtcgcccgtcgctggagccgtggagagccgacaccgtggagcgccccaccgccgcgcccaactccgcgccgtcgccgcgccgtccctgtcgccacgacctcgccgtcccgccaccatcgtcgccacgcccacgccggggcgaggtggagccgaggaggatggccccgccgccgccatcccaacgcgtcgcccggctttgccggcgacgagctccggcggcggcgaagcacggaggagggaggaggaggggcggcggcggcggctagggttttgccccctagggtttctatccctcttcataagaggctcacttgctcattttctccgaacactctcttaatgttcatttactcccatacacaggtgataaaacaaacttaaatttaaggcatgaatactaatatgatgattatttaaaaataccatagaaaattacatgatgatcaattgggaatcagagggagcagaaatatatatatggtccctcatggttttcatttgctcatgggttatccgagtggctcggctgctgatgctcccgtcctgcaggtaaacgctgacctgcagagagagttaattaaggagaactcctacctcatttagcaagttgcttgtcgtcactgctgatccatgctgatgctgacttgtactgcttcgaagccataacaaaaaaaaaagttttatactgacttcacttacaattgatcttcacactaccaaaacaaattcatgtttaatgggaggcattttaaatttttttgtcactattacatttagcacttaattatttgccacccatatattgattatatgtggatccttatttatctaggacacgtgagtttggtagaaaatagttaattgtgtactctgccatcccatatttgaaaaaattatggaaaaattttaaatataagtcatgtataaagtgtagtatttatgttctatcatgtaatataaataaaaatactaatcataaaaaatttaaaataaaacaaatagttaagttgaatatgaaaactcacaactgtatttaaaatgagacgaatcgagttaagggtaagatttataatggaggtgatagtcacctccatttttatccatatcatctatccaaaaaaattaaaagtaacttatataaatatattgcatttaatatactagtcctaaatcctaatacatttgccaccaatcaaccctctcattttctattatcacgtgaagtttgtgtagaggttaccatgaggggtggctactcctctctctcctcttctgacacttttcttctcacactaataattgcccttaaaaattaaatatttctacatgcatgcatagagccatggatttaagggcctgtttggtacagctccaatccctaaatttagctccaggagttaagtctagagtggagttttggagctgcctaaacccagctccacaactctagtatattttgtgagagagctccacccaactccactcccagttttggtggagctgaaactgtttggctgagctctagctccaggaggggtggagctggagttggacctgtaacgctccgcttgtcgtgagacgttaaaaactaattcggcaaaaatcctatatgcgaaaatttcgttctttgtgtgcgagtctaagtcgtgccgcggaatctcaattcaaatcctgttgttccctctcgtcgtcatcaaaaatcctccacctcaactttcctcttccaattcaagtctccgaaatcaaattccgaaagtcaatcccttcctttgaatcctctccaaataattgttcccactcccgaaagtatcaactcccctcaaatcttttccttgactccacccaatactcccgagaacaaatatccaagtttccgttttgaatctcttccttgatttctccttgagtcttccttgattccaccctgaaccctcgagttcgaatatcgaatttgaatccaaatccaaacttcaattctcaacaaaccagccttctctgtgaaagtctaaatcgccttcctcaagttttgtgggccgattttgtccccctcggcccatctctctctctcagccatcccctcccttctccgcacgtgcgccgcacacgcgtgtgctgagctgacgccgagccgagttctctctctctctctctcgttctctcgatctctctccccgtttcactccctcccagcgccgattcccgcctctgcctttgaaatcgcgccgccttcgcccttcccgcgcgctcgcgcgcgcgcgccatgccgcccggttgccgccgcgtcagccctgccgcgcctgcgccgcgcagccgcccgaccccgctcgcctttttgcagtcgtcgccgctgtcatcgcccggtcccgatgcccccatgctgcatgcttccaaaacacagagctagagctcgcgctctctccctcctcctttctcccaaaatggcatgggcagagctccctttctctccccatttcttctttttccatgaccggcgccattgtcacctccaccgccgttgcagcagctcgccgcccccaccttgaccgctccacgctgccagcccgcgctcgtggttcgatttccaccgctcgatccaccgccttcgtcgccccttgcatcctcgccgtccgccgctcttcggtcgcctgtgaccaccagccgagctcccttgaccgccaatgtcggttccctctcccaaaccgacttcacgtgcctataaaactgcagccgagcccctcctctcaaccctacccacttcactctccacattgccgcgccactatcgcccctgccctgcagtcgccctctccgtccatcgccgaagcaccagggagaccggtgcgtgcgaaggacacgagaaggggactccgggcacccttctccttccccttccccggcccgaggccggagagctcaccccgcgccgtcggccgcccatcactgcgcccggctcggtagtgcctcctccgttctccctccccgctctctctcgtgcccttagcttttgagctagcacccgtagcactaccgaacgcgcgtggacaccgccccgagccccactgccgccccgcatggcctcgctgccattgccgtccgctcccggaggccgccgctcgtcgccggccctcctcggtgctcctccgtcccatccggcgccggaaacgcattccttgaacgctggaggtgctccccccgccgagaatcgatccctctcccctcccggcgagtttccctcttcctctcaccggcggtgacctccgccgcgattcatcgtcgtcggcccttcctcttctaatctgtcccgttggctcgctcctcctcgctccgctcgtcgctccggtggtcccccttcctttcgccgcgcctcgccgccgttctgccgatgcgcgtcgccgtccgctgtccatctcggcatcccctcttcttcctcctcccgccggcccgcgtggctgccaggaaggcgccacgtcggcgccagctcggccggaccgggtcaagctgaccccggtcagccgctccctccgtctcccgctcgcgcgcgtggtccaccgcgagccgtgaggctgcgcgtgggcccgacgcgtctcggtccatccggcgcaccgctcgtgcaccatccccaccgaaccctagcgccgccctcgcgtgcgcccatcccaccgtgggccgtgtcaccgacaagcgggccccacccgggacccgtgaggtgctcccggtccaccggaccgctccctctctcttccgcgcaccgtaatgggccgccttccccgcgcccgcgccggcccaaatggctcggtcgagcctccttcaaacctcgggccacgcccttgccgcccgagaaagtctaatatacatccctcgtccatttccttttccataaatcaattccttattattccaaaattgcataaatcaattcctttggtcccgcacgtaagtgactgtcaataatattctggagaatattatttctataaattccataaaccatttctcctattccagaaattccatttaagcttccgaaattcatatcttctcaaccgttcgtccgatcgcccccgttcaacctccagtgatttcgtaaaattgagatctatctaatggcactattaattagtctaattaggatctttcttttagtcttttgtttaggtttttgattgtttgcgtatagttgcggttaccggatttttcgtcgatcgtggttttctcgaagattcgtgaagctccctgaagaccttgagcaaggcaagtcaccctttgatcaattgctcctataattggaaaatcattattattttgtttgtaacttgcattattagaatcacacacttaatttgcttggcctcggtttgcgtgccaaaccgacggacctacccagtagtcgaactaattcctgtaggctgtactaccctgactccttgtcgctccacctttgtggtacttcggtatccgtgctctctaagcgcgtataccaaatatcccacatacaccgttgattgtcgaaaaattgagaaatgggtttgagaagacttgaaaacccgacctgaggtgtcggtgtgtttaaaaataaaatgaattgtgaaaactcgcgatgcggcggttgtgcctgtgtggcactgtcccgtattcgcatataaggaccgattcctgtgggaaactcatcgagcataatcaaagtgcaaccacaaggtggaatgggacacactggctaagtaagtagtcggttcagggaaacctcgcatgccaatagttgggaacgccggggcggggtcggttggagccaaaccgggttcctggtaagaaggaagagtagcttgctgaattatcgatcgagtggttggagtttgatttgtgaaaactaaaatggcctatatttatgtgaggatttgatccttctatgtggcatgaggtaaccctgggtcggcttgggaaaggctttgtcgcgaatctctgacactggccagtgtctggagtaagttcgtgtcttgtgggtgaagtgtacccctttgcagaggttaactaactattcgaacagccgtgtccacggttatgggcggatgtgaggtggttcccgttgtgtagatttgttggcctgtgctttgtgaaaatttgttgtggtgtgggaatcgtaaccagaatcagcctatgtggcagatggaggacctgagtggtcagaaacgaatctgtgtgattcgggatgtctgcgggcatcatagactagacttcccgagtggaagcggattgttgtgctggtgggcagctggactctgggagtccgagaaaatgaaaaaggctctgagagccggttaatcaagtgaagtggctctgggagccgagaagtaatgatctgaccccaggaggtcggtacattaccatttgagttgttgaaaagcatctcttaaagttgaatcgagacgcaagtctcttttcgacccaaagttaaaaagaaataaatcacttagtgattccaaaatgctttcaaacaaaagatttgcaacacaatcttgcctctcttccaagcttgcattaaacaactaagttctcttgacttgctgagtacgaaagtactcatccttgctctatataaatatatataattcctgtgcctggaagtgaagatgaagtgaagattagggtttcgtcctgattctcagccgtcgcctgtggtgttaggtgttagtttgttggttccgctgctgctgctgttgttggtgtttcctcgtccgtgtcatcggttgcattcttgggctgttctgagctgcaacctaagttaagataaataagtcatctatttattttaaggattgcaatgattcatatttgtcaccgtgggtaccagcgctatgtcttaggactggtactgagatcacggtttcgtaggaagcggtccgcgccgtgtggaccgcttcctacgacacgctcctgtcagctgccgttgtacggcggtaccggattggggtgtgacaggagctgtgccaaacagaccctaagtgtgagagattttctggagattagttaaatcacttggtccttttttaccgcatgcatgcgcgcgtgtttctggagattagttaaatcatttggattcaatgccatgactaattagcacaagaagagttataaatcccctcacactttttattggtcatgtgtgcggcatgcccggcaaccgaaccggcactgctatcaacgaatcagcaattgcttgatttatctctctcgtggtaaagagtatagtagaaatatagatcacctctcatacctatcaattatatcatccttgcacctaataataactagaacctctttataagagtgaaaacttgacaaccaaaaacctctatagaatttagaatgaagctctcaaattcataataggttatatctttataatttgctgatgagaatttgtttaattccgtaacaaaataaggccctgtttagttacatgggtgaaacgttttgacgtgttacattggatatacggacacacatttgaagtattaaacatagactaataacaaaacaaattacagattacgcctataaactacaagacgaatttattaagcttaattaattcatcataagcaattagttactgtagaaccataatgtcagctcatggaacaattaggcttaaaagatttatctcacattttacacgcaatctgtataattagtttttttctatatttaatacttccatgcatgtgtccaaacattcgatgtgatagtgtgaaaagtttttacgtgagaactaaacaaggcctatatgcattttgctagaaaataaataaaaaaaataataaaaatgttggatttccacgtcagccacgaaaaaatcactcgccccttaaacttcttccttggatgccgttactaatccatcctcatttctctcgcaaatctccatcgtcggcggcggcgcggcggtcgaggtcgacgtcacgagagatggcggcggcggcggctggggtcacgtgccacctctgccgcgaacaccagatggagatggaatgctgccgcgggggcctgctgccgcgcggctccaccaccgcgctccccgacgccgccggcggtgaggcggaggaggaggaggaagaccgcctcagcgccctccccgacgacatcctcctcccgatcctcgcggccctccgctgcgcccgcgccgccgcgcacacctccgtcctcgcgcgccggtggcgcggcctctgggcccgcctccccgtcctcacgttccaccgcgtcgcccccgccccgctccacgccgcgctcgccacggtcgccgccgccggcggcgccgcccccgcgctcctcgacatcgacctcttcagccaccacgacctcgacccggcctcgctgctcgcggccgccgcggcggtggcgccgggagagctcgtcgtgaacgccagctggtccgcgcgaagcaccgagctgccatgcttcgaccgcaccgcctcgatcaagatcgacgtccacttcgccggcttcacgctgccgcccgccggagtcttcccggcgctcgaaaccctccacctcgagaactgcttcgtcgacctcggcgacatgatcccgcgctgcccgcgcctccgcaagctctccatcccgttctggaacgccaccgcggtcaccgtccgctcgccgtcgctcgaggagatggaggtgtatgccaatttcaagatcaccatcgacatcgtcgcgcccgcgctgaagaggctgtatctggatgcacgtcgcgggatcaacacggatgccggcggatttacgctctcggcgccatcggtggaggatctgacatggaactgcgagtgccaggccgtgagcgatagttttggtgtgagatggcgcatgtggagcttgagctttagctcatcatgtcttgacccccatgggattatgcagatgcagcagatggacaacaacggcgaagccgaaaccgcgcattcgctgtcattgtcgtcgtcgtcgcagcgacgccctcgtggtggcgtcctgtctctgaacttagagaccaatgtactatgtctcctctcgtgtagtactcctcaacatcttgaactcgtattgtcatattgattttcaaatcgtgctcaatctgttgtgtaggtcatgacaggtgattcaaccaggagctttgagcaagagatattccggtttcaagttacggacaacttttctgttttggagctggatctgaaggcacaagggcatgtctatggggcaatcgtcctgcacctacttggcatttgtacctctacacaaaggcttagggtgttgctagatgaatttctggtaattatttcttctgttaaatattgtattattgtctagtagatctcaaatttctatgtcaaaatactaggttgattcagtaggaagcatcactgactggccactgtatttcaattttcttttagtcgcaggactcatgctttgtaagttgccgttgcgaccagcccaataactggagaaatcaaagtatctccttgactgatcttaaagaagtagaaatcagaggcttcagaggacaaaaccatgaagttgatttgttgaaggtgctcctgagatgcgcaaccgtgctcgaaagagtgaccgtcagattttccaggaaggttacaccgagtgattgtcgatgcagggaactcagtggcattttagaggcctatccttctgtgaaatgcagtgtttattatctccaatctggcaagcaggttttcatatgcaggcagcaataggatgctagctcttggatgtaacagtggtattcgctttagcacaatattgtccaaactagaagttccaatttatcaggtaaactttgtcatgtttggtttatttttgaatggatattgctagtttgtcaatgagtgatggtgggagttatgtgcctattaccttaaatgatctgtgagtgcatatgctacacctatgttattggtgttagagtaatcaaataggtggtggtgtttccaattctccttccctaattgtgctacgaagcacatgctttagccgtcagatgcacttcgatgtgaaatagttattccacggataaactaaatggttaattcatccgaacttaggcaaggcatgatgcattgtgtgcatgtgtaccttgcagtgatacctgtacatgttttttttccatgtaataattttaaaaaaaccagcattagggatatttgtttcctaaaaaaaatttccaacatgagcaatcacttttcctataacctagttgttgttatgggcatatgaattgagaccagaattccaaaaggccggtgataaaaggccaaaaggctaaccattcaaacgtaaaactttattaatttttcactggaaactagtttttctagagaaagcggtattaatttgaagcctaaacttttactagaaaccagtttgtccagataaatataatttgttgggcaccatatattggttcaaacttttgtcatatatatatataatgaaagaaaattgaataaggaatggctcgtttagttcagctgtatcatttttctgcaactagtatacattcaattccacatgctcagactagatagcctcttattcatgaacttataattacatatatttttttattatatgtgctactagttcctcagtagataaaacgggatcaatgagaagagttcagattacggcaaccgataacttatctgtgagatgcatatataccaatgaaagacttataaggcacgtagcatatatagctacatatatatacaccacacatcggaatgggagtcatcgtgatcggaaggtgaactctgtcatttcgccgaccagtggcgaatctagaataaaaatagaggggtgctatgtataaaacttagataaaattaattaagacagctaaatatacatccatgacgtattttgctaatcaaatcgtaaaattaataaataaatagaaagagggtggcatcatataaaataaaataactctagctcgtcgtttattatttggaaaagtacttgttaaccttgcttctccactttaatgtgcagttatatccactaaattctggcaaacaaaattaatttgataggaatgatgcgcccatacactgaaagatttccaaacctaaattaccaataaagagtctcacgtttacatactagtacaacagatggattaatgtccagtccagctagctagaatatgtcgtagaggccctgacaataaagatataatgaggcagtagacagcaacgtttttattcctgaacctgactgtgaaatgcacaaccgtggagctggggctcgagccccaaaaagccccaacggtggatacgccaatgtcgccaactatctatgattcctgattggttatgtatctacaatcaacatccaggtttttatatataccaatgcgataaaaacctatctggattcactgtaacacacaaccacctcatcctatatgttttgaacaatgcaagcgttggaggcaattggagggctataggaaccagtggaaggacatcagggctagccggcctgtctctcggatatatcggaaggcaaaatgaattattgtcggagtgataatatatgacactaaaacagtactggaaatagatgctgccgcgactgcatgttgatgaagggaagaatgccgatgttgtgtgagcaccacatcaagacttcgaaaaccgtaggattgaattgttcttcaacactgtaacaagcgtcttttcaaggccattctatgacataatgcttaccatgcatggacgccaatttcagttcttttttgctagacataatactaatccctccagtattttaacgtataacttattgatttttcatataacgtttgactattaaccttattttaaaattttagtacaaatatgtaaaagtataacttaagattatacttttttataactagaaaaaatggccatgcgttgcaacaggtgaaggttatttcaatcttattattattatacggtttaattaatgtggaattcactgtgggaattcgattggatatattttttttcataaaatcatgagttgcaattaggagtccgatcatctcaagttagcatacaaggtttgttaaagatatttcttatacagcttattctgtatttccaaaaacgaacgaatttaaagtccgactcaaatacgtatatgtttccaaaagcgaacgatcttaaaaactatgacgtaccgaagtactggcaaaaacactttaaatttttataatagtagagataaaacaagtcacagcaaaataaataatatttatattttttaataagacgaaggttaaacatcacgtcaaaagttacggcgctataataaatttttttacaagagtaaagggcatggacggtccttaaacctatagggttgtgtcatataggtctctaatcactcagaatacagatttaggtcccagaacttgcaaagtgtgtgtcatctacgtcacatatcaccacaagcccctctaggatccggcggacgttgggttgggcgggtgccggatgtctactgtgcggcggtaagggagtggggccggcgacgtggggacatttcagcgtggccggaacagggattgagcggaaatggcgtcgtcggcgaggcgtgcggcgctgaacatgtcgcacggcgacgcacacaggggagcaggggagagacgcggagccatggctggcacgacaaggctcggcagctagagggtttgggcgcggctcggcgagaaacagcggcgtcgcggcgggtgccctacagtcttacaggccagggaggactttggcagaatccggcgatggaggccggcgatgatgccctctccggccattagagacggccatatgctagagctataagtttgttcagaatatttggcccagtgagagacatcatgaacacgcactactacagaaaagggattaagtgctggttggaaaacccccttcggtgctggttttcttaaccgacacaagggatgtgtcactgattgaaaataaaaaaagtgccggttagaaccagcactttttaggttcgatgaataaaaaaaagatgcctcgatgcgtcatttcgatcgagccgacgcatcgagccgtgcagttcgtcctcccgcatccacaagaatttttttggcaacattcatcacacaaagaaatttggcaatattcatctctctctccgcccgtgagccacgtcactcttgccgccgtcgggctgtcccgactctcctctcgctagatctagcggaggggagggcgtcacggccacctcccctctgggcgccgggccgccgcgggctcccctccagccaccgggcaggcatagtcgcgggctccacttcagctccccaccaccgcctcccctcccgccggatctagcagtggggagggcgcggtcactgctgccgcctccgccggcaacgcgtgggagagaagggagggagggagagagaagagagcgagacgagagagaaggaagggagagaaacagagaagagagcgagatgggagcgagacgatgagagcgagacaacgagcgaaccttatccgatgccgcgtctcgtcatggtggggcccaccggtcggctctttcgatgccggctcggctcgatttatataggcacttataagatattataggtgtcagttttttaattaaccggcacctataatatattaaaagtgtcggttttttaaaaaactgacacaaaagtataataggtgttggtttttatttagaaccgacgcctataattacttaaaggttccggttttttgtgatttcaacctgtgaaggtgggaaaaggtttataggtgccggttttagtggtgccactggtcgtgatgatacgtcgacacctatttgatattttgtagtagtgacggccttacatcatttcagctaatccaacgctgatcgtgcaatgattaagaaataacattgatcgtgcagggcaaaccaaacaaattaaggaacccataccatatattaaaaacatactttgtactttaactagacgcctagacatagagcatcgactgcattttctcccaacaactagcaggcacatgatttgtgagtgcccatattaaatataataactagtttccattgcattcttcttgtaaccacttgcaactatatactgttccagcatacccaaattaaaaagacatgtaagttacgaatttataagggtgtgtacattcgtacaaccatttttatgggttgcttcctctgcagataaaaggagagcagaaagagaaacaaaagatgagaacatggcagccgagaacttctccacgagatctacacatacatgacgggaccagtgcttcagtggtgtatgtgtattgcagcctaaatacatggaattgggaggcattaggaagccgagaagtgcatctcttatttttcaaccttccaaattcaaatgactagcaggctagcagcattttcgatgttctgatgctgcaatggaacgtccccggtttaattgcaaggctgcctcttgctatgtagtctaaacaacggagcaaacacagcacaagggctcggagaatttaactatttgccacttttaggtttggcacatatctaaatgcccctcttatgttcacatttaataatttgccactggagagaggtgattttttaactatttatctctctctagtggcaaattattaagtgcgaatctaagagagacatttggataattgcctaacctaaaagtggcaaatagttaaattcccataggctcctcctagcagatggaagaaaattggttctatcagcacaagccaaaaaaagaagtcacggcgtgtgcatctgcactggttgaagttgcagtaattgcgtgctcgctaaatgctgagacgaagaccctgtttaggataacttgagagtgagattttactggcgataatctagaatctcatgttgcttctcattttattacaattattttcttgaccaattctgtaattatagcaaaagaaaatggaatgaacaaatggttcaatatatttcaggggtgctactcaggccactacaactaatagactacatgccctttcacgggaagtcttccatatagttgtaccatataattagtagataaaataagaccagaacatgtaaacagaactgacaacttgtacgcggaaaatatacatatctatgataggtttagtgcttcacaagctagtttgtaatgtagctgtacgcctacacatataggattgggaggcatcctgaatcaaatatctcaattctagtcggccaaccatcgaaacttcaagaagcatagacattgaatttgcaaagtaatgatgtaatcgaacagctttggtttcatggtaattaacacaacggcctcatccgttgtgttccaaacaagcaagctagcagacatggttaaaaatagatgggagctctacaggtagcctattttccgagctagattgtggtttcttgttctcaatgtcaatggaaacgagcattcagaggttcaagccctttaattggttcaaaaaaagttaacgtgttctaaaatcaatggtagattgacatcctcattagagcaggtaacataagcaaacaaacacacgtattagatctatcataccaatgcttcaagatgccaaccaatgcttcagtaggatttctcgatccgtcataccagggttgtcataccaatgtgtgtgagggaagtattcggatgtgggtgcaaattgtgtgcatgtgtacgcgtttgttttccgtgtaataaaaacaagaaacaagcattagggatacttttttctaaacaatttttctagattagcaatcacttttcctacaacatagcatatgaattggaacctgaattcccaaaagcaggtggtgacaggccaaaaggctaagcattcaattcaaacctaatactttattaaaatctcactggaaattaaactagtttttctatactagataaaatggtatttggagtataattttttctaatagaaaccaggttttctagataaaacggtatttggagccctggttgagatgacgtttctatcttggtggtagccacgagtttgcttcaatttatttcaaaggaacttggcactacgaaattcagaatatcaagactagcagataagtgaaaacattgttgctttggtgggaaaagcacaagtgaaatatatttagttaggcaccatattgtcatgcattaagaaataagagccatttgcgctcaaactttatagccatagtgaaaacaaaattgaataaggaattgttttcatttgtttaaaacacaaaaaaattgtcgtggatggaaatttcgcccctcttggaacatacaaaatactacgaaggctccctctacgcagcctaggacgtgcctacacgtcacgtgtaagacttaaggcagggtggctagggtttctatttttttaacgcagtcatgaaaatccgctcctatggggagtcaaactaaggccacggggatgctgctatactaggcactataatcactaggctacatgtcaatgcgctctcctctactttagcatactatatcagttttttctaactacatactagcacatgctatgtcatatcattgcattaacagaacaacaagaaagtacacaaactcgcaccccaccaccaggacggttgcacggcatatcatttaagaactttttttccattatgtgttctacttcctcaactgataaaacaagagcaataagaagcgagttcaaattatgctgatcgagaacttttgagatgtatacacctatgaaagacgcaatagttagcaggcatgtagcgtagctacatctacatataagaatgagaggcatcatggtctaaaggaaggtattgtgatttagccagccgtcatagcttggacatgtagcgacatccaggtttccaatggggtagaaacctaggattcaatataacacaacttcctgatcactctggatgtattgaacatggaagcactatgttggagaacttgagattgagattctgctggtgagaccctatgttggagaacttgagattgagattctgctggtgagaataatctagaatcttaagttgcttctcattttattataattagtttttttagaccaattttgtaattatagctaaagaaaatggaatgacaactggttcaatatacttcagctggtcgatcttaagcattttcgtctcccacatgctttcccatcatgtccgaatcgaatatcatcaaaattatgaattttctacttttaggcagataaaagaagagcacagcgagggatgcaaagaacaaaacatgggatcccggctacaacttctccatgtaatccacgtaccaaagtggtttatgctgtggaaaaaatgcatcatacggacgtcggattgcgaggcatcaagaagcaatggagcactcagtgagatgtctaatcatcatgaattgaaaaagtatccacattgagtttatagtatcctggtgctgttagacatccatatgcatggtttctgtataacacagctgcccccctttgtgatgttttcaacaagacatggcacgcatcatggagggcagtgacgagcagtggaacaacaacaatactagctagactactccttgactaacttggtaaccgagtgactgggattgatgttgaacactgaacagtggttttgatatcagagagttatgagttttgagagctgtgtgctttgtgctatgtgtttgtgttgactcccctcaccatcgttgttgttaggctagctatctattacactccttttttcataataaaatatattccgtagtaggcatttcttcatgcaatatgaatgcaagctgactttgattatctgtatatgtgaactcagaaattaatgcgaactaaatagtacttaattgtaaccctcttgtatcttttatttttctcggtccttgtatacacatgatgttatttattactccttctctcccagaatataaagagttttagagttgggcacggttattaagaaaatagatagaattaaatacaatggagtcgtaattgtttaagaagtggaggtaggtggaaaaagtgaatggtggagggttgggattggttgagaagtgaatattggtagagaagctgttatattttgggacggagggagtacgtgtctatggacatttgctgcatctcttattcttaactttatttaaacctgaaagcttgtatttctttcccttgtctttcatccacacctcagcaaaaactctatccaatagttctttgaaacccatttaatttactgcccttggtatatatatgcacatggaaaccaagtatatatgtttcatcctagattctactaaaatacacgacacatatatcttggacacaaacaagcaagaatttaaatgctaactgaataacatcatatatatgcatggtgagcatctaccaacacatgtccatgccatccatgaacactcctttaggattggaagacatcaggaataccataggcacaatcgtatagcttagggcaagttatcctcagaagttttgcagctcacaaacaggggcagatccatggttgaggccttggtgggccgcaagacgaaagcgcagctgttggaggttggaacccaaggatccccacgtcattaccgtagcagcactttagttacatgctacacacccaccagatcaaggctatagacgaattgagcacgctagtattccgaggattttccacaccttgtaaaatccatgaatttacctcaatcgggactacaggaatggaagttgtcgggaataagaggactggactcaagcattccagttgctggtctcccatcgtctatcccgcttccatctcacattcaggttcatgttctcctcagaatcaaacctttaatctctcctctctctgcaactcggcaacatggtggagttggcggtgggcagtggcgaccagtgaagagtactttggctagtaccctccaggatcgatctagtcaggaactcaggatagatccagatccatatcagctaactattcatctgaattttttttcaaggctgcaagtttgtcaaagtatcaagaacatgaattttggtaagaagctacttcgaattggtgtcataaatgaataattagcagtacaaatcgagaactatatgcactcaaggaagaaagccattctgaattttggcaagaactatatgtattcaagaaagaaaaccattctgaattttgacaagaagaatgtggttaatgctgccaatttgttgtatttatgatgttggatgtattgaagattccttggtgtattatctctactacttaaaaaatctggattggtgatggtgaagctaaaacagacacgcgatccaaagtagaaacgtacgtcgacacgtttggagcgaaaaaaaaaagtacacgctcctccgcagcggaaaaaaaccccaagccccgcgacccgcgccccgccccgcgcgtcccgcgtcctaggcgcccctcgaccgcgccgcctcctcaccgccctcgaccacagtcgccccgcgcgccctcgaccgccgccgcctcctcgccgccccgcgccgcctcctctctgccctcaaccgccgacgccccgcgccgcctcctcgccgcacccaactccggttgcgccgtagtgtccaccgccgccgcccgccgcatcgtcgtcctccccatcacccgccaccaacgcctactccgtccacccgccaccgacaccgaatcctccgcccacccgcaaccgccgccaacgcccccgccgctgagtcagctccagatccgctgtcgggctgactcctcctcctcctccctgtcgcggacgccgccgccgccgatgcctactactccgctccgagccccatctagcgaacagagcagggatgggaggggcgccgtcgtcctactgcatccttggtgagcatccacatcctttttctcattcatctctctatgtcccacccatttttgcctggaattttattgcgttaaccatagcttctcttcgagatctggatgatgctcttctcttagttagtttaattgtttgctccccccccagtccaagttggatctgcccctgctatggataaataagattaatctgaatcacaggcccttcaatcccttctcatttgtaatcctaagcaaattaataagctacatagatgttgttcttgtaatttatttggagtaatcagtttaattgaatcacagtagcattgtgtttccccaatttggttttgtcactttcaaaaaagaaaaagacatttatgtttcacatttggtactctagcaaatttattcagttatctacccaatttattcaattgttctgctgtgtactgtagtctagccaatttattcaactattctgctttggttccgctcgttgtccatctgctcatagtcgtccactcactggtgtttccctggtatgtctctgaaagactgaagtggcatattttcttttgacgtaggacatacgaaccgagctcttgcaggccgcacaggttatcacaatgatatgtgcatgggatatgtttaattactcaataccttgtattttttttcttctggatatcgaatcaaacaaaatccgcatgaaaagctgatggagtaatggctgcaatgtgctgcataggaaattatgtttgcatgatcgtagtcttcaatattcaggatacataagagaggatgttatctcaaattagtttcaacaatatactcattattccatccctgtaacagtaatgcatgactccaaaagcttctgaaacttttaaccccatacaactattttcagtttttaataaatgaacaatgattttctgtaagaaacaggaagtaatacttacaccgggtgagctgaaatcatggttgtgtcgtcatgatataacaatccgtggacttgctcgtacagggaatacccgatcgatctagaataggggaatcaatcgatttctgcatcagatgcgctttctttttctcggttagatccgactgccggcgaacaagcctgatagttcctaagattcaagccatgaattttgttactagctaggtgttgcaacagatctcctgacatccttacccatattgcagaagtttttttcatttcagccttggaaatattcaaagtaagaccctgtactactaccacatcaaagatttagttgttcctttgtaatgacattattttttgacagcacgcatactccattcctgattcacttgatattcctaatgattttgattactcaacattatataaagaacttctgattttgattcttaagtttttttttcttatcttaggattcaaatggtatttaattcagaatttggtaaatcacctccaaattcacaatctgatctttgatttatttctttcgacattttccaaatgtacagcaacattgctatctatgacatattccaaatgcacagccatttaggagattcttttagctaattcagcaataaaataaaccatgctgtaaatttgaactggtctgcctctgttcatggggctaaaagttatggatgcttagcccagatgaaatagcatcattgcgctctactgtatcaggattctcccttgagtcgtgtatttgctattttgttttgcttctctcaaacaattgttcctgatgttatgatctgatatatcatagttttaacgtgatacacaggtatagatagtataagctgtcgtatttcatgataaatcaattttcaatgatgaaccttaaccagatttggacatcttcaggtgttggacttgataaagcttggagatcatctcagtgaacgggaggatgctgatctctataggattgggattactggtgaatcacttggaggtattgtatatataatgaattcatgattgcatccttatattagagtaacatatgcccccctgtagagcatataaaataggtgtgatagcattagaagataaggtaattttttcagtaagaaaaaaattaaatcattttttatgtgtctgaaatctaaatttacaactgaatacaagctcttaatgattctctgcacttgagcgtgtccctgaaactgactgaaatctatctattatatactaaaagtccatgaaacttcctataaacgctctcaggccgccacgtggggctcctacaaacgctcctaggccgccacgtggctctgtcaaatctaaccgtcgattttcacttaaattggtggacccgatactttacaccattagattaaatttttcattgaacctccccttccatcgatccccggtttccctcctttttctgatcctattattaagctactctttcaccaaaaaaaaagacatgcgagtacatacgtgagtatagcacgatcagataaacccgaaagaacatactcctatacgtacttaatacatgatcagagaaacaccgaaagaacacatatatatatacttacacgtacatatagaaaaagataaaacatcatactctataactttacataaataccactgtcgattttcatttaaattgggacccaattgatgttttagaacattagattagatgtctaaaagtccattaacttccaaaaatgctcctaattcgtcctacgacatcctacaaacgcttctaagttgccatgtgatgctctaataaattagtgaaatattcttaaaattctaaaataatcatattttcattaaatttggtggacccattatttacaactattagattaattttcaagaaaaaaattcctttcctaaacccgggccaaccaaagcttgtatgtataagttactttttttaaaaaaagcgaatatacgtatgtacgccttatcttcattcaattcatttctccactttttcacctattccttctcctattttcatgccttattagttagataagcaataatatcatgttaaacaattaagcttcttaatcatacaactaatttctgatccgcaaaatctttaaattatttataactaaatttacagttgaagaccatatttcactacaatttagctttgaaaaaaaaagtcattttggtttatatttctggcttttgcgtgccattcaagcaattataaaaaacatataaaataatgataataattaaattaggtctacaatcatgaaaataaaatgaatatactatgagtaatgtttacagaatatgttagttagaaagcaaaacttatgcaacaaaataagcaactataacatctaactcacactactaatatttgatgaacttatgtctttagattattttacatttaaagacccatatccactgtaatattgattttgagaagaaatatgtcactttggggctatattttctgatttttgtgtgccattcgaataattataaaattatagaaagataatgatatatatcttatcaccatatatgacttcggaataattaaactagatctatatggataacagtaaaataaacgaatgctttaaaaaagtactccccattataacattagaataagtcaaaataacattattagattattagattgtagtgttcgtatttttaatatctactacgaatatactggaaaagacaagtaaaaactatagattttaatcgaacaataaatcattttttaatttttagttaaaaaactaatagcaactaaaacactacaacccgggaattattacaattatatgcccacataatctcctcccttcaactctctcttcctctgctcactcatttaattcctttgtctcctaatttttaactaagtaaaaaaaagatcaataattagaaagccaaataattataattctaaagttaaatcataattttaacttattcgaatttttttatttataattaaatagataatttaagatccatgttacccatatttcaatctataaagatgaaaattcgtcatttaagcatagacaccgttcctttgcatagtaaccaaatagaaaaaacacaaaccataacacaaaatgaaaacaagtactatattattgtaaatcattgtacatcctttgagcacacttaaggtgtcacgtgttatgtcttaaaaataaaactttacaaattggaagaaaaatcatctgaccatcagtttccacttaaataggtagatccattattttaacccaatagatatacatttaagaaaatcttaagccgcaatgtgttatgtcttaaaaattagaaaaaataacaaaaaatgtgagaaaaaaaatatatcaacggtttcacttaaatcatttagataaaatagaaaaatccacccctccacttcgccctccccccaaacatacgcacaacacggcactactcgtcccatcccttctgaccttctccactctatcccttcctgtttatatagccaaaaataataaaaatattaaaaatgcataaatttcaagctcatctgatttctaatctaaatattattgtatttataattagaacaatgatttaaagatccataaagactatattttgaactgtataaaatataaaataaagcaggtaatagaaaatgtcaatagggactaaattaaactatttagagaaaacatgataagttcataaaaatattggttcttacatttcactaaaattggaccaaccattgcatgttccattttcgtaacaattttaaaatgcttagacattaatggccttacatctatcctatatcatagcattatgagtttctccacatattattacacatataaaccacactaaggttcacagtatatagttctttgaaaagttatatttgttactattaaatttaaaattttggattcatgttaactaggtatattcttttaaaaaagatagtatagatcacaaggaagcgaggtatatgacatgtcttaattaatttatatataagtatgtaacaacttgcatcaacttaaacctactataaggagaactacttgatggtacaaataaaacatatttattaacaatatagttctttagaatttgtttaaaaaaaggcaaataaacattctattaaaaaaggacaaaacaccttacttctaatttatgattgatttgtcaggcacgttttccaaaaaaactaaatcgaacttccttctatatattaaagagatcatagataattatttatacagatgtatcaaatatgatatattttaaaaccaaacaaatatcttggaaaaattatcaaagcaaaatgccgaaaaacagcggaggcctcacctgatgtgtcttattcaaataaaaaagtacgtttaaacatgggaggtgtcaaccaattgatattctgtttatatatatatatatatatatatatatatatatatatatatatatcaaacacaatgtacaaatcaggttggaaatttcggagtaaaatttccaaatttcagaaatttcgatcatttcggacccctcagatatgatattatttcggccgaattttttcattaattttgataatatttgtccaaattcaactaaattttgttcaaatttttggaaattttataccaaaattttggaaatttcggtatttcagtgatgcccgatcaaatcggctaaaccgaaaagtttaaccctgtgtacaatacatccccgcgtgaatgcgcgggctatctttctactttatataaagaatatcgaggacaaatctatcaggatacacaatgtgatcgttctatttgaagatttgttctatttgcagaaccctacctctatatctccaaaatatgagaactgcattattgtagatataatttagtaatgatctgacataaatctagaggaaaaacaaaaacaatttggatttttctctttgtctttgacagattgcttttgtgcatttaaaaagataagggtttgtttaactaatttctttttgctacagctttcagtatagtttattaaatctgatgtgcttctaattaatcttatacaacatatacaaaatgcttctaaagaaatcttctaattaatcctccaccaccattcagtccgccgccccgtacgctggactatatagttattattaattgctattatctttaagaggcgcttttctttccctttgtcagataatcaagaactatcatgatcttttgtgatcaaaagcccatagtccactactatgttttactacttccagattaatggagtggtattgtggtttctcagccatggcaatgtgggtatgtaaacagttctcacgtgagcagtacattttctacctcattttgtgcatatgttttatcaaagaagtaagatacacaatatttcgctagccctgtggttggtttcagaataatgttttctctgaagtgaaaattagattacaattggtctatataccttaacataattacattaatatgtcaaaaataatcgaggtatttgctatagtttatttggagttcatatcaatatcaaaacaaaaatgtactctttagttcttcatatttgatatgtacatgcttctggaggatggagtattggagtgttaattagatatggtgtcccgcattaaccacattccgtgttgaatgcctttcatggtttgaataaagtgaaattatatactactgcacaatttctgcagttgcgtgcgtacaaacaaatctttagatttctaaaattggcatggatgcttatgacagcttttggctttgttgtcgtttgcagcgagcgtcgtcgtcgtcaggtcctccactgctgttcagtccgccgccacctacgccggtcctctcgcttccaggtgacgaactctggttgatggcatcgcactgctggtaccagggtaattgctggcgcaaccgcatgccaaacttacctgctgccactcccatgaatttactaattagcgttttcttagttttcatttgttggaatgatggatcgacgaattgatgatatgctccctccgttctaaatacagggatttctcaaaagattttattttagttactaattcagttatcaatttttgaattttgaattgcttaaattcctttcctgagcatctgattggctctggaataattgaagtgatgggaatcagtgcagatgcttctattgtggtacaaagtgtgaattcttatattttggaatggagggagcatatcatatatctgtataatttaagaattccttttttgttcgaaacctgaagttggacaatcaacttttgctttggaatttctggttctattcggataccaatctcttcgtcctcactccaaaatggaagtgattttcattatttacatgattacatctcatttcttaatatttatatgcaaaatcagaagagtgagattattcccttatagcttgtctggtgacaccctcgatttgtttctagggtctttgttcaattctaattctaacatttttaaggacggattggtactgttttgcagcatcttggcttagatttatttatgtgatgttctacatattttgctctgcgcaatagtgatctggttggagtacatacatatattaaataaataagtgctctcaattttgtttccgtagatgtgagtaagcagtttttttttttcatatgtttcagtgattcattttgctgccttcaattgtgaaatgagaaatacctgtaagtgaaggcctaagctcaaggaataatttgttctttttgaaaacaaaaaggttagcgttctaattctttccaattttttaattgacaacatgttgaaccattcatcctttctgttctctatatgatgtatttcaccttcgtaaacattttacagctcataggtagaatgttcaccaccaggcaagtcaaggagcgaagtatggggacagtgtgtgctcggaagatctttgccagcttgtgttttgacttctgaaggcatgcacagatgtgaagatatgaacttctaggggagctttataaaccgagaatagttaaggcaatacttgatttactttggactgcaaattacttgatcggataatcaatatgtggcgagctttacacagattggctttgatgaatcattaaagggctatcggcggggtgaatatctagctttgaacatgatttgttttgattcctgttgcaacgcacgggcacacaactagtaagttgtaaattcatcttgcaagcagctgggagaaatgttttgaacaatgaatggaatgcaaaatctttctaatacctgtaaactgaatgaaatggcttatgaataactgaattcctgtaaacgcaatggcttctagatcccagtagtattcagagtctcagacaagaacatgatgtgagagtaatgtcagctttgcccaaggatgcgaagaactcacggagcagcaaactcaagcgatgacacacacgcacgagcaacaaattgtagtggacacacacaatagatctctggagatgaacacacagaagtgcacacacacacatagttgttaaattcagaccggtgatcgaaacagtgagtctacctgttcaaaggctccctggtccaaccgcttgttcaccggtttaaccgtcggttcaataaataactacattacattctttatgaattttttggttgactcaaaggttaaacatatttgctatacaaccaacgctagctgctttctcagttggtacagagcacgttggggcaaactgaagtcagggaatcgaacatttttgctcaaaaagtatttggctcaaattttaaagatatagcaaaataaaattagatgaggtttggtcttgtatttcaacttcttgtattttatatttctcccaactccgtggatcccgcatgcttcaattacaacatgtacaaatggaatggcattaaagttagagaaaattcaagaaatgccattaacaaccgcacaattatgatatctacaaatacgatttcatggagttccataaaatgtcatcgtacaagcgactgattctgttaagtgctatatgatgaataatatatttaacggtgtgggatacacggaaccctagataatggtgatgatatttcaaggataaatcgcttgcttgatatggaactcgcactcgcccataatatttcttggatttgaatgtttatcgatggtattttttggattttctatgctttataagggtgtgcagtagtgaattattttttccttgtattttcttccccttcagtcgaaagagtagcagagagagaagcaagatgtatacaagcataagggaacccacaacctctccatgaaatctacataccaatgagaactttagttcgcttcccaagcatgtggtttagcgacatacgcaggattgtgaggcatcgtgaatcacaggagcacacatcgagttggctagcaatcaagacctgaggacgtatccacattgagcttgcagagtccgatcgatgctataaagccacatgtttgcactgtaacacaactgcctgtctgcctcttgctccaaattttcgacaagccagcacacattgaccagtttgtaaccaagctagagatgcaaatggttccggctgccatagctaatgaaaaatcagggttagctgagcagtgagagtcgcgagactatacatataacttatcaaatggattcatagaaaaatcaagtgtgagaagaactttaacaaagccattcaaagcctccagttaattaaacatccttgttttggtcccaattgattttcttgctatcgacagctttctgtagatgacccatgcgggccgcagcgatgtgagcaaactggtcaataaggtttcaagtaattaataaggttcactaaaaataattgagctgttcaataatcaactggacaaaatgacgtatattgatctatattttctgaatttaaactaccatcaaacaattaatttttcatgtgtgtactatttgtgtgtgtgtgtggccctgtatgtattgtcctgaacatattacaagacagtatattaactagccggcaacacgtgcatatgatcagtaaactttgaaattagagctgttgaccgtcaccatagtcgtatcttgccactactaatttgtcttagaatggcgaaaaataaaatgaaatctttatggggacagtgggagctagtacggcataggaagaagataaacgttggccaggtaggcattattagtcgatcgatttcaaagtcaacacggtaggtatctaggcgtaacgacgaggaatgtggttgggtcacacttgacattcggtaacaaaacaaactctgaaacctgacattgggtggctatttggctgaacgaatcgtccgaaatcttgacccttcccaaccatatatatcagccagtcctccaaaattaacctgttggggctcctccaacatgggcctaaaaagttttatttgtatgtaaaatgagaaatgccaaccaatacttaattgttcgcctctttgacagtagataaaacgagacgggagacaaagccaagtaaccggagataaaacttctctatgagatatacgtaccactaagtagtgatttagtgcttcttatgtagcatagccatgttaggattgggaggcatggtgaagcaaatgtgtgcattatgagttggtcaaccatttatttgtgttgaagtatcagctttgaagtcgcaaaccacagatgcaaaaatacctctctggtttacatttttcagcttgctcggatgaattgccaagcaaacaatgtagagggctgggacaagcactgcaacaacaacgttgtgatcaccacgttcctagaccagaaggcacgctgaagctccatacaccacctatcgcatgaattcagaccgttgtcaatcaagaacttccctatatatgaggcctacatacccatacgagagcttctgtgctttatgtacaagttcctgttgtctacacaaataggattgggagacaaaaggaagaaaatgagcatattacgaattggcaaatcatccaagttcatacgagtcatggtgttcaggagcagtcgtgatgcagtgtaacctctctggcttaattaactgcaacacaacagctttgcagtccagaaggcaaaataagtcaccacacgagaaatcatcttgacatggtaacaagtgattgtgcctgctgttctagtgaatggaagagatgggccagccatagttggtgaatcaactatagaactgtggaagcctacctatacatgaataaactacagtaatagcagccttttcaggcatccagaatccttaccaagccatgtccataacctcacttttactgctgaaaattatagtatgataccatttcgatttgcagtgctagctgctatgcaattagtgtaggatcgaatagtaaaaaccaagccaactagaggaggggtgaatgattgtactaccaaaaatcaaaacttttagcggaattcaaagttacccttgaagtcgatggagatctcgacgtagccaatctgaccgttagatcaactccggtctaaccgcagtgccgccactagttggactgcctgcacaccgccggtctgaccaccgtcttgtcactggttggaccacctccctgccgccgatgtgaccgccaactcgcttccggttaaaccgtcaggatctagaaaaacacgtattgatgaaactcttgaaattataacaactttattgcatcaaaatgtgtttacaaagtgcaccaacaacactccttaccaacatctcgactaaactcgaaacactaacttttctcttaactcaactctctctaaatccgatacagggagaccacatgctccctctctatttatacccataacatggttgcccctagccacaaatccaactcatacaaaaagtcctaatcccctaggaaaccttcccgtacaaaaaacaaactccaaactttccagacttgaactccaatccaaatttgacttcgctttccatgcgcacacaacaccatgtgtattccatatggaaaccttcaccaccacgtgcattattctctagcctatccatcccgcatgatatccttgaccatctggacctcaacttcccccaagcctagtcccgatccatcaccggctatactcccatggcttcaagcaacacctgcacatgaacaacaaagaaactccatatccaagtacaagttcgctccaacttgactcatatcagcacacaacagtattacatacgaatagagaccatctagaagtcatatccatgaagcaatctataaatctcacgaaaacaacccgaaaccaactccaacctggaatccgccgatctgaccgtcaagcaactcagtcagaccgctccaacaccactggtctgaccgacggcacctgcccggtctgaccgcccacacagagccgacaaccaaaaacactattcaccatattttcacaaaacactcacctttgacaattgtttatcaccacaattaaatcatcacttgattctacaattagtagatctcgaggtcataaacacccgtgtaatccatggggcagtgtgtcgacgtctagctactactggctgatcatggtctaaaaaatcggttcgaaattttggtaatctcggcccacactggcttgtagaaatgtccccaaaatttttaggtttttgtcaaatatttgtatgtttggtcacaatttgttcaaattgacctctgaggtgtgatcttccttcgagcgctagcagaaggtctgtccaatcatgtatgagcacacatatttattgaatatcatgtcaaaacatattgcctttcagtttgctcttcaaatgttgtgcttccctagctagcacgtggatattgaatgttatttaaaaacatagatatatacttcgggcagacccaagaccgggccatcctatggtgtttcttttatgagatcagcaaaccacgtagaaaatttatcatggacaattggctttcaatcccaggcccatggccatgaccaaggatgcccggggctaggttgcaagctttgtgttagcatgcatagactgaataatattaaagttacgaagtttataagagggtacgatgttatatcatttatcgttctatgaattttactttgagcctttgaatgcacataaaacaagagcgcgtggaaattgagggaaaaacaagcggaatctgcaaatcggatggccgactttataaaaaagaatcgggaggtcaaatgtttcaattgatcatatgtgagacattaagttctacatggtgaaacaaaagaagatcagtgattgaaacattaaaaaatttgtgaaacacagtgaagacacaagttgacacatatcgccattacttatgaaacattgacttttaatagtctcaaacatatgcttttcttttatcaaaatataatcatacgacatcttattctaaaaattttattagaatgaatacaacgatatgatcagatcgttgatcggataagtagtttatgagaacaattattctatagattgctaagtgcatgcatatgtggacgaagtggagagagagcaagtagtgtatggcatgaaagaaagtagtggcatgtagttgcttaaattttatgaaacgaagtggaatataaattgaaacatgtaactatctcgtatgaaatatatagttttaactgtttgaaacatatatttttctttcatcaaaatataatcgtgcgatatcatggtgtaaatatttagttacaataaatatcatggtgtaatcggatcgtaaaatagttaaatcgtttaggagaaaaatcttttgcagtgagaaggaggaatggagaaagatgccagcttgatacagccaccataccgtgcatgcggcagtgagcgaccgatttttcttctttgatcggaggcccgagcataagtattctcctaaagcaaccatgaagtcgtccatgagatgagagatttgattcacacatggatatatagcacaaaatcacgtagatgtataggattaggaggcatggtgaagaaaatcaatgttttgtgagttggctaatgatctgtgattgttgaagtcacgcattgagatatcatactcctgatgcagaaaaactcaagaacatctacggttcaaacagccacactactgtctctgaaactgtgccctgaaccaccatgaaaacaggatggaggtgtccggtgggagcaatgcagaaacatcagctcgcagacaagcaagaatatgagtctcccagctgaagtttcgacacctaaccgtgtgatgaagggataggattgtcaggatcagggttcactgcacaacgagtctccaccaacaatctccacgcatccaatgggtccataaaaactctaattgtgaaacacaacgacattaagcttccaacaaccttagaggcgtccaaactgagtttaattaattatcaaacaaaatactcgtagtggaggctcgatggcatagccagacattaatacagtcataagtagatgttgcaactgaagatcatagcatattttggtttgcgaaatcaatcatagcattggcatccagctgctagcatcgttgtatgggtaatagatccaatgcaacaaatcaataaccatttacgagaatatttaaggtctaagattgttggcccaaacttcataattgtaacaaaggaaattagaataaggaccacttccttgtatataacgttttttctcccaactactcttaaccattaattcttggtcagcatacactgattgaataaattccaaattatggactttataacggtgcacaattattcattgctttatcactgcatggcagtagttataagtgaaagtgtggacaagggatgagcaactgtcaacttctccatgacctccacattccagtgagattttatttgcttcgaatgtgcttagttagccacatacgtagaattgagaggcatggtgaagcaatggagtgtggttttagctggccatccatccacaaattttgcaatatcagcacggaggtagcaacctactgatgggctaaaacctctccggtttatctgtaacattgctacctctttcacttttcgctgatgaaccgagaaaacaatgcagagacctgggaaaagtaatgtaagaacatcagtggtaccatgttccaagaccagcaggcaaatggatcgcctggtgtagaaatcatgctcaagctcctcgcgatggtcccctatggtcatacaaggatggtcggggactcggggttttgctgtgcaatgagtctccgtccactaactttctaggtttcagagaatcagtaattgttaacacatagtggcaggcagcagccagccaatggtatatacttcccactttgcaaaatctctgaaaggtttccggaggcatctgacttaaggcggccacctgtgaaaagcactactacacatgcggggttgtgaggtctcggccaccgcctataaaattcattttcatagaggaccgtcttaagcgaccacatgtgatgatcctttttaaagacggtgctttacccgcctgtgcaaataccttagcttcacatgccttttaagcggcaatcaatggacacgtctctgtaaatgctttttatctgcctatagaaaacggtttcgcagtagtgtgttcatattgaatagcatcgaagttatggactttatatatgggtgtacttatagtacatcatttatgctttgtatttgatatttgagatttgctccggtcgagcaaaaagtacctcgaggtaccgctggtacctcacggtaccaaattgtttccggtcgttgaatctagctgggcaggatgggtactgttagatccaacgatcggaaacgatttagtaccctcaggtaccggtatctcgatgtactttttaacatatataggattgggaggcgtggtgaagcggaggtgtgcgttgtggttcaactgtccatgtttgttgaagcatcagcactgaggatgccaactatgcagttaaacctctgaagaatatacagctagagaaaagaaggggagaaaagttgttctcagatgacttatataggtagagttttgtagccaaaatgatttatatttggaaggagaggaagcagcggcttctgaagcatcagatattcaacagcctcgtatataaattgaacctgagtgagtttagaagagaaattctaccattatgctattcttaacagaaccgagagaagcaggaaatctatagcacattttggttttccatgatgcaaaagcaagaggcccagcacataatatacatatacaccaaagttcactaaaaaaaattgagctgttcaataatcaaatggacaaaatgacgtatattgatatatattttgctgaatttaaactaccatcaaacaattaattttttatgtatactgtttgtgtgtgtatgtgtggccctgtatgtattgtcctgaacatattacgatacagtatatgactagccggcaacccatgcatatgatcagtaaactttgaaattagagttgttgaccgtcaccatagtcgtatctcgccactactaatttgtctccaaatggtgaaaaataaaatgaaatctttatggggcagtgggagatagtactacataagaagaagacaaacgttggccagctaggcgttagtcgattgatttcaaagtcaacatggtaggtattgaggcgtaacgataaatgtggttgggtcaaacttgacattctgtaagagcaaatacaatagggctccagaaccggcgataaaatctccacgtcggctcggacgatttgctcgaggagaaaacggaagagagagcgagagcaagcgactaaataagcgccgggctaccacgcgctccaagaaaacaggcccactaaaaggaaggaaaggggagggagaaagagggagattagagaagatggagggtccactaagataaaaaatattagtgctatagtatttctattgtacacattagctacactgtttactatagatgacatggctatttttaggagctgacagtaggctatattattgaccttgctctaacaaatcaaactctgaaacctgacatcgggtggctgtctggctgaataaatcgtccggaatcttgcccgcccttccaaaccatatcagctagcagtaaacctgttggggctcatccaacatgggcctaaaaagttttattagtgatgtaaaatgagaaatgccaacaaatacttaactgttcgcctcttcgacagtagataaaacaagagtcggagagaaagccaagcaaccagagataaaacttctctatgagatatacataccactgagtgattcagtgcttcgcaggtagcatagccatgttagggttcagaggcatggtgaagcatatgtgtgcattatgagttggccaaccatctatttgtgtttaagtatcagcatcgaagtcaaccacagatgcacgaaaacctctctgctttacgtttttctatgtgttctgatgaatcgccaagcaaacaatgtagaggactgggacaagcactgcaacaacaacgttgtgatca

SEQ ID NO: 7504 - DNA, 22118 bp, Oryza sativa
cccccccccccccccccaagtttcctccagcatcttgacgtagccacactggcagaggggagaaagaaggagagaagaagaaagaagagggagtaaaggagatagaagaaaagaaggaagagtacaggagacactgacatgtcaataccacatgacccactgtatttttttcaatttttttctaatataaattcaactgacaggtgggtcccgttggtgtttttacttttctattttccttctactgccacgtaagttgaaaaccaggtcaacagttccacataaacatcacgtcagtacaaaccaccctcaaaactactaaaggagtcatttttgaatggttttaattattgaaggggtcgatttacctagttttacggttgagggatgcgaatgagatttgacatatatttaagggagtcaaaatggacttttttcgaaaacaaattgcggcagccatggcgtcgacggaggagccagcgcatgccggagggggccgccgtatagacatgggaaggttcaacatgaaggaatgacagtagcagtgacacggccaatcatatgattttaaaaataaataaatgttaaaattacccctaactataaattagcaaaatactagtgtgccctaacaaatcaacagcccaaatcatttttactggtagaagaatactaccagtagagtaccatagcggcactcatgtgatttatagttgcagatcaagcagagttgatattcaatttaagaaaaaaaattgaaaatatatctttttcttcgttattttgcgtttatataccaatgcgatgaaattgtgaacaaatatacctttaccgtagacgggaaccgccttggtcctgcaccaccatttcgtggaaccggcggtcgcgcagaacagcattgcgggaccgatcgatcccgcagcctggaaacgcggaaccgccgcgccgtgcgctgcttccagtgaatgcatgcaacgtcaatgcatccgctgcatgtgctgcttgctttgccgcgccggtcacgcgtcgttagcgcgtgggaccgcgctggtcgcgcttatgtgtcacgcgggagcgaggcattgcgtgcgggagtgacggtgccgcgcggacgctgcacgagcgagcggcactgcctcggtcccgcatctctattctgcggtagatatatatttttacaattctttcccatgcatgtatataaaaacaaaacattaaaaataaaagtatatatttaaattttattcttcaatttaatccttgattttatttttgtgaatatataaatgctttgaaaatttagtctcgacacaggtatatatatatatatgcatgcatagggacaccccaacaaaatttattttcttgggtgaaatgagtgagaccaaaagcataattaaacattctcatgccatgaaattcggtgcgttttgaaaaaaaaaaactgagggagtacagtactctagcacacttgtatagatttgtgagttactgaaaattgagggagtgcatacctcaggatgtgctgattatatttgcatacactggtggaaaaaccatctttggtcggtcggccaaaatccataatagtcccggttgcaataaaaactgggactaaaaataatctttagtcccagttaaaaacaccacagctagtttatgatctttagtcccggttggtaacaccaaccgggactaaaaatcatctttactcctggttcatcccgtgttagtagcctgtcagagggccaaggatctttagtcccggttggtgacaccaaccggactaaagatcatctttatagtcccggttgataatactaaccgggactaaaaattattttgatctttagtctattttgatctttagtcccggttagtattaccaaccgagactaaaatttaatacgtagtatataatccctatcccttatcctctcctacacttcacagatccgtccccttcctcttcacagatctaactcctcctccccttctcccattcctcctcccctcctcacttcccatccgccccttctcctcccctcctcacttcccatccgatccggtggccggcggcggtggcccggcggccggcggggccgcggcggcggcgcttccggcgggcggccggaggtgccgcacgcggcggcggccgtgccctctcaactgccggccggtctcttttcttttcttttttttttacaatttgtgtttgattgagatgtgaaattttgtgattcattgcatggatatgagatgtataatctgtgatgtatttgatttgtatgtattttttaggatttgtgatgtatttgatttgagtgttttttttaggatttgtgatgtatttgatttatgtttataagtaacttaatattttggatgttactttgaattggggatttagggattgatttagggatatacatggcactaaattcgggagaaaatatagaaattaaatctggcaaaagaaaaaaaaaagcgctactctctttagtcctggttggtgttatcaaccgggactaaaaatagcgatatttagttctggattcgtactcccggttggaaaaccgtgactatatgggggttaccaaccgggagtaaaaaagctttctgcaccagtgatacatatacataacttggatcgggtggtatcagaaatgaaaattgtgcagggtcggcgtaagtttcagaactggacggaaggcatcagcaagtcatatactcgtatagtggatctcccgttggttatttattcaccagctttaatttgatctagcatgattgcagtatcaatgtcatcttgatcgtttgatgtgactgatgagtcgattaattatatgtacacgttttgccacttcgattttgatgtaaagatttttaaaaagtatatgctggccgttctgcacgttggtatggtcattcaattattgattatattatttgatttgtatcttctctcggtttccatgttcagatatatatttcagtgaagatgactagcagcaagacagcttctgggtggttgggaagaatgtgtatgagtcttctgcatgtcataaaaggagaaactaattatatgaagtgtatatacaccatggcatggattgcagtaaaatttgttgcataaaaggagacctgagagacgactgagagccaatatttcagaactacaaattgcgttcagagttcagacaaagagagacgcatgcagcagtgcttagtatgggattggaaggtatcggtaatcaaactagtgctttcgccttcctaacagaaccctcactaaagaaagatcttagtactagctacattattggatggcattttgtaccgatttctgctaaatagatcttgtactgatttccgctgaaacataatgtcatgtggtcagaagagatcagggggttaataaaagagatgtccaagagtttattcgactagacggggatcatatgtactatgcagtgtggcatcaaaactgctccatccgttttttaacacatgacgctgttaacttgagatacgtttgatcattcgtttcattcaaaaacatcatgtaattattatttattttattatgatttgatttgtcatcaaatattctttaagaatgatttaaatatttttatatttgttaaaaaactgtcagggttatggatatcacatacccaatagtaatcgactaagcttagcggggcccaccatataccaagtcttatacagacatacctcgtatatagaagaaattctggataaggaaagacgagtagagttctatatggaaacaacagggactactctgattgtatccatattggtcttcctggttctacttggacaaggggacatctattgtgtatctatctgttgttgtgtcctctctccctactcaagctaacacacgccgccagacatcaacatcaggcataagcctagacagacctcgtatggtgcctgcggaggccgacaagagagatctagcgccatctctgatctcgatgagctcatacttcaggaggaagactaccatatcgttgactatgtgttggttatccataccgacaagtcgatgacatttagataggttatcccaattattgtatttgtgtgattcagatgaataaagaccaacaccggcttcggtcaacaggagtagggctattacctgtcagataagggtccgaacctatataaagatccttgttccatctcttttacctcagtctcgcatataccctgataccaacgatcctcataccatgcaaataccatagtcatgacctcaaacatcgacaaaaatattttaaataagaccaatagtcaaacgttgataaaaaaaatcaacggcgtcatacattaaaaaatggaggtagtattagatatatagacttcaaattagattttctgccctttcacatccgatgggtcattaatatttatattttcctaatgtgcactgcaaggaaaaccattttcctagacaatggcaaaatatttttcaaggcaggtagaactctcagaaccaaacgtccgcctacgaaaacagaagggaggcgggcgggtagggggggatatcgaaaatgtaccttcgcagacgtacgtggtcaccaaaaataatggtagtactatatttttttttctctattgctaatagatttcataaatcggagtctcggatcacttctagcgagtggtctagaatactataccaatgcaggtcaccacaaatatatactcgctagtaaaatgaaaattctcgtttggtgaatatgatgcacactggtactgcgagtacattttaattatttgttgctacttatttggtcttataaaatgagagctgaaacgaaggagaggaaaaaggagaatagaaagggcatgagtacagagaattggtgcctttatttattaccgtgcatatagtgaacttacaagtaagattgggaggcatgggtaataaaagaagcgctcgtctgtgggatcgaacagtttttagttaagggatgaactgtgaagccgactttgtctccaagaatttactagttttcagatttgttagtgacagagttgcctcttgtactctgtcaaagagaagcctcagtccaccaagctgaactgtacggcgcctgcgagcatcaggtgaagctgcaaaccaacgtcgctttggcaaggacagcagtagattaattagctttgcgacatggggttcttcgagtgaattaggtgttcctcctcaccaaggatgatgtcaatcgatgaataaattaattaagcatctataatgctcgttatgtcatatgtggatgtgtaactgatgtgtaaacttaatctccgtgaagtttttgggtgactacgacaaagcgagcgcaaatcggagggataagttgagtcggatgaattccgcatgaaaattaattaatctgaatgaaattaatagaatgacgcatcagcataaacaaattcagcatgaacattctctattgaaatttttggacagaattatcctgagttttcaaaaacattgcccacttgtagacatgttcactactaaaaaatggccaaaggtgccggttcctaaaaggccataggtgtcggttttccaactggcacctattggtcagcattgatactagcaaccggcacctataagaaaaatagaatcggcacctttagcattgctcgagccaaaaaaaaaaagagctggctcgaatccaagccgaactcactaagtgctatcagtgtgcatgcgcccatcccaaaatcaaattcccaaaccccaaaatcatccacaaatcgtcaccaaaataaattgacatcacagaatgaacatattcaacaacaaattcacaaaaacatgttctacaaatgacatcacagaataaacatatactagcaaccgctagccgcctcccctcttgagccgccgcctgccgcctctccacctagcggaatcggcagaggggagggcgccgccacaacccgtcgcccgccgcctgccgccttccctcccgccagatccggtggaggggagggtgctgccgccgcccgtcgcccgccacctcccctcttgcaccgccacctgccgcctcccctcctgctggaatcggcggacgggagggtgccgccgcaacccgttgcccaccgcctaccgcctcccctctcgccagattcagcagaggggagggggccgccgccgtccatcgaccggcacctcccacttgcgccaccgcctgtcgctacccctcccgccggattcggcggatgagagggtgccgccaccacccgttgcccggctgccagtctcccctccagccaccgccgtgcgtgagagagaagtgagaagccgagagagagaggcaagagagagacagacgagagagacgagagaggtggagtattagataaggttgagtgcatggttgactcatatactccgtagggtataaggccaatgcgttggcctagatcagctcggaggctcggctcggtttggatagatgatttattataaattataggtgccggtttttaattaaccgacacctatgattttacccttagtagttaagtacctgtaccaatacttcaatatttttttacatcgtgcccatcactcaagagcgttggatttttacctttttagaatgcaaacaccgtagaacttctcgatcttttttcaacttttaggccccaatctgcatttccctggggaccctaaattactagagacagccctatgcttcagctggcctagaaacatgggaatgggatgctccactcgctcataatcactatgcacaaatgcatgcaagcgtccatctaaaaatggccaaagcccaccacttgccggtccgccatgaatctatcaaagcaagatttagctgcttcataaacttaataatacccaattacccatccattcgatcatctccggttaatttcatggacacaacgacgaccatggcgcctctccctctcctcaccacgacgtctctgctgctcttcttcttcctcgcgtcgtcgttcgccgccgacgtcgtcgtcgcgggcggcggcggcggcggcggcggctacgacggcggcggcgacggcgaaggcggcggcggcggcgacggcgaaggcggcggcggcggcggcggagccaagatgccgcacgtgaaccacggcaggtacaagtgcgggccgtgggtggacgggcacgcgacgttctacggcgggcgcgacgcgtcgggcacgacggagggcggcgcgtgcgggtacaaggacgccgacgggtacggcgcgatgacggcggcggtgagccccgccctgttcgacaacggcgccgggtgcggcgcgtgctacgagctcaagggggattccgggaagaccgtcgtggtgacggccaccaaccaggcgccgccgccagtgaacgggatgaagggcgagcacttcgacctcaccatgccggcgttcctctccatcgccgaggagaagctcggcgtcgtgcccgtctcctaccgaaagtaagtactcacgtgtctatatatatgtaacgtgatatcatggatgatttacgtgctgatcgatgtcatgctcacatcgtactaacatcgtcccaaaatattgctaccctagttctcgataggacatttcaaatccagtcttattataaagttataatccactaattctaatactcaacatgtaatcatgacacctcatcatccgctagcattaattaaaaataaaacttacgcaagcatgcaacattatctataattcattgaactctacaaatcaacatccaatcatcttcactcacattattcttcacaatatttttaacatatatatatatatatatatatccattatttttataatacttaacatatatttatccatataatcaatgtgcggaatatcatatttcatctacaaatctcatacagagtctactatgtattaatctcttaccatatagtttgacaaaccaattttatttgttgttaataactaatataaattttacttttagctcgattattaaaaaaaactttaaaagctctttattaattttcgcagcaaagtgcggggaaatgttccatcggaaactagcgcttagtacctagtattatatactacctccatattttaatgtatgacaccgttgattttttgtccaacgtttaaccattcgtcttattcaaaaaatttatgtaaatattatttattttattatgacttgattcatcataaaatgttctttaatcatgacatacatattttcatatttgcacaaataatttgaataaaatgaatggtcaaacgttggtcaaaaagtcaacggcatcatacattaaaatacagtgggagggagtattgaataggtctgctacctatatttcatgctcgcatactctctccggtttcattttaattaacgttttggacaatgatatggtctacaagatacatttttgaccttatttttctattataatatatataataaataaatgcatgtttacttttattatagcattttaaaagacaaatctatatatgttcttctaattcctttaaactaaatatttttaaagttattggtggccaaagttataaaaagtttgacctcaatcttgtctaaaacgtcaactaatatggaaccggagggagtaccattttctcaacgtcatcccatgcgctagcactcgtccttgcgtaataatccctttgtattactcgatgattaatttgcacatcggtgtgcgtgcatgcagggtggcgtgcgtgaggcagggcgggataaagtacacgataacggggaacccgtcgtacaacatggtgatggtgaagaacgtgggcggcgcgggggacgtggtgaagctgacggtgaaggggaccaagcgggtgaagtggacgccgctgcagcgcagctggggccagctctggaagacggaggccaacctcaccggcgagtcgctcaccttccgggtcatgaccggcgaccaccgcaaggccacctcctggcgcgtcgccccccgcgactggacctacgacaacacctaccaggccaagaagaacttctagctgatcgatttttttcaacttatttacttataatatttttacctctccctccgttctctccctacttaattgatgaatttttggaagtgaaaactaattaacactgaatttttttcttacgaattaatcctctgcgtatttactaatttgagtttgaaagaattcgttgatagtgatatttgatggatattcatgtaagctttggaatcttaaattttgatgtactggtcgaaaatgccattagcattgcatttattctgtttttattattattattttggcttcaaagaccaatttttctgacggttccaacactgtgatggttttccctaatgtgtccacgtcagaaattgaatttttacaaacccgttgtacttatttctgttgtgccgtcagtacttatttttctttgcagaaacccacaggaaaatgaattcttcgatggacctttttctgacggcagtttctgtcggttcaccacaggaatttttctgtaacggtaaaatttatttttctaatggtccagccaaacatgctagctcgagcatgtggtctatgtctcctactctctagaattaatatatgctactgtattatgttgggcgttccgacaactataaactccctatcttattaaatatgtctatagattattgtagtaataatgggcttaaatttgtaatgatgttaatcataacatctctttagacgggtgtgtagctgatagtcacattagtatatctcacacatacatatatttgctcatcactgatatatataactttgaatgttctgaaacttagtcagatcatatgaatctaaattaaaatgaggttcatttgtaaaccgtccttcattataatgtgatttgtaaaattatatgcacgacattattacattttccttattttgttcttttatttgttgttggatcttatcaaatagatgtcaatgatctatttgtaaatattttttcccaaaggaaagtcacgtagatagagtaagagggtctatttgtaaatattttgttctttaatattgaaggtatacatagtagaattatactccctccatactcataaaggaagtcgtttaggacaatgtttaagtcaaatattgggaatataaatcataaataactctcaaattgttgagtttgaaaatataaaaattatatgaatagatttgtcttgaaaaatacttttataaaagtatacatatatcacttttcaataaatatttttatagaaacaagaaatcaaagttgtgttttggagaccgtgccgctgtcctaaacgactccctttatgagtatagagggagtattcacaacttaactattttttttcttagtaggccgaggaaacttcacaaagtattactactccctctatccaatggctcacattttttctagctattttgtcttcgtgtgaacccaaaggctattattttgttgatcatgtggctcatcctagttgatttttggaattcggatgtggtgtttaatttgatccaattaggtgtgctatgaacagaagtcaccattgatgaggaagatgaaaccagaggaaaatatatattttgttgatcatgctcgtcttggatagacgttgaggcccataaggaccgttagaatttaaacggctcgtataaagttctgcctaaatcgtcgaaatataggttaatatttggcccaacaatatgggcctcttcagcctggttcacagatagaaaccaatcgatacgggaatatattatatagcaacggtatgaataatgtgcaaagttgtttttttaattagactatgatatgtacaaattataaatttgatcgatcaatcacccaaaaagatcttaagaaaattgagatgatgtgctatttaaaagcatagagataattccaaccataggttgatcatctggaagctgagaacaattgagctgacatggttttatgaaagaaaagaaataagataggtaataaatttggaccagagattaattattcgagggctagttaataaatagaaagggagttaaaccttcgtaagtaagagagaaaattaatttgtacttctctcaaagtctcaactacttccaagtgtatgcttctttcaatgcattcatatatccaagctcaacagtatacatgctactctctgctcagatcaaacaagatctgacacaggaagagagatggagtatgcaagccaaattggtgtgtgtgctagctagttttcacatttaattttcagatgtgaactcgagcttaatttagagaattcaaagagagaagtccaagtccaagcacatatagcaaagacaaatcaataaaacatgggattaggaggcaccgagaacaaaaggagtgccatggttttctaataactttctgaattcaaatcttcctcatcagtttttcctaaaggcaacgtcacaaataatgcccttctaatgtggagtcttttccccctatgccactaaaaaagttgatgcttacctgtgtaccataaaaaagtttagagtcacatgtatgctatgagaaaaactttcgttgaccagtgtgccattccgtccaccttctgttagaacttaacggttccatagctctgacatgtgggacccatgtatgaaaattactaatttgcccttaaggattttcagctctcttctcctctcctgctatctcccgtgagtgcctgctctctccccgttgcgctgcacgccgccgcaccctaaccctagccgcacactgccgccgccgcctcgcctcgccggagccgtcgccgccgccgtgcgcccagggcagcgcgcccctgcgctaggccgtcgcgcctcctcctctcctcctctagggcccgcgcgttcccgcgtcctccctcgtcgcacggcgcgtgggcggcacgcgcggcaggtggtggttggttcgggagggcggcgtcgtcgccggtcaccgggtggtgcggcgccagggcgcagattggggcggtcaacgtaagttaggctcatggcatacaagtaactccaaaattttttgtggcacacaagtaaccagtaaattttttaatggcatagggataaaagacttttagatgtgccttcttgggaagttcactgggactacggttatctgaactgttgaatcatcaacaaactaaagtttggtgaattatgctttaccatagttttcgtatcacccacgtaataaacaggttcagaaaagaaggctaaacttcagcagaagagccatttagtgccatttttacactataatggtaaatttcacatgcagaggccaatcctaatgggccaggggatctgtggataaggcccaggtgcatggctggggatggcccagtggctgaggccccctcatccgcaccgcgcagttccatctccccacttatgttttatttttgttttctccatcgcgcgcctcatttgctctgatcggccatcgcatgtatgctcttattttattgatgtgaatcaagtttgaattgatgaatttaaaccttgtttgcatttacgtgcataaatgctttggaactttactctcaagagatatatatacagacactgaggcaggtgaaatgagtgagaccaaaatcataaacatcctcacaccgatatattttcggggttctgtatgacggttttacagttcaccagcacacatgtataggattgggagctgatctggaaatgaaaatggtgcaaattatattgagatacgtatataggattggaaggtattagagcaggtacaataatcctatgtaagcaggctataacaacaaacaagttatatttatgttgagaaaaaagagtgtgtgcgtgaagagagaagctagtgtgggcacttattttgtcgccagagctaacaccggctcccatgcatgctgtggggtccactagtgctcagcttatgtgggtgaccagctaaccttcctcccgctagtgtgaaagttgctcattcaggtaaaatataattttgatagttgtgcaaagcaataataccaactgccagatactgtataactctattgctaacgtagattgttttggagccaacaatcagctacactattgaacttgttctttgagtaggtataatagtgttgattcagccggagataacaagtcaataaccaccacatcaacattgtcatacaaggaggagggagaaaacatgagagagagagagagcagaaccagcgcttctgctagcaccggacgatagcagcaaattatacaaaatgaaatattttatttgcttcatgggtttctggttcagtttacttgatcttttatgtatatgtatactgtgtggctgcatacacagcttatttttgcgctcaagcaggatagaccatagagatagagtttagtttcgatcacacgtgcgtgcaataattaaacccgttcatgcttccttaaagccaatcttttatataaacaatctgcaatgtaaactatagataatatgtactccctccgtcccaaaaaaaggcaaaccctaggtttccgtgtccaactttgattgtccatcttatataaaatttttttataattcgtattttcattgttgttagatgataaaacacgattaatattttatacgtgacttgtctttttaatttttttcataatttttttaaagaagacggacggtcaaacgttaggtacgaaaatcagggttttttttttttttttggactcggagggagtacgtacacaaccgccgactgtttgagattaaagcgatgcatacgttggtttcagaactcagtggaaggcaccatctatttatcaatcaattaattatcatggacaaccgatcgatggagcactttggcggacaccaggcctactgaccttcaatgctactgtacgaacagggtttgaaatttcggttcgaactttccggaatttcgcccccctaccggcatgccgaaatttcaaacctgactatactttggccgtacgtgccacaccaccgctttttcgtcagatatatgccgtcgtctctactgctttgctggatccggcaaacaagatctgacacaggaagagagatgcagtatgcaagccaaaggtgtgtgcgctagttttcacgtctccagatgtgagtacatcttaatttagataattcaaagagagaagaagagcattagctccagtccatgcacatagcaaagacaaatcaatcttaaacatgggattaggaggcaccgagaacaaaaggagtgccagagtttcctgctgattaattttctgaattcaaataggaggatgcattatcttggaatttacggtttgccggttctcgtcttgttttgttacacatctgcctcatcagttttcctgaaagaaacggcacacttcagaggacgtctcacgacatggttgcctttgtgaagctgctatgtgccttttttatggccgctacgctgtgatcgagaaattgcaatctagacgaactccgctgttgttcaattttgtccaaagagagatgctgagataaaaagaagtggtaaacaagatgagtgaaatagaatggtaaaaatcaacagtaacaaaagtacaaaaccaagatcgatctcctcctagccctgtctagcagtagacagagatccgtgatttggtattcagcttactaaagtatacacctcgcacaaattaaaggatatctgtttcccttgctgtttgcacacaagattacgttaatagtaaatttcaaccataataggttaatccgcaccgcaccgcagttcgatctccctcacttttgttttcctcttattttctccatcgcgcgcctgattcgtttcattgtgggtctgatcggccatcgcataaatgctcgtattttatggatgtgaaccaagtttgaattgatgaatttaaacccttgtttgcatgtgcgcgcataaacattactctcaagacatatatagatactgaggcagctgaaatgagcgagaccaaaatcataaacattctcacaccgacatatttgtagtgctctgtatgaccatagtacagacaccagcacccatacataggatgagctactggaaatgaaaatggtgcagatctcaggaaccatgcagattataattagatacatatttaggattgggaggtattagagattaaagcggtgcatacatatatttggttggtttcagaactcagtggaaggcagcatctattagacgatcatcatggtttcagaacactgctcgtctcctcactcgactccccatctcctctctccgttgccttgccgccgcccgagcaagccgccggtatgccgagcggctgcgaggacggcgaccggtggggatttcggtgcgacggaggggagcttcgggtcttgtggcgcgggagacggtgcacagggccatgggcggtggtggccgggcccgcgcctggccatgcgcggcagcggaggaggccgatagggctagtggtgtagtagtcggcggggccatgggctgcggggcgcctggccgtggctggcgagacgttggcggcagtcctatgagaggcgaaggtctagaaatccgacgaagtggaagcggatccttccggctcgcgtctagttagctatttcagactggatgacgatggatgatggtgggttaattggtggcgcacggcgtcagctcacttgaagtggatgaaaatgccttccactgagttctgaaaccaatcgcggagtatcgtagcgataacgcctatgggtggtggcgactagacgaattccactcgtcgaattcggtcgtttcaggagaggatgtcggaaagcagggatgtctcgaggtcgtagttttttcgtttattggtggtatgttcttctctttggtaagatatgagtttaagtgctcttgtattcttttggctattttcttatggatatagagatcagattaggtcctccgatggacgatgcactttggtccgattttttttcaaatgcagccccataattcatgtgagctcgcaaattcagaatttaaatatatagacatgatgctcacgtgtacactggcgtttccatccaacttctagtccaacaagctaatgggcccgtgaattgatgtacagcccaacagcccactgtcagtcaaactatgatagatggatgaaccgtaataagcaagcaaaatagggcaaatctgccgatcgctgtgctgccgttaccctcaaattttcttcgacatccatcgttcctctatttactaatccagcaaacaaatttccttgaattcagatattgttttttatgttggaaatttgatctgcataggcagtgaccggtgagtttccaaatctgaaaatcagaatatatgttggcaatcttgatttgttttgcatatagcagtggcgcatcttcacaatgggtgcatacatccccgttggtgtaaaaaccggattttataaattcccattatcttaaaaaaatcagctttacaattggtttaaaattgagctgtagaatatcgattcgattaatcccacctgggccacaacaattgctgtcaccgtcggcggtggcaccaatggcatacttctcttgccaccacagagacacaatagaatcccgatgcatatggatgcaataatgaaatgcaagattgacgattgggacatcatacacatcatcagtcatcgtaagatcggagtcaagccggtttgtagctgcagttttatcttatgataggttttttttttcattttatttggtattagaatatgttaatatttgtttaaacttgcagattggcggtcaggccaacctcattgatagaacgatccggctgttggatgtaagatagtccctagaataaaatagaaagcgggcaacaagactattcgagagcactattaatgtactgtgccttgtgtcatttctaagacctatgttatgaaggctcctatatataatggctgcaaattaataatggtcctagcttttttaggggcctgatcagattatagcttttttaggcaagatggctaaaattttagcaggatttcttatgtatttaccaaatttggcaacaaactaaacgtatatattttttagcaactttaaaaaattggtatggttgaaaatagcatcacggtgaacagacccttagtaatgaaaaatgaattggtctttctagtttctagttttgttactatgtaataataatgtgacatacttgtggtggtctctgttcagagcttgcctatttaaacacgcatggtttaaatggtgttattttgcttttgcaaataattgtaccatatttgcttcttagtgtaatatatatgtttataattaaaaaaactaaagaacttcgattggctgacgaaaaaaagagacttaatgctactgaggctgctgagtagtgtacgttatttcgttgggcattagctcacccggatttgacatgttccaacgtgcatgccgcttagaactagaaattcgaacattgttcacatcttgaattttggggctgcattaatattttagatgcaaaaatgtcggcactttggtggacgccagttctactgaccttcaattctatgtactttggccgtgccacagtctgcgagatatatatagcccgggctgacaccctgtgcctttttccttttgtttcttttgatagagtgttttttttttgttttgttatgtagcgccagacgtaaaactctgcttatctaataggcaaagcttgattgggatcctccaaagtaaattcagagtgacgtggtcactaatatgtaagcctcaccacccatgggtcaacatgtcatttgaccatatcaggtgaaaagttacgttagaggattcctctccgaaaagattatatctattttgaaagtggacctctcggttatttaccttgtgccagctacgagaaagcactactagaaaaagcattttcgctgatgttgagtatctttttttgcaggcgggtagatctctcggagccaaatggctgcctacgaaaatggcaatcagggtcaagaccttcatctgcctgcgaaaatatatttttataggcggaccacataagacgccgcctacgataatattttcatttttgcaggcggacctattaagaggcacctgcaaaaatctcattttcagaagcgcactgctaagagctccgcctgcaaaaacccgcatccaactataaaaaaattcagacttatcccactcccccaacagccactcaaatcttatcctctcctctctccctctccctctcctctcaccctccccctccctctccgagcctgcaaagaggagagctggcgatccgggcgaggaggaggtggtccggcagtggcggcggttcggcggggagggccagcaacgacggggtgacgagagatggtccggcggcgggctcggcaaggaggggtctagcggcgggggctcggcaaggcggagtgatggccgtggggtcagagcggctcggcgaggaggccgcccggcggcagctcggcgaggcaaggaaggccagaggcggctgctcggcgacgagggacggcgccgatgatgagggccggcggcagataaaccctccctccccggtgtggtcgtcccctccctcactccctcttcctctcagatctgcccggagggggacgggtggaggccggcggcctcccttccctctttcctctcagatccgcccggtggggagaggccaccggcggcagcggcatggccctcccctctgcagcagtagagggcggcagggaggaggccacagagctgtgtttttttatttgtttttattttgattgatgttgcaatgcaaatcggtgttgtggggatttgaatccgctgtatctgtgttcatgtatagattgtgttgatgaatggatgtttgtgattgtattttgttgaatggatgaagaattttttatttgtgggtgaaacgcgagggcgggctggtttggtggcgaattttctttttttgcaccaaaactatttctataggtggggccgctatcgcctgggaaaattgtgtttttgcccgtgaatgattttcgtaggcaggtgcttggtccgcctagaaaaattgatgatttttgtaggcgtttaggtacatgcggatggtttgggcgtctgaaaaatgctttttccagtgaagacatcaaatgtcatggggatcgttagatccactcaaacttcacataaagcttttaaataaatacataccatttcaattaaacaaattaggttaattggatccatgccactccaactttatgaaattaaataaaatatcactactattcgtcatatcggctacatgccactggaaatttctaaaattgaaaccatgtctctcccgtccctttttttcgtctcctcactcacgccgtctccgttgagcgttccacgcggcctcaccgcttccactgccttcctccagctccagggtggccgcgccaagcggtggcaccggcggaggcggaggtgggaactttctgtggctcgcgcaatcaagtcggcggcggacaaaagggcgacaagcaccaacgccgagccgtacgctctgctctccgcgatctcccgcgggccgcaggagctgctctccttgatctccctcatcgcggcagcgctggccaaaacacccaaggggagcagcggcgagcacaccacggtcggcgcacactgagttcgagcaggtgcagtacgagccataccggtgttttgatgattgggggaaaaatgctacttctaatcttgatgagtgattctatctatgcgtggctgggcaagccgccgtcgccgcagcggcgaggtggataggagagggagggagatggagatgaggcgccgccggggatggagacgacgatgacgagagccgcgcgattctccgcgacgtcgtccggggagcctgctgaggtgcattcgtcgtcgtcgtcgtcgaggaagcgcgcggacgccctggcgaggctgcgggcggcggcggctggggtcgagcctgacgggcaccatcttcgggcggcgccgcggccacgggcacgtcgcgctgcagatggacacccgctcgccgccggtgctgctagtggagatggccgcctactcctccggcgcgctcgtcagggagatgtcctccggcctcgtctgcctcgcgctcgagtgattaaggtgtggggggatgatacgatgtgagagagaggagacggaaaaacggacgggagtggcatggttccaattttagaaattttcagtggcatgtagccgatttgatgaatagtagtcactttttttttatttcgtaaagttgtagtggcatggatccaattaacccaaacaaatttgttctaatacctagcacgtttgaagtatttgtttgttatgttgttagcccgtgtggtccagaggtgttgtgttggttgaaaatttaagagtgagggaccgcttataaacctttatatgctagctccaatcattctacacctgaactaatccttttatattaagcgagtacaaaaattgtaagcgggaactatacgtatgtgaatccattaaaaatgtgtgtagagctaggctaatatggatagcgtgttaattatttattttcagcagtcggagaatctgagtggttggaattaatgaatgtgtatgtaccgcactttatgaaacaacgtgaacaaacaaagtgtacgccttgcatacggtacattctgcgtcgataaaatggaaaagattcagggtgttatataaggactacttcaggtgctaaatgttgtttgcaaattaatttggtatacatacatgtgctatatataagaatgcaacataaaaggagagttgagagagtgtgtagagagagccattcagaacaacagtcgcgttgaaagctgagacatgagagacacagcaatcgatagctagcatgcacatgatgcattgatatatatgtatatatatgtatgtatatgtatatctgtatatcggtaatcagattagtcttgtgttcttttccagctacttcactgcaacaagaggcagccctgaactatctagattgtgttggattactatgttcttggttggtttctaacaccactgacctaccctttctgcttgagttggcaccaagtcgaaacacaagtggttgaccttgtatcgatttccactcaaacaagtgtgtcgtatgcttagaagatcaagatcagggggtcggtatataaagagatatacattgaagatcacatcaccattcagcacaacaactctcagaaattcagaattaattaagccggaatccaacaagatacttgacatggcttgtaaaattaagataatttcaagtgttgcattgtgaactgttggctttcatataaggtcggatcttaatgatctgttatctaaaaaaaatagggctgctttgggttaatatgatgaacacaaatatatactccaattggctcattcactactagaaaaaatattttttatggcgttgccctatgattttcgctagcagccaaatggaaagccgccagcaagtacgtaacgagggctgggggctaaggaccaccagcgaaaatggatcttcgctggtggcccggttaagtcaccgctagagaatgatacatcttcactggcggactgtcaaaagatccaccaacgaagaataatcgtgcgagacgtgtgatgcagcgatatttttttctcaccgcgctccaagtcctacctctttttttttactcacctctcccacctacctctctcccagattgttctcttcaccacctctccctcaacctctcaagctcgaggcacgactactaataggcggcaaacagtggcggagctaagtttggaggagaggggggcctcagccttcttcttcctcctccagcccactctctccccccattttcttcttcctctccctcttttccccctctcctccctcaaatttccatggagtccagctgggtagcgggggctcgagccctccccccttcccccgcccccatactgg

SEQ ID NO: 7505 - DNA, 42852 bp, Oryza sativa
gaatcttgcccgcccttccaaaccatatcagctagcagtaaacttgttggggctcatccaacatgggcctaaaaagttttattagtgatgtaaaatgagaaatgccaacaaatacttaactgttcgcctcttcgacagtagataaaacaagagtcggagagaaagccaagcaaccagagataaaacttctctatgagatatacataccactgagtgattcagtgcttcgcaggtagcatagccatgttagggttcagaggcatggtgaagcatatgtgtgcattatgagttggccaaccatctatttgtgtttaagtatcagcatcgaagtcaaccacagatgcacgaaaacctctctgctttacgtttttctatgtgttctgatgaatcgccaagcaaacaatgtagaggactgggacaagcactgcaacaacaacgttgtgatcaccacattactagaccagaagacatgctgaagctccatacaccacctatcgcataaagccgtagatggtcagggtgagatcgttcagaccgttgtcagtcaagaacttccctatgaggccgatacctgtatgcgagcttctgtgcttcacaggtgtacacattactgtagcatacacacatataggattgggagacaaaaggaagaaaataagcatattacgagttggccaatcatccaagttcatacaagtcacggtgttcaggagcaatcgtgatgcagtgtaacctctccggtttaacaaactgcaacacacaacagcttctgtctgtgcagatgcaagaacatcatatcagctatgcagacaagaaggcaaaacaagtcaccggacgagaaatcatcttgacgcggtaaaaagtgattgtgcctactgttctagtcaatgaaagaggcatgccagcgtagttagtcaagcaactatagaatagaacagtggaaacctaactatacatgaataaactactgcaatagcagccttttcaggcatccagaatccttaccaaggcatgtccataacctcacttttactgctgaatagtattatagtactataccacttcaatttgcagagctagctgctatgcaattagtagatcttgaggtcataaacacccgtataatcagtggggcagtgtgccggcatctagctactactggctgatcatggtttaaaatttcggccccaccggcaagcacaaatctccccgaaattttcacgtttttgtcaaatatttgtaaatttggtcacaatttgttcaaattcagtcaaaatatgttaaaaattcaaaaaaaattggccaaaaattctgaaattaccgaattttggttctttcggtcccactggctaaaacccttgtttcgaaattgcccctgtggcttatcgagacgatgaacaagacggcggcaggtggagttgcatatgatcgtggttgcgctgggacaggatctgaggatctcatggggcagttgctccatgttagtggctcaaccaaaacaggctgtaggagtgtaggtatgtcataattaacctctatcccaaccaaacggtatagctctgaggttgagcattgagctctgaggtctgatcttccttcgagtgctagcagaagacatgtccaatcatgtatgagtacacatagctatattgaatatcatgtcaaaacatattgcttttcatttaatttgctcttcaaattttgtgctagtctctaaaacatagatatacttggggcaaacatagcctaaagccaataccagaatttatcatggaaaatgggctttcaatgctaggcccctggccatggccgagggtgcccgttgctaggttgcaagctttatgttgtcatgcatagactgaataatatttaagctagggagtttataagggggtatagtagtgatatagtatcatttatcattctatatagattttactttgagcttttgaaagcacataaaacgagagcggaaattgagggaaaggttagcaaccatgaagttgtccatgagacgagagatttatagcacacaatcacgcacataggattaggaggcctggtgaacaaaatcagtgctttgtgagtctcagctttgcgggcgtgccagataagctacagaactctgatcatcaggaggaggttggacagactttaaggagtagaccagtaagaaggagtaactgtaatcctagagtgtttgggccggaatggacctaacttctttgtaagattttgttttgcttgaaaaagaaggcacagtggcgccgccgatcctgtcggattggtgaaactatctcgtgttctcgagcgattattcatttccatctagttctctagttagtgtagctaacagtgagttggctaaccatgtatggttgttgaagtgccgcattgagaggatagatatatatcatactcctgatgcagagaaacatcagttcaaacagcaacacacactacactgtctctacaactgtgacaagaaccaccgcgagcaaacaggatggagggggtccagacggagcaatgaagaaacatcacagctcacagaccagcaggaaaatgaatctcccagctaaagtttccacaccaacagtgtgatgaagggattgtcaggattagggttcattgcaccaacaacatatccatccaatgggttcatagaaagactaatttgaaacagaacgacattaagctttccaacatcctcagagttgccaaatctaagcttaattaattatcaaacaaaatacgtactggtagtcgatgctcgatgacatagccagacaatacagtcatgaatagatgctgcaactgaagatcatagcatattttcagtttgcaaaatcgtagcattcgcatccagctagcatccttaatgtgcgagtaatagatccaacagatcttcatgatcaggaataattgtctaacagcagcatatagggtcaaggaagaatgaaaaacacagtggcggcggtgagcaaaggcacagagtcattgctggaacagaactcatgagtgttcaaccagtgtattgctctctccctcttcagagggtagcatttatatatttatactgagttacatgtaaaggaaattacaaccctacccctatctctctagctataccggggtggctgacaggtgggcccgccaacggttcgggagcccattcaccagaccaagagtcagtggcgcccattaaggagggcggtatggcgccatcatgatgctagtgtttacttgggtaatagcgggctccaggtaatgactagcatcggctttcacatcgccagtcgtgacgtgacgacggtgatggttggaggaagagtagtgcgcttttatagtgccccatagttattcccggtgtcctctgtaggcttcggctttggagccatggcaagagctctggagcctttgagccggctcatgggcctccagatcccttgaaccagctctagggccttcagaggcccttgactgggctttgggatcccccgggccttccggttgactccgaactcctgggagcgaactgccctcttcgggctcagctggcttcctaggccttcggattgggttctccctgcggagacgggctccatatggcactggtggcgggcctcccgacggggccctatctcctccgaagctaccagggagtgaatggtgcaatgtcgctctccttgccccaacagtcatcctccatggagtaccgcaactatgaaactaaatttaggccatcaggcaatttggaaatgtgttattttactcttagttaatcacacttaacaaactaatgaatcaataaccatttaccagaataagccaataaggtctaagattgttggcccaaacttcataattgcagcaaaggaaattagaataaggaccacttgattgtatataacgttttgctccgaagtactcttagccattttcttggtcagaataaactgattgaataagggtgtgcatttattcattgctttatcactgtatggcagtagttataaacgggagtgtggagaagggatgaacaactgggaacttctacatgaactccacattccagtgagaattttttttatttgctttgaacgtgtttagttagccacacacgtagaattgggaggcatggtgaagcaatggagtgcgattttagttggccagccatccacaaatttggaaatatcagcacggtggtagcaatctactgatgggctaaaacctctccggtttatctgcaacactgctacctctttcacttttcgctgatgaactaagaaaacaatgcagagacctaggaaaagtaatgtaaaaacatcagtagtatcatattccaagaccagcaggcaaatggatcgcctggtgtagaaatcatgctcaagctccttgcgacgatcacctatggtcatacaaggatggtcggggactcggggttttgctatgcaatgagtctccgtccactaactttctaggtttcagagaatcagtaattgttaaaacacagtggcaggcagcagccacctctagcatcgttacaggtgtcaatattcagttctataattcaacagaaaatatacagtgatcatgcctaggtgaagcaagttaacttgtaaatattattacttgattccgaagctagagccaatggtatatacatcccactttacaaaatcttggaaaggtttccggaggcgtctgacttaaggcggccacctgtgaaatgcactaccacacaggcggggttgtgaggtcatcttaattacgcagatcaccgcctgtaaaattcattttcatagaggaccgccttaagatgaccgcctgcgatgatcctttttaaagacggtgctttacccgcctatgcaaataccttagcttcacatgccttttaagcggcaatcagtggacccatctctgtaaatgcgttttagccacctatagaaagggttttctcagtagtgtgtccatattgagtaacatcgaagtcatggactttatatacgggtgtacttatagtacatcatttatgctttatattttctacttcgtaagatataaaatacaacagcggagagagtagcaaggtcaaaacaggggaatccataaccactccacgaaatctagataccagagtgagagagtaagtgctttgagcgcaagcatgcaagatggctacatatatatgttggattctgaggcgttgcgaatcaagggagcacagcaagttatgtcatatcacaacctgaaaataagcttatggaatcctgatgctacaaaacctccactgtttgtaacacaactgcttcctgctcttaattcacggtacaaattaatagtgtagatagcaacccaagaactgtagtcatagcctactccttgacaatagttggtaatcgacttaccggactgagatacattagctagctagagatgcagatgggcgctgctgccatggctaattagtggaagactagctagggctagctgagaaatgagaatcgcaagacaatataactaacaaaatacgttccatataaaagtcaagtgtgaaaaagcatagtagcatatataatagctattcgaagatctaggattgggacgaagagagtactacttcgtaacatatataggattgggagacgtggtgaagcagaggagtgcgttgtgttttgaccgtccatgtttgttgaagcatcagcgctgaggatgcaaactatgcagatacagttaaacctctcaagaatatatagctagagaaaaaaaggggagaaaagttgttctcagatgacttatataggtagtgttttgacgccaaaatgatttatatttggaaggagaggaagcagtggcttctgaaggcgacagatatttataagcgaaattctaccattatgctattcttaacagaaccgagagaattaagcaggagattataacacattttggttttccatgatgcaaatgcaagaggcccatcacataatatacaaatacatgttgttgcatacaagggattgagaggtataggaaataaaacgggagctttaggtatctgaatgtccaagaacgctttgatgcattcaattcgacgaagcatattaacatcataagcggatgttataaaaccagccccgaaattgacatcggtagctaaaacgcggaagaaaacgccataggagatctaaaacgatgacgacaccgagacacgatatttggtaacggagttcagccgtagcctacatctccggggcactgattacgggcgctcctccccgatccagcatatacagcatatcagagttacaacgactcacggccggtcgatgccggcagccgctccctcttgctatgctaagtcgccatgcggttacaacaggcacgcccctctatttatgagagaacctaggatagagtccgactcatactctagtcctaatacccattataactccaagtcctaaactgtaaccgactacgtacacatattcgacacaaactctaacaaactccaccttgacgaatatgccacgccaacctgaatttgttacttgctcgaacctccgtgtaccaggacttgagttggttctgccacagttcacgccgagccacccgacgagcctacgccaggctcaccgccttcaggatcgtgcacagcaacaccagcatgcctatcttccatgactccacctgcaacagcacttccttgtaacttgtacaaacatgagcttgtcctctcaccagtcataacagtcttgccgtccttcatgatattcatggtcttcctatcaaaatccacctgatacaaccaacttgtctcatgtaggctcccaagcgaaatcaaactcttccttagtcccggcatgtgtctcacatctgaaagtagcacctcgtttccatcatacatctcgaacttgacatcacccactccaacaacacgataactcgtgtcatcgcccaagtaaacaacaccaaaatcaccagatttgtatgaagagaaccactcccgcttcgatgtcacgtgataggaactagctgagtccaacatccacgcttctccagacttctcattagacactgtgagagtctcatgactgctgctatctgaatcatcaccacgagctgctaaacttgcaatgccacctttcctcttcttcagtaacgggcaattcctccttatatgtccaaactcatgacacttatagcaccgtgcccccttatccttgctcttcgacacccccgcttcatgatcatgctttgccttgaccagcaaactctcagcctgagaagcctccattgcctcgtttttgtttgatcttctcaagtctcgtgcaagcaacgatgaaattttctcctcagttttgacagtatccttgccgtgcatcagggtagtcaccacatgttcatatgacggtggaagcgagcacagaagaattatggccatgtcttcatcatcaagtttcacatctaacttacttagatccacaaccaactgattgaagacgtccacgtgcttcctaagatctgactcctcttgcatctgcaaaccatacagctgttgtttgagatacaacttactcgtcagcgacttggacatatacaggcttgccaacttgtcccaaatttccttcggcgttttttcatccatgaccgggtacatgacagaatccgagagactcaagcgtattgttgcagctgcctgcgccttcatctcctcccacttgccagcatccatcttttccggcatcgtctcctcaagagccttggatatcccttgttgagccaatagatccttcagcctcatctgccagagaatgaaattcccggtgccatcgaacttcaccacctcaaatttggaaaccaccatcgccgccatcgacgataatcaactcaacagctgttgccctgttaaattgatctgccctgattaattgacccaccgactaaacttgcacagtcaccagtcggacaaaaccaaccccttttctttttctccaaaaaaccggttcggtttttttttcggtcaaaaaaccaatcaaaccgagcggtcaaaggaatcagatcgattcctctccttccttcggccttttctcgctccccttcctcctgcgcacgcgttctcccgatgcgccgccgcctcctgctcctcacgccaccgttctgtgccgccggccccgcaagggaccaccgcgccgccccgcctcggaaaccgcctgggcgccgccacctcctgccgccgtcacctgcgccgacttcgcgaggagccgccgcgtcgcctgccttgggaagccgccgcctgccacctgggagcacccgccgtcgaagtccggcgccggttcctcgccgggaaccgccgccgccgccgcaagctcctgcccgagctacgacgaacgccgcgccgagcaccacgccgctgcacgccgcctgcaatgacgcctccagccgcccgtgaactcgccgccccaaaccacgctgcccacgaaatcagaggtaagatctcgcccttgccttgtggtttgtttcgattgcgttgttgcaatcccgtggtcctccgctgcttttatttgggaaaaatcgagtcccattcatggacagatcgtaatcctcgtccgattccccttccgtgcttgactaggtctctccctcaatctgtttctctattgtgctatgcatccgagttggaaacatatccgactccttccatgtcacaacctctccagatcgagtcctgtgcaatccgacttcctgctactcaggctctggccacgttccatggtcccggcttcaacaccaacacgtgcacaccgccatctccgtgacctcctcagcctccacgcacccgtacgacctctagcgtagccacctagcctcccgctgaacctcgccagtgacgaataccgccggtcagttgcaaccaatgcttattgctgtgctaacacaattgatcagcgcattgacggtctgaaattgactgcccttctgcttgattccgtcgcttttcatatgtgcgctttctccgtagcagtctgtcacgcaaatacctcgtcaacacctccaaaacagcctataggatccacacgctccgacttttgattgaacgccatcaatctaatcgcgagccgaagccgataagtcgcatgccgtcttcccagccaccgaacgatccgagcgctacgtctagccgtctccctgtcgaacgtagcttatcgaaaggcccgggccaccccgcccagagtgttcgaatccaccgatcgagaacgccgatcgcctccagcttcaatcaacccgagcatgcggccgcacgtctccctgtcgagagtagctcaccggaaagtccgagccacccgcccgaagtgtccgacccaccgattggatcgccaatcgcttccgccgccatcaacccgagcaccacgtctagtcatctccctgttgaaagcagccatcgacggttccggccgccgccagaagtgttcgatccaccgatcaagactccattgatcgccgccgtgctccaccttgcaccaatgcccctccctgggcattacagcaggctatgcggtgtggagcacctccattgcgcctctaccatggaccttctgcaggctctgataccacttgttataaaaccagccctgaaatcaacatcggtagctaaaacgcggaagaaaacgccattggagatccaaaacaatgacgacaccgagacacaatatttggtaacggagttcagccgtagcctacatctccgaggcactgattacgggctctcctccccgatccagcatatacagcgtatcagagttacaacgactcatggccggtcgatgccggcagccgctccctctcgctatgctaagtcgctatgcggttacaacaggcacgcccctctatttatgagagaacctaggatagagtccgactcatactctagtcctaatacctattacaactccaagtcctaaactgtaaccgactacgtacacatattcgacacaaactctaacagtggctatggttggaaaacaattatataacaagatcagattacctacggttggaagaaaaagaaattgaaagtgttggaccgataaaataatttgtttttccaaaattggtcggttcagtgaaataagcgtgtggagagtcatattgtccattcgttttattcaaaaacttttgtaaaatatgtaaaacataaaaatatatttaacaataaatcaaatgataggaaaataattaataattacttaaatttttcgaataagatgaacggtcaaacatgttaaaaaaaatcaacggcgtcaaatatttaggaacggagggagtactttataagaaaaattccatatatacctctaattttttattgaaaaagaccgtctcatgccctgccattgtcattgctcacagctccgccaccttgtgccccgccatcgccgtcgctcgctcgctcgctcatgagctgttgcttgttttgccgctgcgactcgccgttcctagcctcgccgccgacatatccactcacgagctcgcacccgccaccgtcgtcgccatcgcctgttctcggccagggttaggattggagcagcatagagaacaagcgacgactacataacctagtatatatagtagtatttttctttcaactacttgcaagcgtgagcttcttcagttgacccaaattgaacaacatattatggaatttatcaggatgtacgatccttcattatttctacatcctccatttcaaaatgagttaacctattgttcagatttgcagtactagcatattcaatattagattaacttattttggtacgaagagagtacattaattgttcatgttgcttcctaaccgataaaaggagaacaaagagaagagtaaccatcgtcaatggagaaatcctttgtcatatcttacatacccatgaaaggttcaatgcatcacaagtgtatttgtgcagtgtacgtagcctacgcaaaaataggattgggagtcaaaaggaagaaacgaagcatatcgtgaattggtcagccagccacattaccaattttctccggcagcattgaggtatagaaatcataatagacattagagtctagctctcggctggttgatcttccacacactgtaactgttggtgtagtttaacaaaccgatgaagcaatgtagtggagatgctctagttgtccagacgagaaatggcggcactgaagctggtcagatcaggatgaagcagcaaaggcctgccgttgttggccaagaaattctgaaactatcaagtacaccttcaggatcaatatatggtagcatcatccttttgaagcgtcgtctaaaatccttacgtaccaagccctgttagctcagtttttctactgaacatgaacacatttacttgtctatagctagctagtatttgtcgatccggaggttagaaacacaaacaaaaatgatatcgtggtccgaccaaaatgggacggacataccccacaatggcgccgtgtggacccaactgaaacattgggtagttggcgacagctcttttgggctgaaacttctaagttttcaagtgatgaggtatattctattaagtctgggctatattgcatacttatggagcataatgctgggatatagctagtcttgttgattttcattttctaataatctaatatagttgcatgcttcgccagactccaacacatgcatatattgaaagccatcttaaaactgacatcactaagtacttgccatactacactatatatgcactaatgtgaaatatataagttacttagacttctggtatcctactatccttcatgtttacaccctagcagcaaagatgagaattttttttatcttttagacttttttattttctaattttattaatagaactttccaaaacgtatttccaaatctaaagcttttggccgcgctagcccgcctagcgtggccaaataactttgttacgccacgtgcagatgtcgtggcagtgttgttctgccacaccagcctcttgcctctcggctagcatggctaaaagattcagtttttgaaaatatttatttggaaagatttattaataaaattaaaaaaagtctaaaaaataaaaaaaatcgaaagatgactcatttatttgaaatctataacacttaatatacatgttgttgcatacatgggattgagaggtatatataggaaataaaacgaaattaagctttacgtatctgggtgtccaagaacgcttcgatgtattctattggacgaagcattaacatcataagcggctacggttggaagaaaaaaattatataacaatatcatagctcctatggttggaagaaaaagaattgaaagtctacgaccaataaattaatttgttttttttaaattggtcagttcggtaaaataaactaaccgtgtggagagtcacattgttcgcttggaatgctactttactgtgttgtgctccctcatcatgaaaattgtttcacgatgaaaagcagttgtttcaccatgaaaggaaattatatgaaaattgtcatgggatgaaaacctgattggaacttggaaacagcgaaatggcacaagcaaagcgcacgtacgcgatgcgaggagacatactctgcctttgtcaataggatggttcgcatgaatcggactaccagcaatgactgaagcggaaaaaacgaaaatactcacgctcgggcgatcggcgcagggggagccggatcgggcgctcccccgcgcgcctctcccctcacgtgcgtacctgttgggcccaacacttctccctcccctttttttaaaaaagatgtttcattataatgttttactttttatagatctaatgttttaccaatgagagggagggagagagcggcggcatcttggctacagccaacattgcccaagtacaacgcatcctccgctggtgccgcgctcgtcgtcgccaccatctcctcctcaatgctgcgcggccttcgcgcgccgcttgccgtccaccaccacgccccgaccactgctcgccatggccactgcgtcccgccatgcggaggcaaagaaagggcgtggcagagcggatccggtgccgacgaggtggatggcgacaagcggcggggaagacagggagagattggcggcgggagagagaggcgccgtgtggagggagagagagagagagggagagagtggcgatgagagtgagggaggagaccgtcgctgggaaaaaaaagaggagggtgtcgtagagagggagaagagaggggtagtacagaaaaatacccactgtgggctttttgggttgggacacccattgtgggtttgtgtatcttcaccgagttgcttcaaattttgaaaaccccacctaggcgtagcctccattgagagatgtgtgcccctgggagtgccctcagttagtgagggcactctagtatggttttgattgtagatgcccttagcatatcatggtcactaccaagcagaagttcagcactaccttgcgtggtgtgaagtgcgccaatttcaaaccaaatgtgagtagactttgaaattagaggtgatggtaaatctatttgaccattcccagcttcaaaatcgtagcaattgtgtattagtttccacataagatgaaatataaacattggatctagcgattggtcgattgtgaggtcagcacgtagtatgaggagagacaagaggaagccggccagcggttacacttgttgtttagtaatgaaaacgactccaccaaacccaacatccggtggcttgcaaaaaggcccagcccagttatatgggtgatacaatgacatgtcctttgaaatctaatttgggcccaaccaagatgggccgcatggaaatcctacatgtgcgtagatgcattgcatatttctatacgccccatcttgtatgggtcataactgagccactcctaggctcacccaactggaattttttgggcttaaattgttgagatcttcttccaggtacccattttgggttcagactgtgttagtgtttaactttaaagcttttttctatttctcatctcttccatccacctcatcaaaaagataatgctttaaacccatttaatgttattgcttcgataaattcttatatatatatatatatatatatcatcctgatcaaattctaacagagaacgcagaacaaatctttgaaaaggcaagcaagaagtaggtgtacgtgaactatcaggtaattaggaaaacacatatggggagcattgatcaatgatctcctcgtcacccacaaatacctttaggcttggaagacatcaagaatacagtagggacacttgtatccaagggcggagacaagagtagagcagctagagcttgggaatttgatgaaactactactggctcagtataacggtgtttaggcatgtgtcttagggtttttaatggaacttcatgggttgttagatggcacgaacattgagtttctaattgttctatttgtatcagaagctacaacatgtaaagttgagttacattgtttgtcttcaaagtaaaagagacagaaaactgccccaaatcccccccaagtcctttgtttcttcctttgctctgaattttgtcggaacagctacagagtgcgcccaaagtgttcgtccatggttcttcccaacaaaactaattctaatgaataaataatcttttattttgcaaaatataatttaagaactgctgctccaaatttcataatagggaaaagagtaaaaaaattcatgacatttagaggcccagcactagcctaggaatttgcttcccatatatcttgtccagtgctcatgccatgttgaaatacttttcatttttctttcatcaaattgcatgcttcaccagcacgtccatattgaatgccatctaaacactaaaaatacatcccacaaatcctttagcatttttaacccgaaaacttgctaccacaagctttcccaggatgcacatactgaatctctctatgttgacgttttttttttggcaaacaaaaactcaactaacaatttgagtataatttgtggacaacataaatgctactcaatggacatatgaaagaaaagcagagacatagatgagcaacatgagaacttcagcttgagatatacataccaactagagattcagttgctactgctttacaagactatttcatagcacctacatataggagtgggaggcatggtgaagcaaagaagtgcattgtttgtctaccatccatcaagagtaaaatttttatcaacacgcagttcagatactctagatgcagtataacttctcgggtctatctataacggagccgccgcttcaattttcctattgcctaaccaatggagcaaacaatgtatagtgtctagatggctttggaaagcaatccaagaacatcagtggtagcttgctcctagtccagaaggaaaatgtgtcgcttgacgaggtaccactgaatcttcaccagctatcgtgaatgggatgatctgagttggatgtgcaaccaagacttcgccacaaaaatgggaaatagtcataccaagatgaagcaagctaagatgcatatattaccaattatatatgtatcccaatttacaaatcaattagcattactgtgcgatgttagagaaatatttcagatgattttcctactcagaaagaacctggtacatttgcacggtgcattaacaaggcagaagaaacataggctctgcttgtagaggcagagatgactattgccgggcacacacctgatgcgggagagcgagcatggctggaggtaagggtgtaaatgaataaaccgcgaaactcacttataggtctgacctataagtgggttttgcagattaaatacttattcccctggcttgaggtcgtcacgtacagaaacatgtcactcgtagccgtcctagctgagatacggtagcacgcgaaccagactttgtgaggcctaatgtctagcccagactatccaggccacatttaagccacatgcctagcccagcccagttggcaaggtaagtagctgaccgggacatgttggtgtgtaatgcacaaaatcgaacgaggaatggctctttgtaattcagatgttcctatagcattttcgctcaacaacataattggaatctacaaccagcggcgcgcggattcaccgccggaccagcacgcgggggaattgcccgggtttcgtctgcacgatccattgaagtctactgatttcgttgtgtacaagtctacagatttgctgatttctgacaaagttagcaggctaaactcttaattagaagccgtggaacaagcatgcttcactgtggctgaagtgattgagttgagtactagccatatgaatcatccttttttattacaaatcatcttgttgttcaactagtgaaaatttacatgcatgttaaactatgcttttattagaaaagctgctgtgtgttcaatttggtagtaaaatcggcatataaacatttgataagtcggtagtggttttatagagtttttattgatttgctcaggctgcttaaaatttctagttccgccattgtctgcaaccatgttttttcagcattcttttttttttaaacagtagatggtaggagttctaccggatatattagaagaagagaattgaccctatttataatgaaaaccgggcccaaaaaccatataactgcacagtttactaaagggaaaccgctaaaaccttgcacagaagacacaaaaagcctatgacaaaactacaaaccacagtagacatcgagagaagagcaaaaccttcaaggcgaagcctccaaggaggtgaacaacgacagaagccgttatcaacgcccacccaactgggctgggttttcacgcaaaaggggagagagtccacaaggcaacaccttcaacgaggaaacggcacccgtaggcgtcgatgtcgacgatcctaggagaccagactaggcttttgcctaagactccctcaaaaggtgtagagcctctaggaaaccagagccggagtgttgagtattatcgttgccccggcccatcggctaaacccgatgcagcagctccgactcagcctaaacacaaagactctagtatcgtagaggacaagcatcccgctcaacactcggcactacaacaggttcgcaccgacacagggcacttgaagcaacggcgtggccaaagagccctgactacagacaaactgaacctccaacacagacaaacagaacacctcaaccaccgaaaggctccacggccaggtctggaagcagacggccaaaaagaagggaggatcaccaaggagtgaaggaggcttggccggcttgaaaaggaactaagagctgagtcaggggcaacaaagacatcagtgtcttctatgaatccggcgaggatctccgggctttgcgagacacaccaaacaactgagcaaccacctcaaactaaaccaccaacgcagagagaggcgcgctggggcgaggagaagagcaactaagaagaaatgctagtgaggaagggatggggggaagggcaccggcgcagagagacggcagacgccccttttgctaggagacgacacagagaccaaaggaggaaggaggaagggaggaagagaataagaagtgggttgttgagggggtggcctcagcaaccgccaaagatgaagaagaggcaggagaccagagatgccgacgccctagaaggccgactcaccccgccgaccaccgaaaccggcaggcgccgcaacgccgccacgcgagcgcgacggtgaactccgccgcccacgtgccaatattcgcaccgccgcgcatgcctgtcgccactcgagcgccttgcgctgccgtgaccccgtcgcctgatgccacagcggccgccgccagccgcaccgtccaacaacaccgccacagacgctccatccagatccagcgacggcggtgccggatctgtccccgacaagccggaaacctcgccgctgccacccccgccacgggcgaaaaaaagccacctcccccatgcctgagagggggcaacagcgtggagaagccccgccgctgccatcctactcaccattcggctttgccagtagtgagctccagtggcggcgaggtagggggagggggtgacatggggtcagcaccggcggtagggtttcgcccaggtgtcacctgcgcgtgggagagggggggggagagggttgagtctaattctattatgtctaattctaattgtattatgtcttgtaatttttcagctttcacaaattgaataatattaaagtttcagcttttattttacattccgactctctggcatataaaaggagaggagatagagaagcaatactaagttgcgaaccgtattgtcaatcgagaactcccatgagatctacactaaatttagtggatcacgagtatcgtacgtgtagtgtagcctaccataggattgggaggccacaggaagaaaagtagtgtattgcaaattggccatccatccatatatgtcttgaggacgctattcattggggtagcaaactcagtagcttattaatgtagtccgaattaccaagcaaacatagtacaccgtagaggcctttggctagcaaagcaagattgacgacacatataatgctacacatgaaagcaagtaaagcatgtcgcagcgtttgaataagtgaaattgataaaatgtaattacggcggctgcaagctgattgagatgagagcaggaggagaacgctggtcatagtaagaagcaattgtgacaatcattgcgatattttacatgtatgcaaggaatatataataagagcagtcttttcaacgtcctttgcacttacaagttacaactcattttactagtaataatactagccttttaaattcaggcaacgcggtagctccacgttactaattagcaaaactaacacgaccaacaaacgaaaactaaataggtactttctccatttcacaatgtaagttattctagcattttgcacatttataacaatgttaatgaatctagataaatatatatgtattaatatctagattcattaacatcaatataaatgtgggaaatactagaatgacttacattgtgaaacggagggagtacatcattgctcagatgacttgcctattatattttctcacttcatatggaagtccatataaactctctaaattgttactccctccttccctaaatatttgacaccgttaactttttaaatatgtttgaccgttcgttttattcaaaaacttttgtgatatgtgtaaaactatatgtatacataaaagtatatttaacaataaatcaaatgatagaaaaagaattaacaattacttaaattttttgaataagacgaacggtcaaacatttttaaaaaagtcaacggcatcaaacattttgggatggaggtagtatgtacttgtgttttttctccaaaaactttacgtgccagcatattgcttagatgacttgtctattctattcttttacgttataggagaaagtccatatgtatatatacctccaaattttgattgaaagtctgtctagcaacctaaatcttaaaaccggacattcaaaccccaaaatcatatttttaacccaaattctcatactaaataacaacggaagttatatggagtggagtttacaagggtgtagcacgtactacgtgctacttcaaccgtagataaaacaagggtagcgcaagtgacaaaagcaaccgggaaaaacttcgcgagatctgagagagtcgatcgctactactgctttcgcacgaataatgtcgcacacagcttcacacacatatgattgggaggcatggtgaattaaaggtgcacatgacgacttcaccaaccatccatagctaagggtgtaggagcagcgaggtcgcaaacactctagatgcagtagaacctatctagtttagctgtaacacaagtgcctctctctctgttagtacgtccttgtagcttcgacgaccgagtaagcagtttagagcgttggatggaagcaaagcgataacatcagttctgcatgctcatacaccagcaggcaaatgaataacacggctgagagatggactttagcaggagttggttgaagcttcgacacctactgtgatatgaagtgatggctggggttggctgcactgcgtgtatgcaacacgttctacgtacagtactggggtctgatagaaacacttattgtgaaccacagtaattttaagccagcacactgcaccatggcacagatttgcccacagatgtttgtttgcaaaaatagagaatcaaccaataaccatcaatggggaaaaaatttatatatgacataggatctatcggcgcgcagtactttggcatgatgcagatcatatgttgggagttttacagattttgatggttaaactatctcttaacaattgcgagggcctgtttgcaagtgcttttggcatgtgcaacttttcctaaaatcagaagcaccccaaacaatttagatattcattcaaatgctaaaatgttgtagttatagaatccgggaaatgaactagaaaccaaaaactgggttttctaaatttttagaatctagctaccaatcagttatttcttaaaattctgagtcagcggtgtgtctgcaaagcttacctacgcaccatttgtcgccgaagattgatccattggatctcgatcaagcaacacaaaattactctcgctgcaacatatattttctcggctcaccacccgaaccctagatctagccgccagaccctcatccctcctcattcttcttgcctccgtcgttccccgctgccttttctccgccaacccctagacaacaaccctgccggcggccacctcccgccactagacaacaaaaccgccatcgctagttctctgggggcctttcgagggcaaggcggcaaggtggcgcgcagccgcacgaatcgattcaagctctagctagatgcagcactgaggtaaacatcctcacacataaaacttccctagttaaaatgcaacacaattgccccagcagcagcaggtagtgcatgaacaaccacgcaaacagtattctggagggctagggttagtacgacaaaggttgtgggtggcaatgcaagaacgctggaacaaattcacgggagtgagattgcgtgcagcatcacaacagagtgagattgcaatataacttgcctgtaactttttagagaaacactaggataaggtcacgggatataataccctcacctatgcatgcactgtgactttttttccttcctcgcttgcgtgaatcttggattgagtctaatgatctaaaattacgtgaaaagttacatacaagttacactgtatagtatgtatgttacaatataattacactacaattatgatactgtagttacatttgatattttttcgagaaattttgtcaagaaatgtaaataatggttcggaggtggctaggcgatgaagctaaagacctgaggtccggcccaaccacctgatgtacagcacaattctttccagcttaaccaaactgggctgcacttgtgttacaactatgccataataaatttaatagttttgagaaacacgattataattcaccttattgtaaggatgccattgcatccctttcaaaattggactcatgcttgatatctatttggaatccttttttggttattgtattttttatggaccaaaatacccctgcatacactttagatccatatgaacatgcttcattttagatcaaaacccaaactgcaacgaatcattgcgatgatatatctatcacacaaagagagaaaaaaaaagggagaatctaggataagaagaatttacgaaggaaaaaagggaagaaaaagagccagtcgaccccgagccggccatcccctccatgccgtgacctgccgtccccaagctcgcactgccgtcaaactcgatcaccggccccgacatagctcgccaccgccagatatgctcttcaggtctagctcgtgcctcgtacaggatggcatgaaaccaattttgaaagagttgaattagcatgatgaattatattagcattctttgaaattagcaaatttataatggtttggatccaatgaaccctaaataaaattggccaaatatacctgcaatcccattgaagcccaattaactggatatgtgagcctccctctatcctgcttgggcccaactgaaatgatcacggctcacttgggctgaaatttctgagcttttaagggctattttggtttgaagccaaaatgtgccttaccaatgcaaattgtttcgcactttgaatagtattttattagtgtttggtttgataccaaaatataccaataacatacaaaaagttactaaaattttagcacaccaaaacttgcctacgttttggtagtaccaatatttttggcatggtagcaaaccagacacatgctaagtgacaaattgttctttcgatgcccagcactagctaggccatggcaattgcttgactgtcccttgtatagtacacacgcttaattattgagcattcttccccacaaaaaaaaatattattgagcattcttcactagcacatgcacatgtacacattggatgccatccaaaggcttatgttaccatgtatcatatatataggagttttacccccaaaaacttgcaacatatgctacttgctacttctgtactagataaaatgagagtggagagaggcaggaaatttgaaacttctccatggcatcaaccgtccacgttattccaatgagagatttccacaattcgcatgcgtgtaccttagctatggaataacataggattaggagatatcgtgaagcacatgagtgcattgtgacccagacaagtatctagtcgtaaacctgttggagcgatgaggtctctagctcttgattcagtaaaacatctccagtttgactgcaacacagctgcctctacacttgtgtcctgaactaaacagccaagcaaacagcgtggagggatggagagaagcagtgcaactgcatcgaattctactctgctcgtagacgggaaggcaaacaagtctcccagatgataacttctttggtggagggatgaacgagacgtcgagacactgagctgggaggcaaccaacttgtgctttctcttacttaactaaatattgaaagtagctagcttgttgatggcatagcatttgaacatttgttttttctgcgtagatatatatgcagcagggtaacatgcagacatattagaacattttgaagctagaaccatccgtatatcccaattagcaagttcgtatgcctctcatatacggcatcatcgatccttcgttagaaaaaaatatagattacttgtacgaggaatcaaaatgcagaggcagcagccactaataaaaaaccctcataggtatcggctcataggtgtcggttcatttaaaaccggcacctattaatattttcccacttttgtgggatgaaaaaaatatagaactggcacatatgagtaaactatatgtggtagttcagagaacaaccggcacttattaatattatatgtgccatttaaattaaaaattgatacctataatatattataggtatcggttcttaaacaaaatacacccaatgaattaaactgagacgagccaaagacctggtgggaacttttatttgactccaccaacgcacctaacaatcttaaccactcataatgtctctccaccgacaccaaactcatctctctcacactcttctccgccgtccctctcctatgacgcctcctctccctcctctcctatggcgcctccttcccatcatctcaccgagcaactgcagccgcggtcatggtggcgtggaggccaagtcgggggattcggatcgtctaacttcgccctgtgaaggtacgaacgtacgtgtgcagtcacacttatccaccatccatgcaatccaccatccgctactgccttcaccctcgtattgattgttgaagctttgccattccatcttcctgctaggactggatgcatcaatcggcagtcatgcaccatgcttgctgcgtggaatatggaacacaactaaaatgagcggagcaaagtatgcattattgcattggattctatattgagcatacaaagcacgcattccatcaggcaattcataagtttcaaacaacaccactcattactaagcacaaatttacactggagagtcgagcgacaccgcaaatcaaagagattgtgaatagagtataggttgacaagaacaaaagcagcgccctagaatacaatctccatagctaaagtatgtattcagtgccatcagcagttggaaaaacagacaaaattaacttagcaaatttggtacttgggcccggcaacaacaaaaaatacttcagaggcggctggtgacagccccgtactggcagacgagctccggccgtgctagtggccactggtggcggcaatgacagcgctgagacatcgtcggactgacacttgagtgcgtcttgttgggttaccatcggcttcaaatagactttatcagcagttaattaagtgcatgcgtcacacgagccgttggattgcatggatggtggataagtgcgacatcacactcgtgccttcacgggtgaagttagacgatccgaatcccaagtcagggcagtttgcactgtcccacccactgcagtccgggctcttcctccaccgccggcgccgcaagatgcaaggcggccgtcggggtctctggagatctcctactcaagaccccttgctgtgcaaggtatgggatttttcccctttttgtgcctgtgattggtttcttgcatggtttcctcaagggactgatttcattgagatgggattgggtgtagttggcaaattggaacgtggtgcatcgcggatggcgaatacatgatgtgcgtgttctgcagtgaggattttttttttcatgttgaagttaaggatttaggggattattcgtgtggggttgatcttgatttgttgatttgggtgattgttgattctgcatgttcttaatctgatgttgggattagggcaatggatgttcattcttggtctgattttgggaaattggtttgggctggtcgaagcattggctcatagagccaatgctacgagccaacttctcctctttttctaatcgtggggagaataaaggtgccggttctaccaccagctccaatgactcaagggtattagtgccggctgcaaatcgacacctatgttgggtttgcaacaggcatctaagaggggttctgcagcagtgagcagcgggcacgaggaggcagggagattggtggcatggatgctaaggtagaggatctagcaagtaacaagtcatgatgtctagcccatctggcccaacctaactgagccgcatgtcatccgcaatcccgttcaggaccaaatattatgggccacatatcagccacaagtgcattccatcccacctgacaatggtgacagctagctaaactctcttttggggtgaaatatttgaggtacatgagggtgtacatagccaacaagataaaacaaggaatggttccttgtaattcagatgttcctatgccctttttcgctagctacttgcaacagaatgtttcttcagtgtgcccaagttcaataacatccaagttattatggactttatgaggtgtatgatcatacattatatctgcattgtatgtgttgcttcctcagtggataaaagctagagtataaagtgaagcaatacccaaacattgtaaatttagacatcctatgtgggatttacataccaacgataggttcaatacttcattggtgtaagtctagtgtagcctacacacattggattgggagacgaaaggaagaaaaatagcatatgttgacttgaccaatcaaccaaatcagatcaggactgcattgatgtcttaggccttcttctttacttcaactttttcgttttctgttagcacgtttttcaaaatgttaaatagtgcgctttttaaaaaaatctatataaaagttgtttaaaaacaaacaaatcaattatttatgtttataatagttaatattaattaattacttcctctgtttcaggttataagatgttttgactttggtcaaagttaaactgctttaagtttgaccaaagttaaactgctttaagtttgaccaagtttgtagaaaaaagtagtaatatttttaacccaagataaatttattatgaaaatatattcaattattgatttgatgaaactaatttagtattataaatattattatatttatctataaacttggtcaaacttgaaatattttgaatttgaccaaagtcaaaacatcttataacctgaaacggagggagtatgtgttaatgagctttcccatttcgcgtgtatgagaaaattttcctccaaacgtttgcaaagaacacacttgcaattttataacccatacacaatgtttaatgagtcattcggtttatcctaatgttataatacttaaaattggcggatgggtcagatgattttagaacaaaattagttggatattgactatttgtggaaggaatttttttacgagccacaagcaatttgggacccgaatgacaactgcaacaagttgtaggacctatatatatctgcgagcatgtggaccatcatttaaaacataggaccatcacaatcctcatggcaaatggacagatggaagtggaaccatctcatcttaaaacaggggtgagtccaacccatatcttgtttctgaaccaaacacatgcctagatgacatagacgagagaattttagggacttcgtgaccacatgctttgtcaagatccataaaaagaataacatttatgttaaaggactttataaaaggttctaccaaataaaaaggacagcggaaaaaaagtgggaagtgggcagctgacaacttctcgactagaccagtgcttcacaagcgaaccatgtagttacattacatacatagaaatgggatgcattgggagccaaaagagtgcgtcggcagcttgtcgtccatccaagatctcctgactaccagtgctttggttgcaaagtgttgatgcagataaccctctttggtttaactgtaacagaaatgcccgaacaaatcgatctcggtcaaccatgtaaacagtgttgaggacgaccggaaacgatgaaatggaaggggtagataaaaagctgattggctgctttcagaccaggtggaagttgtatggctgttatagaactcattgaattcttggtagcgggctcccaatattgtcgaacaaaaagtttccatagaaacagcactccctccatactcgtaaaggaagtcgtttaggacaatgtttaagtcaaacattggaaatataaatcatgatcgaataactctcaagttgttgagtttgaaaatataaaaattatatgtatagatttgtcttgaaaatactttcagaaaagtatacatatatcacttttcaataaatatttttatagaaataagaaatcaaagttgtgttttggtgaccgtgtcgctgtcctaaacgacttcctttacgagtatggagggagtatttcagaaacacagtaatatataggagtattttgatgtccattgatctacaacacgcttactgcaggcatacaaataaattcaatttcctcaagtactgaaattcagtggcagcagttcatcccaactgcacaatcgtagtgattgcgtcaaacacgagagatatatagtatgcacattggagagctaaccattagtcgatttcaagaatcattcaatgacacaaagtagatgatagacgtcaacaaaagcgagattttcagaagctgataaaggttttcaaaaggagatcattagcagttacccattcactcacaaaaacgactaggcttgaaagagatcaggaacgacagtacaacagccacaattgcgcagctgctggtcagtggttattacacttggagttcatacgaatcaaccagaagcaagcacataataggtgtttttcttcaagcatgcataatagtttttgcatcgaataataacttttccaaccacaagcagatttggtcctcagacaaaacaaatcgacactatatatcatgtgttcagattctcaatgatacacttcatgagagttttcgatctcgggtggtctccagggattctgttgaattgactggacattttgataccattcgaatttattcctttaactcagatctaaatggcttccattggatcattcattattttttttcgaattgcaccaaagtcatagaatttattcacaattagcatttctctcaacgaaattttgcttgagatatatcgaactcactatcccttgacccagtggagacttttcttcggggtgagaaccaccagggtatgaatgaaaattttattaatattggcaaaaagtgagaacaaaatctaatgagataaatgtcattttttatataaatacaaatcaatatccatattggctcaagccaaagttttcaataccagtcccaagctcaaacattatgtaggttgtaaggaacatattgttggaattaatagatgggccttagcccactcgaagtttaattctttgaaaaatcagaaaagtccaccacatgcgatggcatgcatagcgagtttagtaccaccttacttattctaggagagagggatctccttagggaggatgccctcctagccacttgaagtatgtgagatggagagaagagggggaacacacgcgcttgctcgcttgccgggccgggcaggcggcgcgcgacgtacgcatcgaatagatgcagcctgcttttgcagttatgttttgctgtgtgaaattcggatttgttttattttggaaatattctgaaaaatccgagaaaattcggatttgttttgttttggaaatattccgaaaaatccggtgcgtgaaaacagacttaaaattggttcctcacccttacgcagatgcagcctgcttttgcagttatgttttgctgtgggaaattcggatgtgttttgttttggaaatattccgaataatccggtgcgtgaaaacggacttgacaagggtgtgtaatcacctattatttatgcatagtatctcctccggtgcgtgaaaccggtcttgacaaggatgtgtaatcacctattatttatgcatagtggcttctagttctcggaaatattaaaaagagatagagaagcaataggcgagaataggctagctgggaacttcacagtaagataaataacaatactactctgagattcatggcttgctacttgcctatttggcatgcatgtaccgtggctacatacataggattcggaagtattgggaatcaacagagtgcgctatgagttggacaaccatctaatcccaaactagtgtccactgcgaggtagagaagtcctgatagagtaaaatctatctgttttcactgtaacacaactagctgttgatgcgaaaaacacacattgatctgtgagatctgcttagctccagtcaaattttggcgttaacatcagctcttcccacaggctcttatcaagcgagcacaaagtgcggaggaaagacttaggccttcttttcttcaactccaacattttagttttccgttagcacgttttttggttaaatagtgcgcttttaaaaaaatttctatagcaaagttatttaaaaaacaaaaaaaatccatttttaatgtttataatagttaatattaaattaatcatctcttaacgagctttctcgtttcgcgtttatgaaaaaaatttcctccaaacgtttgcaaagaacatgcttgcaattttataacccatacacaatttatttatgactcatattgggtttattctaatgttataatgtttaacattgattgacaaaattggttggatgttgactatttgtggaaggaattttttttaacgagccacaagtaattaatttgggactagaatgacacattgtaacaagttgtaggacttatatccatgagcatgtgggctatcccttaaaaaataggatcatcctattcctcatagcaaatggatatagatgaaacgtaccatctcatccaaaaataggggtgagtccaacaaatctcattttgttactgaaccaaacatatgtctagataacatagacgagcaaattttggggtttgccatgcactttactctgctttgtcaggattcataaaaagaataacatataacttaaggactatataaaaggttctaccaaataaaaaggatagctgaaaaaagggtgggaagtgggaagccgacaacttctcgacgaggccatgtagttacattacatacatggaaatgggatgcatcgtgaaccacaagagtgcactggcagcgtgtccatcatccaagatctcccgtgtaccagtgctttcgttgcgaagtgttaactgtaacagaaatgcctcaacgaatccctggagatcaacaatgtaaacagtgttagaggacgacctgaaaaaaaggatgctctcagatctctgcacgttggaagctgcatggctgttatagcactcactgaattgttagtagtgggagaacaaaacgttgccatagaaacagtatttgagaggtacagtaaataggactatttgatgtccatcaatctacaacacccttcttactacatgcatccaaataattagattcagttttcttatgacctgaacatggtattacactggcactggcttgacgcctgacgcaagagccagacagtaccgtggtgcatattgatgcagcaagacagggatggagactgctacaaaccctgaacctgaactttcgaaattgtgggttcctagatgttggttgtcccaggcatgcatcatatgcatagagtatatttttgcatggaagggatctcctgtaaaggggacttatttggagaactgtggatggtacaactatttttagataatggaagttctattggtctcagtcaattacatcaaagtgacccaattatcctaagaacactctcagcctctgcatagctaagatgcacacagctaaaacacactaaaagaaagacatcaacagtagtattaaggaccatcaattctgagactagatcgccactcatgtttccgggtaaaacaatccttgaggatggtacaactattgatgtaaagaatgataattggatccctaggattggagtggactgcttaaaccactgggtttaaggcaaaataatggtgtaatcaaagttaacgatctctttcccccagtaacaaaagacaatggagtatggaaagttaaccactggttccttttacttcagctgtacccgtagcatctaatttttgcaactactacttacaaccacaagttttgccagcatgcgcatattaaatgacattcaagttatggacttgacaagggtgtgtaatcatccattatttatacatggtatgtcctagttcctggaaagattaaagagagaaccaagaggcgagaattggctggctgagaacttcacaataagataaagttactataccgtgagattcatggattactacttgccaatttggcctgcatgtacctcagctacaaacataggaatgggaagaattgggaatcaaaggaacacaccgtgagtttgagaatctcatctaagcctaaactagtatccatgtagatttagagaagtcgtgatagagtaaaatctatctgatttcactgtttagggcatgtactaagggagagtcaggtgtgagctctatatcatcaaaggctattatcttaccgcagttgagacaaccattaatgtaccaaaataatcttatctttctcttctttcctttctttcaaaccacatccaacaaaatattttctaataaatgttaagagtcgactctgaactagtgttatgcgtaatgatcatgtttctctttccatccctctctttgttccatgtcatcaaatttatttgcacgataatagcgagagcccactagtaaagaccatcgtacataccctaacgcaaccagctctttccatgggctcttagcaagtgagcacaaagttccgaggaaagccaatggaagttaaaagatttcgatcgactgtagcctcctgtatgccagctagcgggcggacgagttgatcggttagatctgcactcatatggaaaggtgcctgtcgtcccttttttcgttccttattttttgttcacgttaattttttgttttccctcctatattttgtattttgtgtatataaatgccttggaaattttgttccgcatatatgaacttttgacacatctatatatatacatatatgcatatataggcacacccaatgaaatttccgtaagtatattacatctgagtagttttgaaggcaatcaagtatattcatccacaggtattttaaaactttatacccttcaattgaaagctgctcccagcatatggtgcacatctgaggtgaattattgctctgcaggaagccaagcatacactacaattatgtgcatgaatacattttttagataatgatgtgtaatacgtactggcagataaaaggggacttgacagaggacagaaaacattcagaactacaaacgggtttggagctcagacatgagagacacaaacaacacttttagtatacacatgcataaggcatacaaattaaggattggatcattggaaggtatcggcaatcaagctagttgctttgcaatttctaacagcttccccactacaaaaagaggcagtatttaggtagctaaatcttgctggtttactacattttaggctggtttctatctcaactggctagtgtgttttatgttcaagcgaatgcactatggagggtgcgtgcatgatgctgtcaggcgccttgcaactatattaccctggcatctgcttgagtaagctccattacaagaatctatcatcaacggtagcaccgatttccgataaattgatctgtcttgtacagatccgctgatcaagaaactttcatgtgcgaagaagatcagggggtacaaaagagatatctgaaaagtttattcaagacaaatgagatcgtgcaggatacaaccattagaaatttagaatttagccaggatataattaacttgatagttgacatggccataataccaagtatgcttgtagaaacaattttttcagtgttctccactgatgatataatcaatttagaccttccatcttttctcatccaatagacattatatatttgataaattttaccaccgaaactactagtagaatccattgaaaaaattgttggtagttggaacattttcttcagtagctaatagatatcataaagcaattgttcatataacttctggtagtcataatacttgtactatttatcgtaaaacattaccattagagataaccctaaaaatactcgcttgcaaaatgagaattcgttgggtgctgaatatgaaggacattgatactccaattgccccaatattagtctagtgaaatattttaaaccgttgacaaaaaatagagcgaaatttgattttgtttattggagtaatctaatactattttagctccgtcaactagtagcaagtgcatgcttgataaataaaggcatctaagctcaacgtacgaatgagtttactaggggagtacatttttgacagatttattgttactttggtcagataaaaagagagcgagagggcattgtgtcgtccctccacatagctgcagtcactacgccagatcagtcaatctttgatggtccatctctgatgcacagatttatattgttaatttaaagttttctttatactcttccacatataaactctagctgaagatcaaaattcagaacgtattggtgggagacgttaaaaagcgcttgtcatgcatatagtgaatttccaaataggattgggaggcattggtaatgaaagaactccgagagcgatggatccagcatccaagactttttagctgtagcagaaagtgtgaagcaaactctctctccatcgatttgccagttttcagatgttttggaagctaagttgcctctcgcgctctggggcaagtgtcagttgctgttcagaactgtgcacagtacgactgcctcaggtgaagctagctgtgttgtgcatgtagcttcgacgattggaaggagagatctagcagctgtacgactttccaggatggggttattcgagtgatcgattagggctctgtttagttccacatcaaaattagaagtttggttgaaattggaatgatgtgacggaaaagtttgaagtttgtgtatgtaggaaatttttgatgtgatgaaaaagttggaaatttgaagaaaaattttacaactaaacacagcgtaggtgttctaaacaaggataatcgctaaatgaatagagcatgcacccataatgctcttactccttaatggaaaaatctttcgaaatgagcttccctcgtttagtttttagagggctttatttaaagctgatgttcttctgcatatgtgcagaatgaagaaacctctaaaagagatagttttttattggttaccaacagtgtaatcttttttctagtctcttgtaatttgtaaatatctttttttctataaaatcacactgcgaggcaaagtcatgcagtatttccggtaaaaaaaatattcgtcatgtagataagtaaccgtcgtaagcgtaatctgcataaaatctcgatcttaatttgctttctacatatagtagtataatgcggcatagcatatatatctcctacttcctcttccaataaagctatgacaaagaaagccaatcaggggaggagtcgagtccgaacatcatgagaaggaattaatctgaaagaagtatataacgaggcatcaacagaaacaaaatcatgcggatcttccattgtaagaaggcacgatgtaatttggcaatgcactcaaagcaatatgggtaaaaatctaacaaaaagtactagtaccatacttcgtcttaacggtccaacgaaagatcgaagacgatacgaaacacctttcaatacgtgaaaattctagataatgtgtatacaagggaaacaatatataataatgactcgatggaaaattaatctgtacttttacttatgtgcataacttatgtttaattgtcgaaacaagattttggcaatacgaaaagggggtggctatcaagctagaaaagtggatgggttttgagacacagagttttatacaggtttaggccctctcaatgagaagtaataccctactcctgtgcggagattgatccaccgagtgtattattgatcgtatgatctggaaaaaaagttatgctccaagagacacccggacccctccttatatagggggaggagtccatattacaaggtacaacccagtcggatacgaaactgactaagaggtgagtaaagataaaatataatcgtaactgactaagactcagggtatttccttgatacacaagtttggaatttaacccgagtcccttaaagatattctatctacatacagtacccctatacctagtcggatatacatgccatgtgggtatggggtatccataatctccacattaattttcttaacaaagttagtgatcaccagtcattgtttataactaatttatacttgtaccataagttgagtgaaagttggggattttctataaagtagtgaacattgatgcaattcaacaacaatgtactgaatattttctgttgaaacattcgaccaaaaaatctatacctatactaattgggcactttctacgaactctcacgttaattagaaaaatccatccgttaatcgagtagacagtgtaatcttaaccgtagattatcaatctccttttaatcgttttaacgtgatgggcctggcaaagcccattcaatctgtcctactgtcacccacctacgtataccttttcttttttttctaatattcttttaatcctttttaacgtgatgatggaccagtcaccagggaaacatctgtctggctgtctcccacataagaattttaattctttttctgtttttttcaatacgcgagtactactattttctttcagtaatctgttgtcgtaagtattcttttccacagctgtacgtccaaaattggtagaacggcataattgcattattcggtagatggcaaggattaacgcgtcgacggtagtccttcttcatatgcagatggctatggcgtacgtcctgcaaactctccagctctgatgattttctcaccaagagacatcgttcgaattgatctctctgcctccggttgatattttcttaacaaagatttggttcaatttcttttgtttaattcataactcagctatgccatcatttgatcttataaattcaggtgttatttgcatgtcgatctagaattaaacaagttcacttgcacccaataagatcgggagtggccagtacatctgcacagcattataaggaagaagcatatgcacacacaccccttaatacgcacctaacaaatgcatactcaaataaacggagattagctgtaaaaccaaaaaccatagccttcatatggatggtaagtgaatccttacataactttcaaatatgactaatttaatattttttatgttacttggcatcatatcctacaaatatgaagaactgaagaaaacaacacacacatgagacataagattaatcctatttcgaattacatatatagatatatattttatattatactccatgtggttaggtgaatcttattaccagctgatcaacttcaagttgagaatttgtttttaaagtaaacattccaattgcaatatgtaatctctttagcttttcaacattgtctaaaagcaagattccaaagtccaaaccaaattaaaagtacaacacgaacaaacatgcatgattaattcttaatttcgaaattattctatcaagtaaaattctcgatcgttactgaatactaaatctaggatcattaaatcatggaaaaacagtaactaacacttgaaacaaagaacatttcaatacttattaaatagtattaacttcacaactattaaatcatgaaaaacctataatcaaggtcccaaaccgagtacaactctttaatagttaaattttggagctattaaataacaatattctataatcaacacttaatgtccatactgggtatagtcgtactaactaattttaaaatttcaaattaaataatgaaaatgataaaccatgactccatagatgcgtgcaaatcaacagttattaattcttatttttaatattattaaatatagaaaataaaaaataactagcagagaaaatattaagatggatgactcaatatttgtgtatttttcatttttcaacaatcaatcattctgctgtgtttagaacattaatataaagtctacatgtaaatttaataactaccgtattggacatatgataaaatttcaatattaataataatatcccgtgcaacgcacggatagacggctagttatctgaatttaaagacattgttcgattataccagttagctagctgacattcagtatgtgcgcaacacactatcgccagttccctttgcttgatttcatcgcatttaataagtttggactttataaggatgtgcaatcacacagtgtgttttcaactgtatctctccttaatttcctagaagataaaaatgaggagaaatagggtgagaacagggcaactcacagctagcatctcggcaaagaccagtgcttcacatgcttacaatgcagttacgttacaaacgtagaactaggatgcatcgggaatcaaacgagtgcattagcagttagccaactatccaatagttcttatccaagttttgatgctcttgtttagctgtaacacaactacctctgccaatagcttgtggccttccggtcaaccgagcaaagcattttattgcttttagtttttcagtctctgccgtctccatattttctagacacccaagagtcaaaatgtctcatagaaatagcatggttgtgcttcagaggtgctcattgggaacttttttcatccacacacaaaacgaggtagctcattagcatatcattatttaagtattagcttaaaagcttcaaaatggattaatataattttttagaagtttttctatattcattttttggaaaaaaaattgtaccatttatctgtttgagaagcgtgctaacgtgaaacgatggggtagaatttgggaaacatgagttacaaaggcagctaagtatgaaacacagtaacagcagtatcgtaattccgaagccaatctctacagaattaattcttacgcatgccgtcaaaataaattcagttttctaattgaacatactaggtaactaagatgcacacattaatagattttcaattcagaggcagtagtttatcccaatgcaaaatcatagagttgtatccaatataagatgaaatatacacattggagatctggccagtactagttgatttgacaatttctctcaatgtcaccaaggagatcatagaacacgaggcagctcatacacatgaacaaaagcgagaatatctgatccagattaagggtgtgtttaattcacgctaaaattggaagtttggttgaaattgaaacgatgtgatggaaaaattggaaatttatatgtgtaggaaagttttaatgtgatgaaaaagttagaggtttgaaaaaaaagtttgcaactaaacacggtgaaagaatctcatatagagagccctatagcacatacccattcacacacaaaaacgacgactatgacttggaggataccggaaatacagcaggcacagttgtgaaagctacaggccagtggttaattcactttttggccgtgtttagttcccctattcccaacttcctatcacatcgtatcacatcaaaaacttttctacacacataaacttctaactttttctccaaactaccaactttcttccaactttctaacttttccacatctaaacatagccttttttttgaagcataaaccgatcaggcaacagcctcagcagtacatttattcgatagcaaccgagagtacaactgattttgcaaagaagcccccgaaagtagggaagattacacttaaaacacaagggatgcaaagaaggacctgaaaagataatgaaaaagcaattggagccgtggcccggctgcagaagatgacgcctaggctcgaacccaaatggggcctccaagagtaggaggttgaagaagccttgacaagcaaagataatatcactcgcactttatgaatcctttcgccggagacgaagaagatggccaacaccaatgcaagaagctcgccagagaagaactgggcggccggcgcaaccttcttcttcttgggctagaggacaagtctccaaacccgagcaaatcagcggaactcctagttgtaggcgttgaaggggaacccagcaagtacaagagaccccgatcgatgagaatgccggtgaagtcctccatggccgcaagccgggacaagaagagcgaaaatgccggtggccttcttgagccgcacaacgaacgtgattaacccgactatgggagagacccaactaagctaaagctatacctattaaaggagaagccggacaccctcccctcttactggcgaccggagagccgccggattccgaaaggaagaggacatgaagaagcactagtatgaaatcgtccatctatgacgttttgctcgtgacgctgtataatttcgtattgaacagagcatatctatgacgaaatttcatgttttgtcagggatcactcatggtgggggtagacattgaaactccatgacgaaatttaaaatggcgtcaaaaaaacaatagataatttcgtcacaatggtgtgcacgattcatgctcctttattagtacaatttatgctgtaatagcaaatcaggttgtcactggacccacatataattaaagataaagtaggtcgctacattcgttttagttatagcccatgtgaactattttttctaaaaaatatgctgcacacctaggggtcgaaccaacgacctgtggaatggcataagtcaagcttaaccactacactgcgaagatctttcatgctattggtgtctcaattctagttttttttttcacaattcttgaacgcatgaatgattgaatgttttatgcggacgacctaggacctgcatcacctgctcgtggggttcatcataaagtgtggtttatctttttaatctctggctaaaacttgtaggtagtttttctccctatactaacttcaaatttgattattcctttttctaaatttttctaaattcatgatctatcaatttattgtgttattacaactattatttttgtcataccttaagggacttttttttcaccctgggagacgctccagttaattcacttggagttcatatgaatcagccagaagcaagcatatggtagtatgttttcaaatatgatattcctgcatcttcagacgccatgaaatatgcataaatataatattcgaaaacatacgcaggaatatgatgtgtcgttctttatactttgttagaagttgttatatttggttttcagccaagagttgtagcttatgttgaagtaaatgctatctccgtattttaatatataacgccgttgactctttttataaatgtttgactattcgtcttattcagaaaaaacttatgttattattatttattttattgtgacttgatttatcataaatatttttatatttgcacaaaaattttgaatatacgaatggtgaaacattggtaaaaagtcaacagcgttatacattaaaatatggaggtagtagatattatcaattatcttaaaaaaaggtgtgatcacttctcttaccacgaagggggccttgctcttcaaacagaacaaaaaacgggcaatttcatgtagttcatattctcatatttcgtgagattttgttatcttggatggctgggagattttattgaacaggccaaaaattttgaatacattcaaatttcttaagttaaattatcttttttcaaactgcgccaaactcatagaatttattcactattagggcgacgatcagcaacagacggcaacctccagatatagataccctcggtcgcctcatcgagctcgtcgtcctcgggcaccgactgtgactccatgccactgccgcccccactagtcaacgagccgcgggagatgccacgacgatgacgacctcatgctcaatgggatttgtcggccagacagccttgaggccgttccgccatcattctaccgaagatgagatctaggcggaggcaaggtggcggcgacctcgatggcggccctccgtcttcctcccgatggcccaacctcccacaggcaggctgtctgcttcgtcggcgccatcatcgattcgggaagcgtggagcaggagccgggaacatgaggaagtgcggactcgtcatctagatctatccatatccacagcagctgccactagtggagaaaccatctttggtcggtccaccagatttcacaatagtcccggttggtgttaccaaccggggaaaagatcaatataagctttactcccggttgatgttaccaaccgggaaaaaaaagtcaacataagcggggtggttgcacgcgatcggatcaatacaatctcctcctctccttttttaactcatctcctcatatattcacccttatctcctcctctccctcctcctttcctctcctctccctcctccccacctccctctgcaacggcgggacgcagaggcccggccggcccgcgcggtggcccggcgcgcggagggccgaccggccggtgcgcggcggctgccagccagcgcggcggcgcggcgtgcgaagggtcgggcgaggcagcgcgcgggcggctggcggcctcgcggcggcgcggcgtgtggagggtcgggcgaggcagcgcgctggcagttggcggcctcgtggcggcgggcggcgcggcggcgggcggcgacgcggcgggcggcgcggcaagcggcgcgccggcggccggcgaggcagcggccgttcatcttctttcttttttttctttctttttttataaatctgtgattcggatatgagacgatttgtgtgtgatgtgaatatgtgatgtatttgatttgtgtgtgatgtgaatatgtgatgtatttgtgatgaattttgtagaagttgtgatgtaattttttttaagattttgttatgtatttagagattgatttgagaatttggagactattcggggatgattgatttgggattttgggatgggatagggtgaatcaatatattaaaaataatgaagaaaagaatagaataaagtagcaacctgagctctatctttagtcccggttggtaacaccaaccaggactaaaaatggattttactcccggttttttcacccgggaataaagatagcgatctttagtcccggattcgtagtcccggttgaaaaaccgggactacaggggggttacgaaccgggagtaaagcccctttctccaccagtgtgccttcccaatgcacctagtcatcatcaaatcatccaagagatgtgcggggcggtggcgccgagaggcttgcacgagcgccacctcgagcttgcttgatggcagcggtgggcggcggcgccgccggccttcacggtagtct

SEQ ID NO: 7506 - DNA, 25136 bp, Oryza sativa
attcttcttcctcctccagcccactctctccccccattttcttcttcctctccctcttttccccctctcctccctcaaatttccatggagtccagctgggtagcgggggctcgagccctccccccttcccccgcccccatactggctccgccgctagcgacagatccagccggcggcggagctcgagcgcggccgtgtgggcgacagatccggtcgacggcggagattgaggtgcagctagggcgacggctcggagtgtggtggagctcgaggcatggatccagcagtcggcggctcgaagtgtgacggcggatcctgggcagtggctcgatcgtgggccacggatccggccgacagcggagctcgaggtgcagctagggcgacagatccgggcggcggcggttcggaacgtggcagagcctctaggtgtggccggagtgcgacgacggatctagccatgcagctcgggggacgggcggcagcttggattgtgggcgaccgtggctccgggcacgggctgcagatccgccggcggcggaagcttcgggagtgggcggcgctgcgacgatactgccacgatgacggtcggcacaacaatggtcgacggttgttgatgcaatttcatctacatgtattgatgtttgcttgttgaaaatgaagtggaaaattgatgcagtgttctctggaggtggattttagtatggatctgatgtggatttgaatttggattggatttgaaactgcagctctagatgtttatttggcttgaatttggatttggattttttttttttgcaaaaatttctttttgctggcggtcctcttaatcgtccacctatgaagcggatcgtaaccgcaagcgaaaataatagattttcgctggcctttgattactggcggttgtaccagccgcttgtgaatttcggctgcttgcgagaatcattttttatactgattattagcctggtgaaagtttaaattgttaacaaagaaatactccctccgtcctctaatataagggattttgacattttgtatatactgttttatcattcgtcttattaaaaaaatttgaaattattatttattttatttgtgacttgctttattatccaaagtactttaagcacaacttttcgttttttatatttgctcaaatttttttgaataagacaagtggttaaacagcgcaagcaaaatatcaaaatcacttatattagaggacggaggtagtaaattaaatacgagtctagtactggtttaggtctcgcaacgagttgcaagtacatggttgttgataaataaatacatccaacctagtacagtttcatcagggagtacattttgacaagatctataaatatggtacttggtcagataaaatgagagctaaaagagaggagaagagaagggatgtgcattttaaagttcttttctacgcctcaaattgaaaacttcagctcgagctgagggctcaaaagagagaaaaaaaataagataaaacttaccagtgagttcatatcagcgagggaacagagagattttatagcttagctagcatgctgtaatgaacttacatatgggattgggaggtattggtaataaaagaatcactggtcgtagtcgttcatcgtcacactttttagaccctgtttgtcacaactctaaattctaactctcaactctaaactccaacttaaatggaagctagctcctataaaagccgagatgtgtatagaaagtgtttggctagattactcagctccacgccaccatgtctctcgtcaccattttatcgaacaccatgttagcgtcaccctaccgttgccgttgccggttagccgagccgctgccgcgggtcagcctacggggccttaattacaggaggaattgtccattgtgcttgtcttgatgagtttaattcctggtgtttaaatctccttgtaacagagttgccacttgtcttttcaaaaaaagaagttgccacttgtactccagcaaaccgaaggtaccattcaggctgtatggttgcctttgtttcagttgtgcatgtcacttcaacatttggaaggaaaacagtagacgaaccttctagaatgaaagtgactctgttgattctaatcatcaaggaggatgtcaatccattagtgtaaaacacacccatgatgctctaattaattacttaattggtaggagtatatatgtacatgcaactgatgtaagctgcgacgacgtcttgtaaaaacaaaccgcatgaactctgaaaccttatctttgctttgtattgtaacacatttttagcacctgctccctttacaaaaaaaaaaagttatgacaaataaagcaaatcaggtgacaagtttgaatctggtgatgcacagaatgaaaaggaattaaataagatgacttttactatacaatatactggtagtatatattgctagtataaataaggttatgttgggaatatgtcgcaaaatagaaaatgatcagtagttatttcgtgttatatcttcactccgatagtaattcttattgtccgtatgtcagatcggattactgaccggatatggctgaatacagggcacaaccaaatgtttttgattggatcgatagattcatcaaacacataaaaacattaacccgtgttagataactagtgaaacacataagaaaaataaaccattttacccctattatactatagtcgatttaagtgggtactaaaatcaatctacacccttagattgtttatactaccagtatattgtaacagttcttaaaataaatagtagaatgagagatgaacagaaacaaaagcatctcgttctgtcatcaaaagataacgtgtcaggttatttggcatatcaatgcgagggtatgcaaataattaaaaatctcacgagaagatgtatataaaaactactcacgacaatgcccttctttaaaacataaaaactactcagtgcagctcttttaacagcatatattggtttccattctttttgagcagaagatattacaactaatcagtcagtataaccatagctcttcaaatgtctatactttgtcttaagggttaattattggctaacgccagatgacacaaaacacctactccctttgtcccatataaaagccaatcctagcatcccaagaaaaaatagtgaaggacgaaaatgaccaaaatgcccctcattatttttaaaagtagtaatggtgagtgatatgtaaagggtattgaaagaataaaacttcttgtttttttatatgctgagggtaggtatgatggtagaagctggttttttgggacaaaattcaaactctaaaagttgagtttaattttttggggacggagggattatatgtgaaaagtccaaatgatttgaaaatttgaatatgatttgacttgatggaaaacctgattgttttgttttacttttacacactgtatttattcttgcaaagttagcaaccatggtttagaattcataattttaccaaaagttgaggtgaaggtcctggatatcaggatatgcttagtgaacattgactcaacaataatgtagtgattttttttctgtccaagctttcgactcaataattatttgaattttctaagacaattttcagtagttaactagctaaaattccacacatacaaaacactagcatcggttccttgagctttaatttagttcatctcactacattatttctttcaactgttacttggacctaccaaccacatggttcctcggcacattaattcagactgaaataccgaatgatacaaagccagggagttcattactcagtttgtctggcaatagaacagagcatgcataacagggcatttctgtacgttttatactacttcaacacataaaactagcaagacccagagcagggaatatatagagcaaccatgaaccttcatcttcagagtatatagaagaaagagattgcatgtctagcatgcaaatgtcatagtccatttcataggattgggaggcatgggaaatcaaagttgtgcaggactctaggctttctctgccagaattgttaatctctctgaattagccgggtctttttcgagaacacatgggcaaggcagatctatcttggtagaagtggaccacaatgaaatctcatcttctcccacattgcatcctctaatattcattttggaaagatccatcttataaattatcatattcatcgctcttatttgccatggaacaaggtatttgtagcacacatgaaacatgaatgttctcttccaatataataataaataaagcaacccttgtctattaatgattcagatttcttgtcatcaacatatgatgtgtgcactctcaagttggctaataacaatatacattgattaatagaaaggaatttttttaattattccttgagagagatggtttaacagcattgttctcttgactactaccaattgttcttcatcaatgcctccatatatctagcctctacatgatatgcagaagaaagatctaacagagtggaagaagagagatcaagacttctagcagaagagagtacatgtgcaattgaaagatgtgtgctgcttcatgcctccagatgtaaagtactagagctgagagagttcaaagagagcagaagatcagtgttccatgatgagcacacatataccagtatgagattgattcattgcatgcgcatatagtacagacgaattacatgggattaggaggaaccgagaatgaaaggagtgcgaatggtttccttctgaccggccacattcagaattcaaataccaaatggctctgctgtggaagctgagcgacatggttgcgttgagtgaaactactctggactcctatgatcctatcagatactcctaccttccaagtatgtgcttaaccccgatcgagaagtactgcgattgattcgcaggggatcccctatttgttatttttttgtcagaagaaaaaaatgacagctgaaacaggttgatgatgaacgaaacagtaaggtagatcaaacaacagtaacagaatgtacctatctcccatccgcctatagcagtatacatgcacatagatcggtaaaatttctcacaaagagaagcacatatatttgtttcaaatcccttgctcttttcacagaagatcaagaaagagctgcaaagccaatttggaccataacatgttccatagtggtcttcaaatatgccttcagaagttcacgttgagcttctgctgtatgttcattatctgaagaaaagaagtccacctaaattatgctttacaatagttttcgtatgactcgatcacttggtaagttgatattggttctgaagagagaaggctaaacttcagcagaggagccattttggcttgacagcaaatttcagtcaatcatttggctgaccttgtcggatgctctgctctgtaacaaccaaaacacaaatttcgatgttataaccaggtggtgaaaacatatctatctatctatcttctattatatactaaaagtccattaaacctgctacaaacgctcctaagctgccaagtagcgctcctaaaaacactcttaggttgccacgtggcagtttataatctcacaatcgattttcatttaaattggtgggcccattagattagatctattgcttcgtcttaatattctctgtagatataggtgaaaccgtttacaccagaaaaacatacgtacgtactatggaaagaaacgatcaaacgaacccttcagcatacgtacgcacgtacgatgcatcgtaccataaatagctattaaaaatgataaaagaaagatactattcacttgaaaaaaaatacttatatatgcacgagtaaaaataataaaagctataagacctaaaaaatatataagactagaaaatatatgtacgtcggtataagaaaatagacgttttttaaaataagactttctatactataaaaaacaaaacttattactccacaaataaggtggtctagcgtttctacaattgccacatgcatggctctctacaattttgctatcaattttcatttaaaatgatggatcattattttagatcattagatttgctcatttcctcttaatttcctcggtatacaaccgaatgttctattgaaaaaaaatacaaagacaaatacatatagacgataataaacctttagatattgttcccttaaaaaagtacgtacggatacacgagtaaaaataaaagccataatactctaaaaatgtatatacgtcggtaggaaaaaatagacggtcttttaaaaatacgattatctatactataaaaataaaatttattactccacaaatattatcatgtggcgtttctgtaagcactcttagaataccacatggcactctataatttcgttgtcaattttcattcaaaatgatggatccattattttatatcattaaattagcctgcttcctattaatcgagagaaaccatttactggatgtttgattgaaaaacaaatataaagaaccatacgtacatacgataagaaagttataaagccaaaaaaatatttatcagagtacgtactacgataaaaaaagctataaaacaaaataaacatttagatatactgttcccttaagataagtatgttataaatggtctttttaaaataggatttgctatactataaaaaatataaattatcactccacaaatatggtcatgtggcgttttagcaagcactcttagaatgccatgtggtactctataattttgttgtcaaatttcattcaaaatagtggacctattattttggattatttgattagcccgcttccttttaatctcatctatacgagcgaaaccatttagcgatgttctattgaaaaaagcaaagaaacatacgaacacatgataataaagctataaagcccaaataatactaatataagttggtagaaccatcgaaaaaatatagacgattttaaaactaggattttctatacgatagaataaaatttattactccaaaaataaaaatgcaagttaaactagatcaatataaaaaaaattaaatgtgtttacacgcaattttttttgattatttttaaattttatagtcaacttataatcaggtgtattcaaatcttgataacataacatagttatattataactaaatacattatagcacctggagctgacatataataagtaatatcataatatttttttaaataatttaggcgtcatataataattaatgtcatgataatcttcgaaataatttcacatcataatttatggtcaaatatcacttaacaattatataacactaactgaaatctacatgcatgaaaaatgaaacaacattatgttttttaattatatctgatttaattttagtttgtgtgagattgagattctcaaagttttttttttatttttcataactattggattggtatgctcaggcaatgatcttgctataatacgaccccttaatctatcacaagaattatggtcatatatgtttttctttgccaaataggtttgataacaaatgaacaatcctataacatgagcatgaaactattcatgatatattttcttatagtagaggaattataatataatggtcataagtgataattgatgaatgtaatgccataaaccacagtgacataactataagtgcacctcaacaaattagttattataaataattttgggaaataaataaaattttagaattagtaaaggtgtctcatgcaattatggacaataggtgatgaaaaaaaacaagatgctaaaatatagatctttgtcaaaatataaacaatgaaataatactctgaacattgtcacggtcacgtgtttgtttagctatatatatttttagtgatcaacttcactcatttctaaagatgacattgtatttgtaccataaaaattaagcagctttgattaacaccataaacaaaattgtgtctaaataaaacataaagaaactatattttatgggaataactgaataactatttacatcacatccatcttctctttgtttccctagagggcaccgagcatggataccacaactatagcgtggggcacacatatggttgacttgaggcaggctcagtggaggccaccattgataatagtgctcaacttcctacttactggtgcaatcgtctttaaggatgccgatagtgaactaggattaattcaaattgtgctccacactggttgtgagactgtgagaggcacgactatgtcaacccatgcttgaaggaatcttgatggttctccccattagagggacatgtctattttttaacggtgctatcctaataaccaatagaagcattagttttagaatatttatcagtagatttagaaataagtgttggcataaacatttaggtacatagttgaaataatgttttatgtattaatgatgtattagacttattttggtggtttagatggagttccatttattaaaatcatatctatcttttaagaacaatgataataagtaatggtgataatagcaaagtttacacttacctggacaaaagtgaattttgattaaatctaagagacattcttatcatttatattaaagtctacggtctatttcacaacataattttttgttactacgaggcaaaatctataatttgttatatgtatatggtgagatatgacttaattctcttagcattatttatataaacaataaataagatgcacgcgcatctgcgcgggcttcctttctagttttattctaaaagatcgaatgaatgtggagtatgaatatgtatgttctaattatgaaaaactactagatcagggacttgtctattttttttcttcactaaagggtattcagtcaatgattcatattgtttgctaattataatatagactgctcctccatttgccatgttagcttcatactacctgtcgcaaaataagtttagctgtgagtatctatgccccatgtttgaccgtccatcttattcgaaaaaattatgaaaaaattaaaaaaatagtcacacataaagtactaattatgttttatcatctaataacaataaaaatactaatcacaagaaattttcaaataagacaaatggtcaaacgttggatataaacagtgtaaaactgcatttattttggaacggagggagtataaatttgcatagttttaactgaagaaggttaattttcggtgcttacagctggtatagtactacatgcaagtgcatgcttcatcaatacacagtacaggcatccaacctcagaagtattaagactttatttgggagcaaaagtaaaaaaacagtaacacaaattttgacaagatatcttttggcttagaccaaagtactcacaagaacagatggagagtgcggaaatgagataaaagggcaagtgaggttttgaggtctctcccacagaccacatgagagttttttcacttctacatatgtaagttactagagaacagagagttcaaaagaggacaagaaaatactctcccatgagtatttatcaataagagatccaatgcttaacatatgtgtggttacatatatgggactgggaggtttcagaaataaaattaaggagagatgaaatgaagttttgggcatcccaaaatcaaaaggtagtaaacatgaagcttatggttatgcatgatttactagcttctagctgtcagctctcggatcgacttagctattctctaatgcaacaaaccgaagaagtcaagtcgtttgtccaacattttcttgaagcttatctggtagatcgtgttcccataatataattgatattacaacacttactgataaattggctcttatcaaagggaacccttgtactttgattgtactctcgtgtaacaggaaacgttatttcaatcttttccagatgcattttcgattcggttatggaattcaaatgagataatcatttcagtaattcagaaactattaagggggcttatatgaaaagttctggcaaaatcaacttttcatctcccctacccctggtcctgatttcctgaatgtgtctcactgttgtctataaatggatgcaggtctctaacttgttgtacccgataacaaattttatttgggaaattatagatgcaaaatgttcctgtgacacaggaggaagagagattagaaggcaagcaacgttctcacacaagagagaatgtgcaatcaaaagatatgtgctagttttcatgtctccagaatttcgaaagaactttagagagctcaaaaggagaagaaaagcatttcatgaacagataacaatgtgagatggattcagtgcatgctcatggtaattttcaaggatgaacttgggattaggaggcattgggagtaaaaggagtgcaaatgatagatgaccaacttttgaattcaaacaggagtgtgcatgaatatatgtatggtttacctgtttgttctcaggttcctttataatttaacagcctcatgccttctggtgaagatttggcgttgataagggcattctcacctttggtgaagctgctctagactctaatcatatcactgcaagtgagtgcaatcaaccaaaccaattcggaaggaaaaatcagagagaaagtggtaaacaagatgagcaaaatagaacggtaaattagcagtaaacagatccaatatacatctagcagtagacaaacatcaagtcatcaatgatgtggtattcacctcaatgaattgcaagtaaaatctcttacagaagagctatggagtacagctgtttcaacaatattatgtcccatagtactcttcaaacattccttgtttaaagttgacagggagctctggttatttgaacagatatcgcatcaaatttattatgatgtaatttatgcattatcacaattttttcgacataactcggtgataaattggttatctgaagagaagtctaaacttcaccacaggactacaggggctcattttatgttatttttatgccacggtacaatcctagtagaaaaaaccggaccggtccttgacccggtggagtgctcggttcactggtccacccgttcaactgttgggtcactggttgaaccgtggtttattcctaagtacattttgtgtttactctcaatcaaaatatcctagcagccaggtatcatttcattttgaaagagacatttctttttgaaagaaattgagcgcatgtaaataacctgtgactattctcggggatctgtcttggcattgtgatgtacgattcagattggcttaattgatctcagtcacatacgtcaagtgatacaattgccccgagaacacttacttcctagaaattttaattgtttagtaaatataaaatgaaatttttggtggtttcagtgaggagcaggggcggcggatacaggcatggggcagctagggcttgagccccatgcctagcttcatgatccccattataatcttgaaaaataccatgtaatttctaaaaatatttgaacgctcgttagttcagccctacgcgtgtagattttctggctccgccactggcgaggagtgaagtagcattgtcctctcaactacatgcattcaagctcaatggcacagctttatctgggagtatgtgtcagtatgctcggataaaacgagagaccagatcgagggagaagcaggaagagagataaaaaaaagggaaatgtgatctctcccacaacagtagttacgtttcttctacatgttaataattattatggatcagaaagtacttatcactcgagagaccagatgcttaacatgtgtgtagttatatatatatatatatatatatatatatatatatatatatatatataggacactcatatggggcaccatggtgcccgggcaccatggtttcaaatgcacaaaattactcaaatttttcaaaatttttaaattgtgagtatatacctagttataagaattcgattcatacatatatctatcaacaaaacaactcaaatttaactttatttcacaattcatgattacatacctaactaattatatgtatggatgctatatacctagaatcaaaatctaacaaaaacaagttcaaattcagttcaaacttgctttgaagtagttagtaaagtagttaatgttaatacctaaataattgaaaaagtttcatactcatttgaattggttatatactcaatttcaacaatggtgcccgggcaccatggagcaccaaacaaatttaatatatatatatatatatatatatatatatatatatatatatatatatgggattgggaggtttcagtaacaaaaaggagcacaggagtgaagatttgagcttggtagcgaagaaaaggaggcagcatggagttaattgtatcgtggtgattagtagtcatcattcctctgctatctcttgtattacaacgaagcgaacacatctcgtcattggttttccctgctgcttcagtggattgttctggaacatgtcagactgacatgattgtgttttcccataattactattacaacttactgataaattaattgctgcttatcataggaaacaaaatgtatttttttctcccgtgtaatagaaaattgagacagaattgttttcagcatttgatatagtctctcccctttatttccttcttttccaaatgtattctctgttcatattaaattgagtattgtatttcgattcggttatctcaaattctaataagattgttgtttcactaatcgtgtaaatgttatgcgcttatattaaaagtttaggcacagttcactttttgcctccccaaccgttaggcaatcctccataatccagggtttctaactagggacggacccagaacgactggcccaaggcctggaacagcctacccggagaatatgactttgcatggtggttacatggtggaaaaatgtatatccccatgagcctccagtcctagacctcaggccacagtctaggtgccccgaggcttaggtccccggtctcttactcaatgtacccgacaacaaaatccttcaagaaattatatatgttgttatttccttgagaccaatcataaatatggaacttttttatttatacaatgcaattataaattcatccataatggacttaatagcttcattaatgcatgcatatatccatgctcaagtgggcatgttactttttgctcagcaagagagataagaaggcaagcaaggctctctcacacaagagaaaattaagtgtgcaatcaaaatatatgtgctagttttcacgtctcctgatgtgaagtagagcttaagagagctcaaagggagtagaaaagcacatttcatgagcacaaaccagctgtttgagatagattcagtgcatgttcatggtaattggtagggacgaatatgggattaggaggcattgagaataaaaggagtgccacgatgaaatatttcacttttgaattcaaacaggagagtgcatgaatatatataccgatgattcattgcctcccagcttactttatagtttaacagcatcatgtgctctaatcaagacttagcgctggggaagacgaactcgcctttggtgaagctgttcaagactctaatcatatcgatgcaagatataacaacttgagcaagatgatcgaccaaaccaaggaggaaacacaaagaaaaaaaagcggtaaacaagatgagcaaaatagcacagcaaattgggagtaacagatccaatctccacctagaaatagacaaaacatcactcattgattgttggtattcacctcaatgaaatgcaagtaaatttccttacagaagaatttcggagtgcagggcagctgttccaaaagtagcacatgagattaaataattaggatcaataaatcaagttggagagcaatatatgtaatatgtcctatagtgctcttcaaacatgcaagcattgcttaaagtttttgactgaaagcattgcttaaagttgacagagaagtctagtcatttgaacaaatgtttcttcaaatttttctaaggtaatttatgcttatcacaaatgtccacctgcgaaatgaaagggggttatctgtaaaatcgttttttaacaatgctcatcacatggttggctgtcagcttgctctagcacagggagacgaaggacagggtggaggggccggcgtcgcggcgacaactagggttttcatccccgagccacccatgcaaggggtacacggggggtcacgggttggatcaatagttaaaatcctcaaagtacttaacaattatgatgtagattgatgttccaccttccatgttagttggatacattcatttatttttaacaaaaacaaaatgaaattttggtgctttcaatgagagtgttgtagcattgtgctccatactacatgcatttaagctccatagtacagctttttctggcagtaaatacagtaagattagcaggatatatgttagtttgctcatataaaacgaggccattgagggagaggttggaacagagataaaaaaaaagccaaaggagagtatacagttctacatgtaaattattagggaattcagaaagttaagaggacaaagaaatactctcccatagcattttatcaatgagaaaccagatgcttaacatgcgtgcagttacacatatatgggattgagaggtttcaggaataaaactagggcatggagctaactacatcgttgagatttactggttaagagttgtcttcagactcttcagtgaagcccaacagtcctcttttgcaatgagtcgaagtcccttgctgcctgagcagggaagttttcgaaaaattgcagtgattttgttgactcatgaaacatgtcatgatagattgttcccataattgccattattacaacattctgatgagttgtttgctaataaaagtagaccaattgttctcttctgtgttaaaattgagacagtactattcttgacatttgatatattttttccacatttctaatggcagaccgactgttggggctagttgaggcgccaaccccacttgaaagatttgcctctaattagattgtatcaaactttttttaatgaaaagatcaagaccaaataaatttttttttgtgaaatgaccaatttgttcatagatttattttttcgatatgttaatatacttgtgaattaaaatagaaaaagcattttttttcttttgatgatatgagcatttggatttcatgttgtttttatgcgatgatagtaatgtcagtgcatgattttgtgacatttcttttgaaaagatattccgtgctatttttatgacatttatttttgaaagatattgagcgcatgtaaacaacatgtgactattccaggggacctctcatggcattgtgatgaacgattcagattggcttaatttgattattatgatgcagactgatcctcatgttgccgtgttaacttcatataaattttattgttttttatgtcagtcaattgcatcaagatgatataattgtcactagtacagaaccggacatctaaatcactccatctataacgacagacagcgacccatcacaaaggtactcacctctgatgggccggaaaaaaccccatcacagagacaccgcaggaggcacgaactgaggcctcattgctgaacccgtcaccacaagaggcactttgccgataaagatgagggttcagacccgttacggatgactagttgactggttttgtactagtgtaccatgagaacacttcaaacctagaaattttaattgtttacagaaaacaaaatgaaattttggtgcaatcagtgaggagtgcatagtagcattgtcctctcaactatttgcattcaagctcaatagaacagctttatctgggagtaaatacagtagtattgacaaggtataggtatatatatgttacagtgctcggataaaaggagagaccagatgagggagaggcaggaagagagataaaaagggcaagtgtgatcttctcccacgatagtgttcacatttcctctacatgaaaattgttagggataagaaagttgaagaggacacgaaaattaatattctcccatatgtatttttcaccgtgagaccagatgcttaacatgtgtgtagttctgtacgtagttacatatatggaattgggaggtatcaagaaacaaaaggagcattggagtgaagatttacaaactgctgcatctgaaaaagggaggcagcacagagctaactatatcgtgttgatttactagttatcattcctgtaatgtggcatagctatgatatatcctgtgcgtagtatttcatcgaagcgaagacatcacatcattagattatgctgttgcttaagcagggaaaatgcatgtgttttgggttcaacagatattattgttttggaacatgtcaggtagaattaatattgtgttttcccataattgccattacaacatactgacaaattgccgctgatcaaagggaacaaactgtattttgattgtgctcccgtgtaacagaaaattgagacagtaatgttttcagcatttgatacagtctctcccctttatttccttctgttccagatatatttctctattcatcttaaattgagtagtatatttcaattcggttatcaaattctaatgagattatcatttcattaatcacgtaaatattaggggcttctgtgaaaagtttagacaaagtcaacttttcacctcccaaatgttggggtgtgtaggatcgaatagcaagaactaagccaactagctgaggagaggtgaatggttggagtaccaaaaatcaaatttttttagcggaattaaaagttacccttgttatagatcgagatcagtctgactgaaatagaggctagctggtggtggtgctccaatctgaccacctgctgttgtttgtcgccgcctccgatctaaccgccatgagcctaccaatatgaccgggtagtagtcctcggcctgacagttgttcactcgccggtgtgaccgttgaaactcgagcaaacacaattcaaagatctctcaaagtagattgtttatttctttctactcatgtttacaagtgcaacaacagcatccgtcacataaatctcgactaaactcgaaaccctaactttactctaaactcaactctcacaaaatcgataccgagagttctcaaccccccctcccccttctatttacatccaaggtaggcagcctaaagtcacaaatccaacttgtccaagaaatcttaattcactaggaaaccttttcatacaagatacaaacttatcctaacacgattcaaactccaatcttcccaaatttaaactcctttcaaatttgactccttatctcatacacacacaatttccctatcgtgtgtgagatggaatcttcaccaaccacgtgcattgctctttagcctaatcataccacatgatatcatgatcattgggacatcatcttctcctagattgactcctaatccatcaccggccatactttctcgagacatcaagacacacctacacatgaatcaaacaagaaacaatatctgagcacaaattctttccaaatttaactcaacattagcacacagcaatattacatatgtgtagaaatcatctaaaagttataattacaagataatcacgggtattcaaataaataacccaaaacctactctaatctggagctagccggtcaaaccgtcgagctagccaatctgacaacacacaacacactagcctgaccaacctaccctgcctggtttgtatggctccacacagatagcactacttcgccaataatatccaaatatcaaaattaattatctataataccaattgttcatcacaaattaataatcaaaacaaactttgatttcacagggtgatcctgaatgctctcgatgttctccataatctagggtctctaatcagggagggacccaaaattgggctaaggcccaagcaagcccatggagaatacggccttgtatgatgattacgtggtggtaaaatgtctatcccatggtagtcctaggcctcacgccatggtcctggtggcccaaagcttaggtccactcctgtctcctacccatggtacccaacaataaaatctttcaggaaattatagttgcagttgttttcttcagactaatcgcaagtgtgattttcttttttatgtataaaatgcaattatatattcgtccgtaatggacttaatagcttcaacaacgcttgcatatatccatgctctagtagacatgttgctttgctcgggaagagagataagaaggaaagtaaagctctctcacacaagagaaagtgtgcaaccaaaatatatgtgctagttttcacgtgtctccgtatgtgaaagtagagctttaagtagagagctcacagagagcagaaaatcacatttcatgagcacaaaccagtttgagatggattcagcgcatgctcatgagtgacatgagtaattggtagggacaaacatcggattaggaggcattgagaataaaacgagtgcggtgaagaaatttgtaacttttgaattcaaacagaagagttcattatcatatatactgatgattcattagctcccagcgtactttatagtttaacatcatcatgtgttctaacttctaatcaagacttggcgatggcgatgacgaactctcctttggtgaagctgctctatagtctaatcatatcactgcaaaatagaacaagatgagcaagatgatcgaccaacccatggaggaaaaacgaagaaaaaaaaagtggtaaacaagatgagcaaaatagaacagtaaattgggagtaacagacccaatctccatctagaaatagacaaaacatcattgattgttggtattcacctcaatgaaatgcaagtaattaaatttccttacagaagaattatggagtgcaggcagttgtttcgaaagtaacatatatctgtcccgcttagtgtttgcatgtaagattaaataattacaaccaataagtcaagttggagaacaatatatgtaatatgtcctatagcgctcttcaaacatgcaggcattgcttaaagtttatgactgaaagcattgcttaaagttgacagagaagtctggtcattgaacaaatgtatcttcaaatttataaggtaattttcatgttatcacaaatgcccacctgtgaaatgaaagggggttgtctgaaaatcgttttttttatagtgctcacaccgcacggttggccagcaacttgcactagcacaaggagatggaggatagggtggagggggcggcaacggctagggttttcaccccgagccacctacgcaggagaggggtcacgggttggatcaattgttaaaatcctcaaattacttgacaattatgatactgatgttccagctgcaatgttagctggatacattttttttttctatttttaatatttttgttttttgaaattttggtgctctcagtaagagtgttgtatcattattctctcaacaaaatgcattctgtctcaaaaaacaaaaagaactacatgcattcaagctcaatagtacagctttttctggcagtaaataaggcaagattaacaggatatatgatagtttgctcatataaaacgagacccagattgaggcagaggttggaacagagagataaaaaggctggcctctcccacaggccaaaggaaagtatttacagctctacatgtaaatcaccaaagttaagaggacaaggaaatactcttccataagatttttatcagtgagaaagatgcttaatatgggattgagaggtttcaggaaaaaaactagggcatggagctaactataccgttgagatttgctggttaacagttgtcctcagtgaggcacagatgtcctcttttgccttgagccgaagtcccttgctgccggagtagggagttcctcaaaaaattgccgggtttttgttgattcttgaaacatgtcatgatagattgttcccataatccgtactgaaagcaaaccaattgctctcttctgtgttaaaactgagacaatactattttctaatttgatatatattttttacatttctgatggcggataggttgttggggctagttgagacaccagccccacttggaagacttgcctctaattagacaatatcaatttttttaatgaaaagatcaagaccatatctttttatataaaaggtccaattttttcatagatttattttttggatatgttaatttagctgtgaattaatgtagagaaagctttctttttcttttgatgatatgagcatttggatttcttttttttcttttgatgatatgagcatttggatttcatcgggaaatattcagttaatattgctccactcatgctatgtttttacgctagcctccctcaatttgcatcatgaattcgccattgtgcattccattgtttttcatactatgttatatttcattatcttaaaaaaatactatgcattttctgttttctgtccatataaaattgagtggtcagttatatgaaatttgaatgagagaaacatttcacgaattaatcaaatgtcaggaaagttgaggggcttgtctgcaaagtttcaggtaaggtcaacttttcgcatccccgaccgttgggagtgggcccgagtgcgtctctctcagctttccacaaacggatccgggtctctgacccggttgtacccgatatcaaattcctttcgaaattatggacgcaattgttccttgagaccaatcgcaaatttgaaaatatttatatgtatgcagtgcaagcatagattcatccgtgatagatgtgatggaatatctgagccgttcaagtaacaaactattaattgtgtttagtgtagaggattaattagcgtgtgacctgcatgcacgatcgtgatttgccaccaaatttcaccaaataattaaagtgcccaatttttttttcaatattttgtcttcacatgcataataaaaattgacagttgaaatttcccgacacacctttcatttgacttgctccaaaatatcggtgattaaattatctcctaatttcgtggacttggtcccaaacaaagacgaacggaattcttgttctcctcagtcactgcgaccaaaaacttgtcaaaattgactcaacactccaggtccaatatatagtatggcaataatcatttaccctaaatatgggaagcacctaataaataaataaataaataattgaaaccatttgagtagatgtcacgacaataaagaataaggtgcaccataaaaggaggggaaaatttgtaatttaattacactatttgtatgttgttagccactgttttgatgttgatatgttgccttcttctgccttatcaagtcacattatattgtgcacgcagtagcaacttatgaagtttacattcatgtgtacttttgtcactacatataatatgacacctattaaattccatagaaacattttcctcattaaaataatcaaattttgtcataataccacacaagctttgaacttaattatcgcaattgaacgcatcaaaaacttgaaattttttcacaaatttctccttcacacaaacaaaacttattgaccaagtgcagcaaaacttgatccatgaataacaaaatgattagaagtggaaatccttcatgaaaaaaaaacagatattcaaaattatttacaaaaaacttttatatatagagagagagttttaaaatcaattcttaaaaaatcagaatcaacctaaagtaagcttcaaaatttaaatttttgttgctactaataaaccaaaagataaattatgcgacacgctaataatacagatctatgcactttaaccattgcgatcaaacgtgccaaagtttctcaaaatgtatcctcaatattaaaaggacccatattattgacccaagaggtgcaaaacttggtccataaccaattctcacaagtggaaatccttcaaaaacaaaacaagaggtaccataacaacaaactaatcataataatccaaacacatgcagtttaccccccgaaaaaactattattcacaactcagtccctaccccccacacgtcgtcttcaacagctctcttccccttccgagcgccatcgccattcgaaaaccaagacccccctcctccccatcaaaacccagccacaatcacccggttccaccccccgatccagccctcctcgccgcgatccactctcccgggcgtcttctcctcgctcccacgatcccgccggtggatcgggccgccgtgattggtgccggttcgaggcgccgtgattggtgccggttcgaggcgatgatggccgcggcggtcgaggaggaggagatggtggagaggatgcacgggtgggcgagggacatggacgtggcgtcacgcagggccgaggaggaaggtgggttctctctctcgggcggcatttcgtagaacactctgggtgtgtgtgtgggtgggtgatttcttgatttgtttgctctgctgttcttggttgacccgtttcgggtttcagcttcattttttgggttttttatggtttagatggttgatcgaactggggagaatctcgtattgggggctctgatggttttgattttgacgtttcaacttttttttggtcagattcagtttagtatcgattcggctttttcaaattttgttggtgcgattcgggttgatgatttagttgggtggtggtgattaaaggtttcatttaatagcctcgcttgaaattgagctagtgttgagctcacagttgtgtcggtttcacgagatctttgtgtggggagaagggtttatgctttatgcctttcttggttcagactaagaagtggtagctgtaccatactggtataccttgatgtgtccagataatagtagcactatgaaaattagtatacattgatgtgtccagattataatgccactgaaaattatgtagtgatgtaatgaattatgaatcgtgttatcataattttgtggtaagcaaaaatgttgggcatgtttaggacacttcttagcagagatttttagcagtatttacagtacatctagtcagtgtgagatgatggtttactgggttgacaattgcagcaatgagacggtatgatgcggcaagttggttgcgaagcacggttggggtagtgtgtgcaagagacctgccagatgaaccgtctgaggaggaattccggcttgggctgagaaatgggattgttctttgcaatgcactgaataagatccagcctggtgccatacctaaggttgcatttttcgcattcaaattttatagattattcagaagccacaaatgctaatatgtgatgacatttctcttggcaatcttaaaatgtttccaggttgtacaagcccagtcagatgctgctggccccacggatggctcagctctgtgtgcatatcagtactttgagaatctgcggaacttccttgttgttgtagaagatttaaggcttcctacatttgaggtgtccgatttagaaaaggtaactctgtcatgctgatttggagagttcatgtcacaagccactttttcatcctagaggttcaattttctttagacaggcttcccggcttacctcatcatttgcaatactgcctttggtcacaaatatttgttgtttagaacaagtgtctggtcaaactttttaaatcaatttcttaaatatttagattggacacaattaaattatacagattttttctcaaaaagtaatttcataacattttaattttaatgggttttaaagatatttgacaatacaaattagtggtaaaatttacatttggaagattacgtcgctgtccaaaatgacatgtatctatgactagagggagaaatcttgaaatgaatgttgcatcactaatatatgagtcacttgagaaactgatgtattttatctgccaattcgaatgtagggtggcaaaggtgttcgggttgtggattgtgttcttgctttgaagtcattcagtgaaagtaataaaacagggagacaagcttcgtgtaaatatggcggcctttcaaaacctttgacagccagaaagtattttatactcaagaatactgatgcttttatgaataagataatgaaagggcactcagcagaggcaatccagagtgaattttcagaggggcaaagcatagttactgatttttctatagagtctaatgagatggtaagaactataatttggtatggtttttttgggcacaatcatgcttatacttcttaatgacctttaccttcttgtttgcagactacttcagactcccttagcattcttttgcgtaaagttctcttagataagaaaccagaggaagtcccattggtaagcctattttgcttgaagcataattgattattatgtgttgtgattgatgaacattgagaatataacaaaatactctctaatttggtcagattgttgagtcgatcctaagcaaagttattcaggaatatgagcatcgaattgcaatccagaacaaggtgtgttccgttccactataattatgataatgtttctttttttgctatttagaaaatcaggtttctccaaattacttgggttccgaagttagtaataagacttgatggtttggtgtttttgttgacctttatggttaggacatacaaactttaatttgggtaagaaaaacatctcaggttaaattcataggagattgtgtaggttctgtgtcatgttccagattatatacaccatcagaagctgaaaatgcttctagttgtgaccagatgagggtatattatttatttgagtaaatttcacatcatttattctaaatctgtggttgctacactctactcaattttttggtactttaataactgatgtttgttatggtgtatatgaagatggatgaggaggagcaaaatctcttgaatatcacggaacaggtcaaccatgtagttgtaaatggtgatggtgaagttaaacagttccaactagaggcacagacaaattttgatgtgcaacaaaaacagatccaggtattactttt

SEQ ID NO: 7507 - DNA, 18454 bp, Oryza sativa
tgctcgggttgcagggggaggagaagatgacggagtccgacatggtcgccgttctctgggtaaccaaggatccatctgacatgcatgcatctattcgatcgatcttgtgcattgcgatcaacggattcatggatatatttgatcttgcgcgcgtgcaggagatgatctttcgggggacggacacggtggcgattctgctggaatggatcatggcgaggatggtgctgcacccggacatccaggcgaaggcgcaggcggagctcgacgccgtcgtcggccgcgggcgcgccgtgtcggacggcgacgtcgccggcctgcgctacctccagtgcgtcgtgaaggaggcgctccgcgtgcacccgccgggcccgctcctgtcgtgggcgcgcctcgccgtgcgcgacgcgcacgtcggcggccacgtggtccccgcgggcaccacggccatggtcaacatgtgggccatcgcgcacgacccggagctctggccggagcccgacgagttccggccggagcggttcgcggaggaggacgtcagcgtgctcggcggcgacctccgcctcgcgccgttcggcgcggggcggcgcgcctgcccgggcaagacgctcgcgctcgccaccgtccacctctggctcgcgcagctgctgcaccgcttcgagtgggcaccggtcggcggcggcgtccacttgttggagcgcctgaacatgtcgctggagatggagaagcctctcgtgtgcaaggctaaacctaggtggtgatgatcaaggagtatggggctgtttggttggttgctgccctgagtaacataacatgcctgaaatttctgtgcgcctgagtggcatgtgagaagaccaatgcatctaacctggtcaggcagcttgagtatatgcttgtttggttggttgttgctgcctgagaaacaaatatgcaattacgcctttaatcattacacagctaaatcaagtattaatgggccgttacaaatcttgccacaaattgcatctgaacctcctaccaagatccatttatgacccaacttcccatgtacaagcacaaatcttgcatacataacgaggataaaaatctaggaaaaaaaagcagggaaaaagagagaggagaacgcaatcgaagagtcaaatagatcccaaatccgtgcatcaggagcgcaaccttcagatgattctgtccagatgtgcaaatgcatctggcaacctgcaaatcgatctgcttcgcacgaaaggcagcctgggcagcatctagcatgggcgatgctgctatgctgggatccggcaagatggcgacgacttcacacgccggcgggagcagcaacacagctttgcagggatccggcaagacggtggcggcttcgcacgccggcgagagcagcacggcttcgcagggattacgaaagacggcgggcggcggcggcttcgcacaccggcggaagcagcgcagcttcgctcctggaatctacgtcgcgtggccgcctccgagaaagattaggattaagatggtaagtatgtatcgctgttgctgcctggagctcaggcgatcgatttcggtcgcctggctcaggctaatgacgggaagggctgcaggccaggcgaagggtttgggatctgagggcaccaaccaaacaagaccaggctagcttcaggtcaggtattttcctctcaggtaacgaccaaacagcccctatatgcatttggtctctctctagggctgcatggattatattatcgcttttgctttgatttggtttcggagatcgagagattttgtacattttgatatgcatgcacggttctactagcacaatatgaatatgtttgtcatctgatgagataattaagcttgacccaggtgaattaagtgcatgaagtactgtggcacatactctcttcgggctgataatacttatcgttttagataaatgtgaagtcaaactttacaatctttgattatgaatcatttttaaaatatttatctttcaaatatggtgattattacatgtatagattagtcgtaaaaggtactttaataaatcatatgtttgttaacacttttatacatattataatgaaaaataatggtcgtgcactcgtgctcttgtcgaaaacgataagtattatcaacctgcagggagtagttaagttatgtgggtgtttgaggttaccataaaaatatatggaaatgtttgttgatactgagggcatttcaatatgcttaatgtttttttttttggttttgaggtttgatgcttctcactgtttgttttgagattgatgatgttgttgttaatgcaaatgacacagagagatcttgaataaaagaaatggtgttcctctgaaaccactctactggcatatctcgggaaaagatatcctcagaagcaattgttcattttagcggattatacacgatcgagtaaaattaaatgatgttcctctgaaacaactgtactgccgttatacatgagttcaaaattctcctcagaagcaaccgtggactttatctcatgtacaattaatggctaccatgtacattaaccaaacacaactcaaagagtgatctgatttcaaatataatttgttctcacaagagttaagagaattgttagaatccaagagaacatacatatgtataaaggacacaacatgacatttgatacttcctctatccacaaaagttacatctatttcagatttgagttttttcaaataagttgtttctatttgtagtatttatgcattcaagacttaaatgaagagataaattaaatgttttattataacccaaagagtcatctaaatactcattggttgtatgcttgcatttactccttgattttgtaacatctaaggtgattctatttcagatttgagttttttcaaataagttgtttctatttgtagtctttatgcattcaagacttaaatgaagagataaattaaatgttttattagaacccaaagagtcatctaaatactcattggttgtatgcttgcattcactctttgattttgtaacatccaaggtgatttaatttctccttggtcttggtgtcaaaagtaatatggagggagtataactcatctttttttttctcgtttttttctttgcgatggcccctttctcgcatttctatgaggtttcattgatttgcattgcgcaacaggccagggtgaagccagctgactagccgataatatcattggcgtcaactccattacatgacttgatacggtgaaccttgaataaaaaatactattactctctccatctattttgataggcatatttcattccaaccacctattctcttaatgactttctcggatttaatacgtgactctccattcttccacacaagattggctacatggacatcgagaaatgtaaatattaataaatcgcttgtttagtagaaataactagtagtatgtttaaattgatgataagtatcaaaataaatacttatggatggagggagtatttactatagaggactatcgagatgaaatatgactatcaaaatagatggagggactccctccctactggtaaatgaagttgtttaggacaatatttaagtcaaaccttgggaatataaatcatgaataactttcgagttgttgagtttgaaaatgtaaaaaatatataaatagatttgtcttgaaaaatactttcataaaagtatacatatatcacttttcaataaatatttttatagaaacaagaagttaaagttgtgttttaaagaccgtgtcgctgcttaaaacgactttctttacgatttacgagtacggagggagtatttactatagaggactttgaatttcatcgggatcggctgacctcgatgatcattactagatcctgtcacgcaagccctatggcatttgttaccgaatttttttattttttaagacctttttatgttttgattttttagtagactacttcaaaaaatattttcataaaccgaaacttttggccaccaaaaagccgagtggctggcgtaacaagttgtttggccacgccggccacagtggcgtggcaagagaggatggtgtagaaggccagcattatcacgtagcgcgcagtcaaaaggttcagatttgaaaatattttttaaaaggaaaaggtacaaattatccatccgaactaacgcggtcgtccgaattacccctctaaacctgaaaaacagacatcattcaccctcaactttcaatacatgacaaattacccccatcgacccaatccaaagcggttttgtcctacgtagcgtacacatggcagtccagtcagcattttatttattaaaaaatatgggacccacctgtcatgctcccccctctcttctctctcactcttcctatcgctttctcgccagtcggcggcaggcgggggacgcagcgacggtggcgtgggacgaggaggcggcggccgcggccacgacgagcagccgccccctcggcgcggacccccttgccctccacgtcgccgcctccccctccctcgccgacgtgtccaccgccgctgccaccaccaccaccactccccacctcgccgcgtgcccccgtgacctcctccttgatcccccgcctgtttatactcatctcgtcacccgcctcatcatcaacagcagcagcagcaaaagaagaagaagaaaaaagagtgatccagctagctcgcctgagttcatctgctgtgtaatttgagtaattagcaacaatggcggctgctaccatggcgctgagctcctccttcgccgccgccgccgctgttggtgcgccatggcgtggtgtcgtcggcgccggccgcgccgcggttggcttcccgcctcgccggcgtgctgtcacgctcgtcgtcagggcccaggccgaggtgagctgagcgttcttgattggtttcactgtgcctgttctggtgatttgcttcgtgtgctaacttggggcgacttcattgtcgtcgttcgatcgatctgcagccggaggtggagccgacgaaggaggagacgatcacgtcgactccgagccccgtggcggcagcgcccaaggcgaagccggcggcgagcacggggctgtgggacgtgctggcgttcagcgggccggcaacggagcggatcaacgggcggctggcgatggtggggttcgtgccggtgctcgccgtggaggcgtcgcgtgacggtgagctcttggaggaggccaccagcaggggcgggctcgcgtggttcgccgccaccgccgccgttcgtccgtcccgcccgccgcgcagccgcttccgcgtcccccgccgccgccgcctctgtccgtctccgcgccgagggggcggctgctcgttgtggtcgccgcctccgtctctgcgtcccgtgccgccacccgcacccgcctccatccgtccccgcgctgaggggtgccggttcgtcgtggccgcggccgccaccgccgcctcgtcgcccgccgccgcagccgctgcgtcccccgtctgtgccgaccggcgataaagtgagaggaagagtgagagagagagagagtgagagagaagagagaggaagagagagagaggagtatgacatgtgagtcccacatttttttataaataacatgctgactggactgccacgcatacgccacgtaggacaaaaccgctctggattgggtcgaggggggtaatttgtccggtattaaaagtttgagggtgaatgacgtctggttttcgggtttagggggtaattcggacggccgcgatagttcggggtaattcgtattttttcctttctaaaatgatctattaataaaattaaaatataaaaaggtgtaaaaaataaaaaaaaatcttggttaccctcgtaaacttccaatatttggcatatattatcccgttccatcctatctagccagaaatacttttttttttaaaaaaaagggaagtactacttgtacaagtagattctcttttaaaaatatccatatatataatttgacagtgacgtaaactaaaagatttgtaggattaatttccctcttacgtacatctacgcatttcgcttttgtacaaatgatttagatttaaaaaccataaacaaaatgtaccagtacaccgagcacttgcaccacaagtccacaactaaccgggcacagtagttgtcatctttttcttaaacaaagctaaattaacttctttttttctttgaacaatttagaataaagctatttctaacttcaaaaacaaaatgttttggttgtgcggttatatgccatggctgttagtatgtattatcacaccatccaggatggtatggataactaaacctttatctccttttttttttaatcagctaaacattttctgccccacgattgtttttccaccgtaacgacgctatttagaattgtgggtgacagatgattttaattaggtcttttacggtgcttgaaaggtacccatgtacctcttaacaaattgttatccactgttaatctttaaaaggtaatttaggaaaaaaaattattaacacggatagcttagtactccctccttccctaaatgtttgacaccgttgacttttttaaatatgtttgaccattcgttttattcaaaaacttttgtgatatgtgtaaaactatatgtatacataaaagtatatttaacaataaatcaaatgatataaaaagaattaacaattacttaaattttttgaataagacgaacggtcaaacattttttaaaaagtcaacggcgtcaaatattttgggatggaggtagtaattgcttaatttccaccccgtcgagtgcctaataaatcggccatccacgatatcatgcaggtgtcgagtggctcacctcaatcgatcttcagaatatgtacatagtgatcaaatagctaaattaggcatagaaaccagtaggggatcggatgcgcagcgcagggcattgttgatttgtttttgctggcaaaatcgatcttcagagcctggaatacaactgctggctgcatgaaggcctgacgacaaagaacgggcaaggaactagcagagcagacagcagcccggggattcgtgcggtggcggtgacggcgacctgctgctgcgtacctcagctgcgaccggcgggcgctacgggcgcgtgcgacggcggcggtatacggctgctgctttcgtacgctacgaccggagggcgtgtacggcggcggcgagcggcgggcgtgtgcggcctcggcgagcggcgggcttttacgtagcgacgatcagcaggtagttcatgtaggttcctctcgcatgcgttcttatccttcctcgtttttttcttcctcctgctgaaacgtttgtagcttctctcgcttttgttctttatcgaaaaataatttaatgaaaatcaattaccattttacccttcccctctccatacctggtccaccattttaatacccttttaatatcttttttcagttatcttctctctgtccattagatcattgctgatcaagggttctaattaattttaagcattgaagaagatctctcaattttattatatatatatgaggagggcgagggtgagagcgaggctcggtcctattttttttcccctttcattcgcccgttctgtccccatatattgcacgataatgatataacctcatgcgaatgtatttaccatctatcactcaacaaattaatcagcgttaaggggaaccaatcaactgacgagttccccgccaccttacgatagattttgtgataaaaattttttcttagaattagaaaatgttggtagtaacttattttaggagatgcactatcaatagtttagtggcaagggatgtgtagttataatcataaggttctgtgtttaatttccaacacgctcagattttttttaaaaaaatatttataggaacatctctctccaaagcacatataacatatggtacatcgttcagttttacacagagaccttgatttatgatggccaacacacgacatgaccaaagactaaactttggaagcagtcaacagcctaagttggtatagtcactatctcctttaacccggccacacggtcgggagataagtgggaactgggaaggatacatcaagacattgtccaaattaaacatgttatcactttttttataaactttttaaactttacttttaaaaataaaccttccaaaacttattttcaagatataaccttataaccacgctaacagactgacacggcaaaaccatactaccataccggtctgattagcgtggcaacgttatttggtcatgctagtctagttggcatggcaatattatttggctacaccatcctctctgatgtggtatgacaaatttttcacacccgctgtgagtggcgtgtcagtgttgtttcgtcacgccagatgggttggcgtggctaaaaggttcatattttgaaaatatgttttgaaagggttcgtttttaaaataaaaaatttaaaaaattcaaaaaaaaacttatcactgagtataaaggggccaaaatgaaataataacacttgatctatataattatcttttttataatagaaatcaactaatccaatctctcaatcaagaagtattcggcttgatcgagtagatatttatcatctgactttcttttaagtttaagggcctctttaagacgcaagataaaaaacacagaaaaaatatagaaaataaagtagtatatttgtttaatcgtaaaggaattagaaatacatgaaacatgaacagatgtcctttgattacaccacatgaaaaaatgaagcaaaggaaagttttcaagaggtctaaccttcccgtgaaatagaccataggtatgcaattgtctgaaaattttttcatccatttccaataaatcaaatggatctatattataaaaaaaggaactgaatccttaaaaaaatagccttcactaatccttcatttaaatgggagtatttctcacggagaggaggtggaggaatttttttttggaggcaagaggtgggggaatgaaaagatgtagagcagaacagccaaaagcaagaatggttgttaagattttggattaccttacactttttttaggaaataaatattgtaaaggccagataccctttctttttaaggaaagtgcacaaactttacctccagctccaaatattttatataatatttggatcggagaaaaagaagactgcaagaagaaaagggcaccggaattattctgttttgtttattaacaagggtaaaattagaacacatatttcacaagaaaacacaaaggatatacacatttttgttattttggacagaaaattaaattatgatattcagtgtataggacctaacaagcgcgactagaatctatgttattccagtttctgtttctgttggtgacggtttggtagaaagcattcaagtgattgtgaaatggctatcatgataatgattcttgtggggttggaaagcatacttctgtagagttagtattttttaatgtcacattcactattttctcctgataaaagatgaagatatcatctaaagaaatatataaaaaatagaaaacttatcatgaccatgtaaatagtctgaaagatgccctaatacaattataaatgcaaatctccacccaagataattcttctacactagattttatccagataaactagattctagtcacacttttaacattttgtcctgttcggtagggaaaggcgggcaattcactttatacactccaacactcccctcacgcgagaccccctcaaatctcaagcgtggaatattggagtgggctgcaattattttatttaattgcgcgccagccaggattcgaactcgagacctctagctctgataccatattaaattgcatgcaccagccaattacacctaaaagcctaagctgataaggaaaggtgggcaattcactttatacactccaacatagacacacgaaacgagaaatccattgatgtttgattaattaagttctaattatttttgaactcataaagtagataaatttgatattttaaagcaacttttatatataaagttttcgcacggaacacacagtttagtactttgaaaaacgtgtgaacgaaaaccaagataaaatatgtatcttaataagaaaagaaccgtttatatgccaatgattattttctgggtattgtttgtaataatgaagcgtttgttcgttctgtaacttgctcaatgaactaacttttcagtgacaaatatttgtaggtcacgctggtctgaaaagaaaatttttgtcacatcactgcattggcttgctaacaaggcgtcaaatgatctgaatgtttcatgctgagtgttatgaatctgatgctctcggcaccattagattcataacacgataatccttttagcgtttttatttactagatttactccatcataagtagagtattttttttgttgtaataaccttaggatacttgtgttgcttactgctaagcttagcagccggttcaacctgtttgtagtttcaaaacctgacatattggaaataaaaaaactgcatatacatcaaaaatcaaaattaggaaaaaaaacttgtgctcacatcctcatcaccattggctcaatgatcatctgtggctataatcaaaagcatattgatgagccgaatatctcactgatcacgaatctcttgcaatatccccgaccaattttcaatgctgatgtgcagcaagactgtaataggcaggggaatccctgctgctctgtggatggaattaaaagaatggtgaatccaccggtccaagctctgcaatactgcaaccgtatatgcttctctgaagctctcaacaatggtggtggcgacagagatgcgcaattgcgcatccccaatccacaaacgatgcgcgattcgtgatcgaaagcgtcatgcggttgggatgatgatgatgatgcacatttttttccatttgctggaggaagaatcagtagcactacaaggaaagctaggatggatattgatgacttgtctagtatataacatttggtggatgcatgttgcacatgtaaagggatgcatggtaatagtatgaagacacaacttctgcaaactgtggataagcaagaggggatgaaaaggattgaaccatctttattcggttaaatcgtgtacttctttgttacaattggcaaccgcactgttgtcgtaatggtcatctacatcaatagtagatgcattgcaacttcgcaagccaatcatctttatcacaaaaggggctactcttatctgctcaagtgtgttattgtaatcagatcttgttgagcacatgaactgaggatcatatcatagtagcaactagcaagcatgcattttttataatcttagctttggtatggttggttaggatacggccatgctttcccataaagatttccaaagcattatacagatgcaaagctcttctaaagcaaaaccaaattaacaccaaatcatcaccacatgcttcaagcatgcacgcatgcactgttacccccattgacaaggcccaaataagactgtaatcctgtaaagaatcttccgaggatagcatccattgctgtatgcaatcctgcagaagattttgcatgccatgtttgtttagttttcagaagcatatgcattaggtagcagaaagctagtcatgcatgcatcaagcttaaactaaactacatgatttatggacctatgatatgaggcactatggggctaatcattggcagctgaggttatggtcatgtcaggtcaggtgtgccatacacataaatgcagttggtgctgctgatcttttggctttagttaccagctaatggtgtggaggggcatgactgactgatgatcagctggtcactggaagattcagatagcttagtggtgatctgtctaggtcgttatctgattctgaatgatgtggttgtggtcaatcatgcagcagaaaatacagcaaaaatatgcttgttaaggtgagatacagataggtgcttcaatgatccagaaaaaaggagaggcacacagcttctaaagccaaatactaaatctcaactgaccatttctattagctgatttaagatttgcacaattcggcttttagatatgctaaaaaggctagtgttgcctatttgttaggtcttgataaagttgagtaagattataacaaggtgcgggaagaagctagaaaccagggtcaagtaggctaaacataagaaaatttcaacgtctttacgaggtttgcctatttgttccactagatttagaagtttgtgaggtttgtaaagctattttgttttctggatccccacaacatttttctttttatatatgctaccgtcttatattgttgttttctggggctttcttactaaagccagatcagtgaatcggcaacatctttacgaaaactatgctcgttcagccggtaattgaccatattaatcaactaaactattcaatatgatactgaacaattcaaattatatatacagctaaaacagtaaacgatgaaaaaaaggatgccacttaatacagagaagacactcgatcagttgaaaactttacgaccaccaccacactagaacggataccctcatctcaatcgggcggtaagccccatctcaatcgggcacagcgtccgtcacaggctagaagtcactgatgtgaagagttatcttaatcgggcaaacggccgtcacgaatgaatatatctcaatcgggccctaagtaaagcccgtcaccgatagctttgacccagacgaccagtcaaactatagcccgtcacagatgacctatctctatcgggccacaactagcgcccgtcacagatgactactaacctttatcgggcctaacctagagcctatcacagatgatactcatctcaatcgggcctaaactatagcccgtcatagatgactgatgagctcaatcgggcctaaactagagcccgtcacagatgactgctgacctcaatcgggcctaaactagagcccgtcacagatgactagtgacctcaatcgggcctaagctagagcccgtcacagatgacctcatctcaatcgggcatttagttatggcccgtcacagatgactataatccacaaaaaaaataaaatttgttttttggctagcctcaggcctttgctagccatgcccgctgcaaaaatgacagaaacaaacacagatatccaatatccccagctccccagcatcacccattcatacatatgcattcacatacacagacatcaacatatttcacacaaccacacattcacagccatctcatatttcacatccattcacatatttcacatccattcaaatatttatcatatttcacctgcaaaaccgagttaattggatcaaatatttatttagcaagtcttaacataaacatatgaaatatatacataaatataagcatcatagttacatcatcacagttgcataataagtgttcatcattgcctaaacatagaagttcaacattgttcatcattttagtttaagcctaaacattcctttggggttaattatttcgcggaggatgaagctggctatctcctcgcgaacctcctcaaagctggtagtcagagacttggttattgtgccctacattgtcataattccagattagttgatcgatcatatataagtactaaaatgtagttagtctatcacaattgagaccaccgacctcaaactcagccaaagtcttcaccttttctctatacagaagtcgcatgttgtggcacacatggaatccgcactggtcacctatttgttgcttcaccgggaagtcttttttgtggatgagggtgtcatgtcctgtcttcctgaggcctcctctttgcacgtattgggcccacgcttcatctatcgctagttgaattggggtccaatcatatgcgttcttatcaattctggagttcaggtaatgacatgtactccatttaggtgttatgaccagaaggatccaatgggcactgcggcattaatatagtgaaagttaattaagtactcaaggaatgtgtcatgctgttgtgtatatttagttaacacacttactattgattataggcacacataatgtactccttgtctcggcgggaccacaaggtgtcgtagatgtagttgaccattccttgatggtcattctggagatttgtgacagtgaccacttgtggatcaaggaaggcaacttccagtgcatgcttctgacaccattgccaacttaacctacacacaggatcaacgatcttgtaagcaagttaaaccgattgttattaccagaatgagttgggcgacaatacttacaaggagtagcacttaaggaggcttgtgtccaccgctcggagcctgtagaggtcaaaaagatccttgaagtcgaccacgatataatttgttggaccaaggaatggctttccatcgtgctgtccaaggatatcggtagctttacttggcttcctggcattagatttctccatgtagtataagtgaaggtccttgcaagcggtgcccattgcggcaagcatgtcatctccaaccaatggcatgcctagttggaaggtccttgcaagcggtgcccattgcggcaagcatgtcatctccaaccaatggcatgcctagttggaactcctgtggagcgacgtatttcttcttgacctctttgcccttagtctcttcctggcccttgcccagatctagctttcttggagctagaagcgaggcttgcacctttcctccccttcctctcccctttgctttgggtttatcgagagtaattctctgaggggaagagtgtgccttcctgctcttcttcatcggtgggggttcatgaatcgccttgctgtcggcctccgttcggtcctccccaaaatccgtgtcgtactgcaactgcacatcgtaagattgtgcatgacgatcttgagtaggaggggctgaaggagcagaggcgggtctctttggtggacgaccgcctggtgcagtggttggcctcgctgtaaccctgatctcaatgaggtccttgggccattggatgaaggtaccacgggcatttcctagtgagaggacctcgtcgttcggtggatacttcagagggaacagctcgtattcgggcttcaccgagtcgacttgaacttttgcacagtcggccctgagttgcgctccatgcactcttgtctctggggtcggcttgtacgcaagtccctcggctgctggaacagtgaaggtcggcatcaccctaactgtgagggtgcagctcgttggttcctgcaatagattaatcaatttttttagaatattatatatcatatggattcgttacgtctttcatgtattgagtaagttcacggttaccgttatgtggtcgacggcgctgtcgaccgatgttggactttccgccaactcagttgatgcgcaactgctgcgtttttcggtgggacttcctaactctttgtgcgcagcagcagcggcggcctgggggatctgttgctcttctcggatctcttgcctaatcttggccctcatcgactcgagcttttcgtcgaattcagatgtcagctcagctcgtatcgactcccggatcttggcttcaaggcgtgcatctttctccgccttgttggaagtccgcttcttgtactaccacgcgtagtctggaaatccatacttccagggaacagaagacccaacgccccgtgtccgtccacgatgttccttgttgcccaacgctttcatgaggaggtcgtcctcgcgtctttgagagcaggcctcttgcgaggcttgttgctcggcaactaactccttctgcattacaatttagtggggtcaaataaactgcacgatgggaaacaatgcgaacatctagtttgactagacacttactatagcttcgtatactcgttgatcttctgcatttggcatgaagattatgccatcatcatgtttctggtacctagccctggcccagttcctagcccgagggtgtgggatatcgccaaacacgagcggtgtgcacgattcctccgcttcttaatcctcacgctgccattcctcttccttaccggcatatccggcggtaccaagccggtgcggatgctggttcctggtctggagcaagcgatatgcctcgcttctagctctggactcgggggtcgacttcttcgcatggaattcctcctagacctgttccatgatccaaggaaatttctctcttggatctggatttgccgggttgtagacgaactcgccgactagcttagtcttgaagttcttccaagcagtgcccataaccttgaaagcagcccgcctgagacagtcctcatgctccgcaggataatcaaagctctccttgaacgttagccaagcaatgtccttctctgcggccggcacgagcttgaagtcgtcttgcagaatactgaatttctgcctccctatgaccccgcagatagacctaaatcggctcaatattttccttggagatgtcggcaaccctatggcgtccaccgctgttatgcggaaccgttccttaggaattttgttccctgtcctaggagtacgtgcccttgaggacccactagttgtcgtcgacattggttcgctttgctgagacattgtctactttcttccaaaaaaacaaaaaaaaacacaattgagtgctacaatctattacaatctattaaccacatttcacaataatttcattaatgcaccacatttcatcccaacatgaataaaccacatttcatcccaacatgaataaaccacatttcatcccaacatgaataaaccacattttatcccaacatgaaccacattgcatataaataaagttaaatgaaccacatttcatcaatcactacaatcatctatcataaaattcataaatgcaccatatttcatcccaacatcgacatgtctcactcacagttcaatcacatatcatccacatccatatttcaatgacatgtcattcacagttagcagaggacggcgcgatggaggactcacctgaggatggccggtggggctcggtggcggtggcgcccgggctcggtggagggcagcgccggtcggtggagacgccggtcggtggagacgccgatcgggcaggtcggcaccgggcgggcggcgtcgtgctcggtgggggtcggcgacgtgggtcggtgaggacgcgggcggcgacgacgaggaaggccaacaccagtccggtcggtgtaaagcctcggtggcggcggcggcgggctcgggggggggggggtcgtcggcgaggaggctcggcggcggaggtccgaatggagggccgaggaggctcggtggtgacggcggcaggcttggcgagggaggacgactgcggcggcggcgggctcggtggcgacggcggcgggcttggcgagggaggatgacggcggcgctagggttctaaggaggcgggaaactgtagcgggacttagaaaaattttcgatccgatctgagaaaccctagttatattagagtgatgagtcatctcaatcgggctttgccgtagaaccgtcacagatgactcatcggtgacgggctccatactaatgcccgattgagatgacattcaggcccgtcacggatgactcatctgtgacgagccctaagataatgcctgatagagatagattaatctctatcgggcttgaactaaggcccatcaccgatgactatttttccatttcccagataagtctttatatttgtgagtacaaaatatatagctgctgtataataattcattttattagtcataacacatttttggatagtaaatgatttcaaatcgaaatatggtcaacaacaaaaatgattctctcatcaagatctacaacttttattttggtcatttatctatataactttgtttctaatagcttgaaattgattttgacaatatgacaaatataatcaacatttgtaaatactaaatgatttcaaatggaaatatggtcaacaataaagttgtcctctcatcaagatctacaacttttattttggttacttcttcatccgacaaagtgatagttatattattcacaaaaatcacatttctctcatctggtttataaatatcaacacagatatgtcaattttgtaaacattggtactatcactttgtcggatgaagaagtgaccaaaataaaagttgtagatcttgattagctgtacaagttagctgtttatggctttcccatttaaagtcatgtaatatttacaaatgctgtttacatttgtcatattgtcaaaatcaatttcaagctgttggaaacaaagttatatagacaaatgaccaaaataaaagttgtagatcttgataacctctacaattttgttgttgaccatatttcgatttgaaatcattgactatccgaaaatgtgttatgactaataaaatgaatt

SEQ ID NO: 7508 - DNA, 70692 bp, Oryza sativa
cggtggaagagcaaaccccgcgccgcgtccttcacggggcggtcggcgaacgcggcgctggacaggagctcccgcgccgtgtcggggcggctggccacgacgaaacgcgtgaggccgacggagaagaacgccagggcggcgccgccaggcacggacctcgacatgtccgcgagcgcacggtgcgcggcggggccggcgagcgcggcgagcgcgcccggcgcgccgggcgggggccggcggcagcgggagagcgcccacgcggggccgcccgggacgagccagagcagcgaggtgacggcgaggagggcagcgaggagcggggagaagaaggtggtggagttggccgggaggaggaggaggtagccatgggtagtggaggcgccgagagtggcatccatggcgtgtgagaatgttggggggaggcaggagggtgcgggcgtgggaaggggagattggagggtttaaatagcgagagggttgtgcttgtgcactgtctcgagtaacaaagggcctgttcactttgatgaaaaaaaaaaattggtagccactatgctaaactaaatgtagccactttttttgtaattttactaaaatttggtaaggttggtagatatagacttttctcttgcatactctctttgtttaaaaaaatcaaatccagataggagtgtaagcgggtttgtccgtgaacctgcttataggtaaaattagtgggtaatatattaatttaatctataaataagtttatggatccacacttgcatctctgaatatggcaagccggaccacgacgtgaaaattcataagttattatctatttgatctataagtgaacttgcaggtcggcccgcttcaatccctgaatctagacaacaaaacaaaactgtattcaaatttactgctaatagtagtatctattttggacggtggatgtacagatttatcattgaagaaaaaaggttttaaattttcattttttaaaaaatggctttgaagaggcaaaaaagaaaaaaaggtctcggatagtagcaatttgccatgaaatttactaaattagtttgtctgtgaaaaataaacgtgttgttcactttgttttatgggatagagtacggctctttgtttggcagcaagagttctttccttgggataaagtattaaacggtgttcatttttaaaaaaatccatacaaaaatttcttttaaaaaatcatattaatctattttttttaaaagctaatatttaattaattatgtgctaatgaatcaatttgttttacatgtgtaagaattagttctcaatttcaacatcaaaacacaacgtaaaagtgttatttgcccttctcttttcgaaaaaacaacatctcctctacacgaaaaacggagcggttcattaacacgtgattaattaagtattaataaaaaaatttcaaaaatagattaatttaatttttttaagcaactttcgtatagaaactttttgtaaaaaaaatacaccgtttattagtttaaaaagcttgcgcatggaaaacgaccgagatgggtcgtaaactggaaggtccgaacacagccaagatccatacccaagtcttgaaaggatgagctggtgatttgtggtgtcttttcatttacacctaccttcttttttcaattataaatagttttgatacaaatcgtttatattttgattataaattatttattttttcttagtcaaaattatatatgtttgactaaatttatagataaaattagcaatacctgtggcaccaaactagtcttattaaatttaacattgaatagtatttgatacaaagtttatcttgtattggaaaatgttactaaaattttgttacaaatttggttaaacattaagaagttttttttgcgaggaaaactttaagaagtttgattaagagtaaagacaatcgacttataatataaaacggagggagtagcattgtgctttattcaaagaattttcttgtatataattttgcattgtatgcacactgacatctagtgatagattttaatataaatttgttggaatttagcaggtaaaaacacaagcattccgctagtgtagaagagaaattggcggttttattttaacgcgcacatataaatacttatattgtccatttgaaaaaaacgtttctattgtcttaaaaaaaattgatgcatgcctcttcctctaccacttgatcattatgtaaccgtccattgaaatcattactcctgctcaaatgacgatcgaaactaaatgcaggcgtaatcactgccgttacgtacgttgcagcaatagcaatcgccaaattgatgatctttcaaaaaatcttctgcctaaccgtccgatgagttgccgttcagtttttcaggtaacgagactgcatggagcccagctataggtctagacgtctcctccctcccgaaataaacatagttataagtttacgtgtccaaatttaatcctttgtcttatttactctcttcatcctaaaatataaggcataaccacttttctctcatgtctcatactccatataagacgtgtatgcatgcatacattaattagcacctcatggtccaataaaattgatttgttttaaatcctataccattaaatctccctatcacattgcttggatgagtcaaggtgatctaaccaagaaggtgattaaatattttcttggtctttgtgttatgagtggttgagaattatattttggaatggagggagtaaattttttttatgattagtattttttattgttatttgattataaaatatgaatattattttgtgcgtgacttatttttttaatatttttttaaaactaaataaataagacaggcggttaaagtttaacacggaaactcatgtttttgtttattttaggacagaggtactactccctacgtaaaagaaagttcctagcgtagcatccaaaataataagtacagtagtgagacaaagagacgaaaataactcattaaaaaggtataaaattggggttggataaagagatactacttcttagggcaaaatgccgcactatttacgtctcaattgtaacaaagaaattttagaggaattcaatcctataaaaattttcctacgtggttatttggataaaaggaatagccatatacaaatcctataaaatttctttggattgacacaaaacataattttggaggaattctaacttgaatttcaatctctcatgaaaaatcatttgcgtctgtttctctctcttctgctttctatgtttgtcatggcggttttttttccccatctaaatattcattccttgaaaaataaatcggtagctatatctcttttctacttcatatgttggttctgcattccatccaaacaattattcttacggttgttttttaattcttgggatttaaggtggtagaccactttaatcatgtattttgatatatatatatatatatatatatatgtgggggaaattacttttagatatatgtaaataggtcactttaatcctgtattttgatatttttaattggaacgaatgtttgcacacttccacgtaagaaaaatataagtgctatttttttgtcatttgttaaaatgatagacggttaatatgaaatgtgggtaatgctagaaagtcttataatatgaaatatgggtaatgctagaaagtcttataatatgaaatgattagttttataaggttacgttcatttcttattcgttgattaaggagaggtaaaaatgtttcagctatatgaattgttttaaaagtaaaatttttttttcccacaaatactcgaaccaaattatcataaaattatagatttaataataaatttatcccaaaactacatgtttaaggccaagtatcacaacactacgaatttaataataaaattatcacaaaattatggattttgggtttaaatccttagctctaatattatgtttgagttataaatgtccaaattttgtgattatattgatgtaaaacctataattttgtgataactttattactaaatgtgtagttttgtaatattccatcttaaatttgtagttctataatatatttttttgttaaatctataattttataatacatcatattgaatatgtagtattgtgataatttacctaaaatatatgtagttacgtgaaattcactcattttttattttagaacgtagagggtgcagttgatcctgtttgaaggtaggtgggccccacgggcacacaatcagctgtcagcatcgcagagcgaggcggcggcgcaggccggagctggccgatgtgtcgagcggcgttgagccgctgactcttgctgtcttgcatgaaggaaatgtacattgtcgctacttctacagttctagtacttgttttctaggtccacgtcgcagaggatgtaattctgctgctgctacatgtctactcgcttcgtttggttgggctttaaattccaaatcctaactctaaactcttatgtgggagaccaactaaaaagtgtttgcctagtattcggaaaaaaaaatggaaaaaaaacaatccataatacctcgtgaagccctaggttgctgtcccgtgtgcgtcgccagcggcaggccacgcgctgtcctcacctaccccgcgtcggccatacgccgtccccgcacgcgccatcagccacgcactgcctgcccgccagtcgcgcgcgagagagaggggtaaggagttgtcttgggatggttaagtggcatttttatgtaaatatgttaaaaaaattcagtttcacctttgtattttttttaaaggaatagctctgctaactccactcccaaaaacagaggatcagcttcagataagttggagatgagagctagagtttaccaaacgaggctgactcgtttcattaaaattaaatctaaatataatgtgatatattatagtattataaatctagataacttctagtcagacttagtagaaaatgtcacatcatatcaagattattttttatgaaataaaatgattattttttatgaaataaaaggagtaccatgactagcctgcactcacttctgagccccaagtgttttttttttaaaaaaacaccacttactctctctatctcaatataaatataaatgattttaactgatttctatcccaaaatataaataattttgattggataaaacacatcttaatattattaatctgaatcttcctgtcttatttataatattattatttataatattaagatatgtcatattcaattaaaattatttatattttgagacgaagaaagtatgtccaggtaacacccatttccttcttcaaacgactactacaataagaattcgcactcaccgttttcttctaaggccagctctcctatcatatcattgtcatacagccggcaatctgtgctgtttactggtaggccttcaaaaaagaatgtcacagggaggtgcagatgattgtgcgcacatccagataacgattactaccatacatataatcctgagcaaaaacatagacatgaacgtgactgaaaccaaggcacaggcacacgataattttggaagattcaggcatacgatttgcctcgaaatttaagcgacaggatcatgatcccaggcagggtgtttgccacggagtcataggtacgggacatgcatagagaatgataaaacaatgggggttcccagttctgataaacaaggatagcggtagacttccttcttcatccggtgctacagtgcaccaggatcactccttcagtttccaccaaagaggtagcccagggaagatccaccaccaggggcagcatggaccttggtcgaagggcgatcctgcgaaatgacaatgaaattgccagagagaactataagtaagccccatgaatcagaaattattcaatctcatactgcaaatagtggataagtaactatgtttctatctcagtgtagactgatcctttcttaccagacaccaaccaagcattcacaatttaccagcagacatacgtaacatatgcccaaaaggaagagagatggtttacaaggacaatcaagtgtccaaatcatacctcatgcataacttcgatttgcagcataaagatcagcatgtgaaattagcaatattcaggactaaaggctaaaatgatcaagaattactcaattgtccattctggatgtggaaactagccaattcattcaatagtattataaaaaagatgcccagcaattaaagaactgagcttactgaaagtatatattgataataacaaaaccaatttgaaagttgatgtataatatttttttcaaatatattgccaacaagaagttacttccagaaaaatatctaatggtaccacatttgtgacactaaacttgcatattgtttgactaactgttggccagaacttacaagttctgaatcctgaaatgccttgacccattacaaataaactgtaattctgatgtggataaaaggaaagaaccgtaccgtaagaaagtttccagtgttctggccatcagctctatggtagttgttattgctccggctgccctgaatcccagctggaatctgcttggtggcatcagcctttgcaggtgatggtttctcagcaggagcagccacagccgcagctggtgctggtgctggcgctggtgcaggtgcagctgcaggtgctggtttagcagctggcttaggggcctcattgcctccaaaaaggtaacccagagaactttggccaccaccggcactcccaccacgactcatcttgattgttgatgaagtgaagctgagcagaaatttaaggcaaaaatattaaaactcaaattttcagtactgcaaggaaagacaaaacaaagttgacctgagttcaacttatgaaacatgataatgatcataaagtttttgatactttgatgaacttatgcttctgaagaaataaaaagtttttcagccaaactaggatgtactggttctatatcaaacggtagtttcgttttcaagctgcacccgatggctattagtattttgatgatgtggcacattctccatccaagaaagataaattctttcactactttacatttttattggactgaaacaagaggatggtaaccagagtacaagactaattcctgttgctttccattctaactcttgttctaatgttcaaccattttctgcccagcaacatatagtagcatgtgctcaaatcattgggagctccagtgtgcagtgagatttctaatcatgcaagatagcatagagcagaactctaacaaaaacaacagtacgattgaccaaattattagaataaaccaataaaaaaatcaccaagctattttccttggttaagtttgaatttacctagtgagaaaattaaaaaaaaaacagctataaagatgatgaatacttaattcatagcagaaattatcaacacaaaaaggacaatgcttcaagcacgcaagtgtatatgcttcttaacttgttaaaaatgttctgtgaatctgtatatgttccgtagcaagctataaagagattagttcttactaatagaacacagcaagcatgcagcagctaaacttaccttgtgtactaactttctattgttaagagaaataacttttctcgtgttaagagaaaatgttgtatgaaccatcaatttccaacttacacgtcaagcataaaaggtggctataagcacctagatggtagtttgctattcatgaagtataaacaacacaagaacctttacgctctggtgcgtttactgctcaacattgtgaagtattacatttgaaagcaactttctattgtctataagtacacagacagcaacatcactaccaagtaatttgtgcaaaacaacaagataaccaataaagaaagatcttccgtctccactaggcgtctatgccgctagaaaacagtaggtgacgctcatgtgacgtttattaagacgttcatgtcacgcttactagatattcaaatctaactgcaagatcaggctcatctgaacgaccacaccgttgcaaatactgacgtacatcactatgtttcatcaaagggatgagatcagcacagaatgattcaggaaatccagtccaatcggaccgaaaaactaaacaaaacagatcgtggcatcctcttccaaaggcctaaaacaaaatccacaattctacacatcacacagccacagaccatacaaggacccatcagaaatcgtcccacaaagttagcttccgcagccgaatctcgaacatacattccactcctcgctaatgctctccacgcaattcctacctaccaggaacgcacagacgcagcacaaacaaccgcccaaaagcacggtgggcggaaacgaccctacagacgaacggatcacgccgtgcgctacctacggcgagcgaaatccgccaccgatccagcattgcccgcgccgaacacccgagaaaaagtaaaaaaataaaaaaacaaagaaagtgggggcgacgggatctcgcaggaagatccgggccactccacagcgcagggatcaacaggaagggggggagggagacggatcagcggggggacctcaccgacgaggaggcctgcgtgcagacgggcggcggcggcggcgaggggggggggggatttggggattgggcctcacgcactcgcaccctgcgcccggatccgttcgaaatgggggaggagcgtacgggggggggggggtgggacgtcttgtataggcgacgcggggcggggttgcgggacgggtggccgtccgatcgccgcgatggacggtccagatgtgcaggcgccgacagttgaggcaccctctctgggccagcctgtggctgtgctggtgcgccgacgggacggggacgcgtgatgctcacactgtgctgatgaaaggaattgcataccgtaaccactcacgctcgctataaataataaagattcgcccctatttagctgcgtgtttgatgtgtaatgaagagcatctttgatcaccatgtacatgatttttaggtaatatggtggtgtttgaatctcctgaagatgagataaagattaagtgtttcacaccaacgaggtggtaataacgtgtgattaattgagttttaattattacaaacttgaaaaatggattaatctgatattttagagcaactttcatataaaaagctttcacacggaacacatcgtttagcagtttgaaaagcgtgccacgagtatctaaactttaatcatatgcttgcagaagaaacgaacaggatctatattgtgctcggccatatgttctcaacccaaacatttccaccgtggaagactactatggttgatggatggggaaagtaattacgtgctcctgttttggtgaggtctatatgatgattctgttttcgtattacttaatttatcattcgcccctttaaaatattccgtacaactagcaccgaatataaaaaaaacttgcctttttctttttagttaaaatcatagatattacaataattggattgtccgttctcctcattctctctacttctctttttctctcctattccaacagggaccaatagtggtgatcaggctacaataagcgtggttagtagctagcgagtacaagcaatgacaatgctttttgaattgccccattatcctcatagtatggtcgtcattgtgggctataagcctacaactagtgtcttgatcctcgtgccaaagtgattgtagtatcttctatggacaacgtagttgcctaatctatttcatgcgacctcttcatcaatgtccccgtaatcggttcttatgtcatgtagacctcgataaagtggcaataaacatagaagtatgatataatgaacctctagagactaatggtgggaacatatgatggtctggtatgatcaagatgatagaaaagaagggaggggaaagagttaaaaattttttaccagtaaaacaacaggagaggctcctactgtgatatattaaaaaaatatatagagaatatttacaagagagatttacagggggagcatcaattacagttgatcaatctatgactgccaaatggagatatcttgtctttttactctatgcaaaagtagagtaaagtcctctttgaataaacagtctcgtttgttttgtgaaaaataaaaagacatgaatacttaataatcaattaaggtatatgatatttgtgttcaaaaatataaggaataacataccctcaattttaaggaatgaatgaacaaattgtatatactcaatgaatatagggacaaataagaaatactaggaaaaatagaaggaaatacttaattccccttgaattttatgcatatggtaactctgttccctgacctatttcatattctcctctgttgggttggctttgggtttgacaattgatatgagcagaaatatgcaattattaacttagcctagaaattacaaggcttgatagctatgttcttagctaggttatttaattattcaaataaatggctggactgtgaaaccgctgacactggacaaccaaccaaagctgaactttgtgtcgaactagtaaccgtgcacgtgtaatgcacgtttatatcaaaattatcacttcaattccatttattgttataagcaataaacttatttcaaaccattgatgtttacatgaaacataattgacaaatgaaagtgacaaataagcaaaagctctcgttggtccttttgtttcactaccatttaaaaaaactaagtttcactactcacttcatttgaacaaaattttgcatgtggctccacaagtttagtttttgcaacggattccctctaaaataagcaactgtagaaccatcctctcgccgtaacaatctacaaccaacagataaaaacaataatccgatttaagctaatcaacatatatgactgttagtttatctgccagctctgtccaaggatgaatacctcaatagtacacaattattctcattgtgcatttggtttatggataggcaaaacactacttctgaagtacatgtgtaaataccttgaaaaatggacacgcatagcacaatcatttcactgcccatattatagcttacaagtccacaaaattatataccagagcacagcagaaatgcacataaactatatagtttatgatcaaatatggtgaaaaaaaaaacatactcttccagtcaacccaacttgaagaggaatagtataatatatgcatacattccatcggtgtccaaactgaggtcgaatcacccatcaaatacggctagaattgattaattgaaacattcaatttgaaccatgaaagatatccatattcttgtgggtcaatagttgttaacgtccattattcaaagcttaattccaagatggttagcttcccctgtaagcaacaaaataattcctttataaccatttcttcaaatattgcgggagaacttcggaaccatacatacttttgttagcataaattggtttgaactctaaaacatcaagtaagggtctgtttagttcgcgaaaagaaaatttttgggtgtcatatcggatgtttgaccggatgtcggaagaggttttcggacacgaatgaaaaaactaatttcataactcgcctggaaaccacgagacgaatcttttgagcctaattaatccgtcattagcacatgtgggttactgtaacacttatggctaatcatggactaattagcctcaaaagattcgtctcgcgatttcccccctaattctgcaattagtttttctttaatctatatttaatgctccatgcatgtgtccaaagattcgatgtgatgtttttgggaaaaaaatttgggaactaaaccaggcctaacagagacacatagatttttgttttcaaattgtctagatatcagtgaagcaattgtaaagacacttcttaaatttgttacaagcagtagaattcgtactaagagaataataatttccactatgtttaattgatctaaaatgctgaacactttatatcaattaagcattgtttactctatctatctgctttcctatttggcaaaccaaaactctgaatttgatcatgaacagtcattaagataggtctatatatttttcttgtttcgaactgactacagttttagaggtgaaagcttatttgaagagaagtaaaaaaatttgcagcaaatcaacaaagaaattaaggcatgaattaacagagaatgcaagaaaaagaaagcatgtgcgattcagattgacgatttggttgactaagtgatacgacccaagtaggggtgatgtcccgatctttacggcgtaggatcaagaaccgataactagcctcaaagagaccaagataacttagctgcaaacagccaagataacagtgcaacctgacgatcgtactcgaagccaaccaccgtctctattacggcaacctgaattgagggttcgcccaaccacactctaagttaccaaccaacacaacctggaatcaatcaaggaaaaacctcgaagggaccaggagcaccaattaggggggcgtcgaatgtcgtttctgtaatctcacaaggaaataacaggagcaaaggatctctctgtgaatttgttagcacacaagtgaactctcatttgtcaaaagtcttccaaatgataaaacatataggatatttatactaagaacaaccctcctagttgggaatgaaatgtcttgggaatttactagacataagctaggtcaaaagtcaccataagtgaattcccaagaggactcgcacgtctgtttgtcttatgagcggtcttcaatgatttgtccattactctttattggaaagtccatttcattggttcgtttttcactgggctggtccgttttgcactgaactgctccgtttttgctggtgcgttttgtaatgcactgatctgatcttgctgctccgtttcatcctccttggtgaacctgagtaacagtaaagtgcatgacttaggcaatatataattctcattaatattaaaatatgtttcagctaggagcgagtttacctctgcacggctacatgttatcgatccttgaaatgatggcactagtccaattgatggtttatgttcatatgatagcaagggtagtgcacgattacgttgccttggtgtagttgtggcaatccgagtcaagtctctatctttaagcacagcgatatgctttaacccacaatcaaacaagccaagtagcagcctttcttgatgaaaacaataaggtttgtagttaagcatagcgttaaccttgcattgatgcgcaacaatcacattatgtgtgaatggccttgaccggggtgtatcacgaaatctgtgatgttgccctccatggtaatctgttatgctaatcagtcgaaattaatccataaattgactggttagcacaacaattacggtacgggtacacaattttgtgtaaggcacagatccatgccaggacaacctctcgatgtcctgttccaacgtcaactggtcctggctcagcgcaacatgaattggatttttcattttggggaccctttttcaatacatgttaatgatatagaagtccatttagactccccctcctcatcaatatagaacacctggtttgcaggaaatgtcataatgtaaggagctacctaattcatagaaacatagtcccaactttaagttgatctatgggcatgcgaaaaaaactgaagagaagtgtattattctacataggaaacataatatgcggcagaataaaataaaaggaaatagtgataaaatagacagtgcagcataattgaagaaaattgctcaaagataatgtgcggcagaataaaataaaaagaaaatagtgataaaacagactatgcagcataattgaagaaaaatactggattaaaattataagcaggttttacctatgtccacgaacttgtaaagcgtatatcaaggttcctaaacttggtttattgtgtcatcccggtccaaaacctcgtttgaccgtggtcttgcccacgtggcatgacacgtcgaagatgacatggcacatttttatttttccttttttttcccttcttcctctttcatttctctttctcctttggcctcttcctcctctctcaccttccagccaccgcttgctcccactttgacgctgtcgcctctgcctcctctcccttgccgccacaaccgctgccagcagctgctgctgcttctcggccgccaccactgtctctctcgttgccgcctgtttcttctttgggaaagtcaaggaagaggtcctccgcagccactggcgcctgcctcctccgtcctccgtggccgagtagaggggggtgaataggcggttttaaaacttttggctaaaaccgagttttgtatatggaaacgtaaatcaatacggttttgcacaattcaaaacctcaatcaattagtctcaactatgtgcacaaagtagctatcctatgttgtgatttgcaagccttgggtgataatagcaaaaataaactctagtatgtaaatttgcacaaaataaaggagacaagtgacaaaggatttttccacccgatgttcagaagcttgtcaacctcctacgtcactgttgaggtgagtccaacttcaccgctcaaagcctcaaaccatgaagccaccataagcccccttcgtaaaggggtgggcaaggtgggagccggcccatggagtggtctcccaagcctctatcactatggttgttcttcctccactccgcagatggcaaacaccgagccactcataatcaacaccgggcctcctccacaaccttctcggagaggtcaccgggcaactcctccaaaccgtctaggaggtggcaacctctaagagtaacaaatctaagatgcttgccgaagatgatcatgtgtcactctagctctaacaatgaagcaatgcacttggattggcttaactcactctcaaacacctcactagataaactaagtgcacaagggtgtgagagttcttgcaaggattcaagataatgcaatggagtgccaaaaccttacccttgcagctaaggagtggtatatatacccccaatcactaaaattacctgttggaatcgaaatccccaatttatgttgcctgcaggtctgaccgacatagggtggccggtcaaaccgccgatggttataacagctagaaaagtagcagttacagggcattaaatgcacaggcagcagtagaactatctgaccgcattggccggctagttagagcacccgaggctcggtaagaccgccagggattcggtctgactagcctcggctctagcggctctggattgacaagacgagaccttcaaaatcagggtcagaccgccatgagagcctcggtcagatcggacaacaccctgcggtcagaccgtagctcacttttcaacacaaccaaccgttagtaaaacgacgttatctcttgactcgggtttcggaatctaacgtttttggactctatggaaagattattcaaagggctaaccaacccatgaacaatccatccaagaaatacaactttttccagggataaagggctaacactccaaaagatactccactggacataaccacattaggctacccaaacctataggacatacccacttctctctttgtttgggacttgacagaactcatcacacttggccagacaagaccaccaaatgcacccacatgcatatgaactaatatggcacaagatcatccacatactcacttcatagacccctcttgatagtacgacgcctatctagcaaatccagtctacaccaaacagcaagactgggaaaagactaaaaaacaatcttagctctattatacctttgccttgtgccatctaacttggtgtcaatgcttgagccaagatcaacacttatgaccatttggttgatccatgtttatgccgaggtcttgaccatcctttgtcaagacttttcttgtcatcagaagcttgacttcattcttgtcaacatggcgatgtccttggcttagtgactatcaacccatgatgtcatccattagcctcatcatggtcggaactattcctttgcacatctcaaaggagaacattagtcccaacaaatcggttgtcatcctccacttgatgaccaaccggttgcatatgaaatatatgaatatgttcgttgagtattcattaacaccacaagtgtcatatactcgtgcataagctcaagtgcaaagattcaatataaataataggtgaacatggatctagaacatgtgcaataaatgtataggatttgctcgccctaaatatatgcatacaaataactatacaagagagacaagtgtatgtataattaaagaagaaccaatggggtctatcctatacacatgaagaaggcatgtagcaatgataaagtaaacaaaaaaacataccttcatgatgtccatgtctcaatgtaaaggagactaaataagataagactcaagtaaacattagtctcacacttatataacaataacatggaaatgatatatatgaacctatcaaaaagtaggagataagaagtgatacatatcgctctatctccatgcatttcatccttatcatgattaaggtccatcacaaaagaatacatatctaccacatttcattatcaggaaataacctagttgacaacttatgtaaaagagaggttaatcccataaacattggtttatcatctatcaccaaagcaacaattacacaaattgtttaatccaagatctttcaatcttttctctctttggtaatggataataacccgatataaacaatatagagagatgagatgaaagatgattttgaatcaatgtagagatcttataataaacaaaatatagcataagctcccccctcaagatgtgcatacatatggatatgaaagaacacatatgcacataataaatcagaatcaatcaggagctcacattatattttggatccacaagagagaccaagttagaatatgtgatgtttaatacatacctctcatcatttttattttcatatccaaatgagactagtcaaagaaaagctcataaaaactctagtctcatataattaaatttgtcattaatcaccaaaactaaattaaggcatttgaacttacacatggccactgcatactttctctggccagatagtaaagaggaaggttgcagatccacgaagaggaggaggagggcacgcaacaacaacgaagaggtggaggctgcggcgtcgacctagggtgcatgcggtgacaaataggaggtggagctcctggctgccatcaagtggagctagagaaggagagaagggagagagcggggagctcgtggtcaccattgtcacctctggcctcgagcttccgctccatcgtcgggccaactccgccaccggtgcctttttctctagtggctgacgccatctctctttgcctccctctctgtgtgtttcttgcccatcgccgccgccgctgcatccagcggtggaataagaagagaaaagaaggggaggggaaaaaatggaaagggggaaattttgccatgtcatcttccaagtcgcatgccacataggcaagactatggtcaaacgaggatttggaccgggatgatacaataaaacaagtttagggacgtcgacatgcactcgtggaggaagaagagaaaagaagggagggtgaaaagggaaatgggaaattttgccatgtcatcttcaaagtagcatgccaagtagacaagactatggtcaaacgaggatttggaccgggatgatataataaaataagtttagggatctcgatatgcactttgcaagtttatggagataggtgaaacttgcttacaagtttaagcaccgttggtgcaatttactcaaaatactgaaatataatatgcggcataataaaattaaaagaaaattataaaaaatatctggaatagactatgcgatagaataaggtcatatggtatatggagctcagatggatccagtggggttgaatcacgacagatcgtgcgaaggaggaaggattctcctcctcttcatcgatctccggcggcgaccctcctcgatgaagatggaggaaggatcctcctcctcttcctccatctcctgacctcgcccgcttctgatcccaacgatctcacctgcttcgggatccagtgggctggaaaatcgctgaaaacctcttcccggcgacggcagtgtagggggcccactcatcggtggtgcggagcttctcctcaatcctcaatccagctcgtgctggatggtgctccaccacctgcggtcgcacaacggcccttcatggagactggtcctcaaactccaaaatgctccgatgaacggccaaatctcagcgagtacggcagtaggagaaactagggtttcggagcgagtacgacaacggggaaactagggtttcagaaaactcgaaagcgcgggagaaagaggttagggtttagcaaagactgaaaataatcggcgtgccattcgcatgtttgctagatagcctatatatacttatcactcaaaaatactatatgaaaaaattagtgtgctcattaatttaaaatatgcatatacttcttttcttatttcaaattttagagttttcataaaatatttttaaaaaaattgtgaaccactattttagttttcacaaatggacatatatgatattaaaaaaaattatgtatgtatgtataaataatttagttattatgtatagtagtgaaaaatatatttattataaaaaaataaagaacttgtatgccatgtcaagcaaaagtacaaaatttaatatgtcattttatgcataaattttgatgaaatccaaaaaaaagtaaattttaagattcatcaaaattaattggttcaaatatatttgcttgtggatttgaatatttgaaagatcaatcatttagtatattcagagtttttttaacatatgttgtgtaacaacaaaatacaatcatttttttgttgtggaggtattaatgatcatattccgtgatataagaaagcaaggttaaccttctttctttgtttgttttgaccttctttctttgtttgttgtgaatttttttttttgcataataatttcgggttactttatattctagagttataggagttataggagtagtaacgagtatgcgtagtataattaaagaaggagaatgaatgtaaatttgttgttttagatttgttttgtccttcataattttgggtttaatatatatatatatatatatatatatatatatatatatatatatatatattctagagttataggagtagtaccgagtaggcgtggtatatttatagaaggcaaaggagtagaagttcgtgtgattggaaatagaagatagttttgcaagcctctggaatccatatgtgatatttttatctagatttttcctcacatatgattgttagctgttttttctctagtataaatttatgatttttcttcaaagcaagagacgccacgtggaccaatcgaaagctagcaaaaagagccagctttagattattagatgcgtgaaggagggacacgggtacggtgtaaagtatatttataccacatacgggatacggcgtaccgtatacgtgacctgtcggagtccgcataccatatacgtccaattgttagttgggccggggcggtgagatctgacacaatcgacccattcctttaatacccatgtatgctgggaataagcccactatgagtccctcaaatatatgtccaatttgattcgtatccctcaactgcaatatcggatatcttgactcaacaaatataaaaaacggtgtaatttaaatctcaacggttttgtgagcggatttcgctgatatggaacgttgacttggtccgcctgtgctcacatggcaaccctatcacaaatttagtagggctcacaagtgataagggaaaaaaactatggggcccacatgatgacacgcagcatgagctctcaaccttgagtagcgttgaacgcgttgtgcgtcgggctcgtcaccgccagctcaattagcactgagaatagcgtgggatatctagtcgtggggaagcaaagggcccctgatcagccgtggagaagcagaagccaaaccctgacacccctcttctcgttctacgctactccaaggcctcgctacaccagccccgtgcactgccgggagggtgccgtcctcctcatagctaaagctcttgccgtagtgagatcaagggagaagttggtgctcgctagctccctgtttgcccaccacagtgccactgccacctgctccaccccggctgcttctggtgttgttgcttctcgcatgctagatcgagggcgtcatctggagctcgagcccttcgtcacggcgagcgactcggagtggacaggggagatcacagtggcgagtgaatcggtagggatgtgatggaggtggtgtgcctgttggaaatatagtcatatatcggcatattttaatccaaaatattaagacaataatcatggcatgaacaatgtggggtgatttagtgataaaatctaacataaccaggagcatacttaagatataataagcatcatcatcatacaaagaacgcaatagaattgcgactaacagagatatgaaaaaaatgaaataacagtaagcgaaggttataccctgtgaatgtccctccgctggattgtgaagcaaaactgcctccgttgatgttgtcgttcgcagaggctccggctcccggcgcgccatctccaggtgcgggagcagcagcggcggcggaagacatggtgtagcagacgacgacgacgacgaacagaagacgaggagcagtcgtgcggaagcactccccaaaaacctgatcactcgcctacccggtgcagatctcgggcgaaggtgtggttccggaggccctgcttgttccgatctctcgtgcacgcaagcgatcagaagtggggaagcagaacagtagcagcaccaggcgcgcgcgaggaggaggaggaagaacaccagatggaaagtaagcagcggaatctgatcggattagctctttccttatagcgcaggagcgatatccgcctgttgccgcagtaacgacgcgagatcaattggaattgaatcgcctgcccgttacggaggcaatctcgggattggtccgttgcaaaagacgccacgcccatgcccacggcctcggcccggcctggccggtcggctcggctccgcgcgcgcgtgcgtgtggctttctgatccccacctcaaccggtcaacagggagcctccaataactccctatttaagttgagatactcctcgtttaattcccaaggtggtattattgtccttaacatttattatgggactttgacatttaatagaataaatcgggcctagcctatttattccaacaatccccaccaaatttcatggctcataagaaatgttctcaaagttgtgcctttttgatataccagtgttttagtggagactgttaagttgaacttccacctaggaaatgagctacatcagaccacaactaaacaatgaactatgccttgaattgtcagtcatgtgtgatcaagtttcactcaaacccttgactggtactgggctgccgttcgcatcccctctgtttggagcatataagtcaaactccaggccctttcatgagtatctagagatcgcccaaatctcatagattgtgactagcagtcgaactcatataggtgtgttccttctgagatgttctgcagatcaacatctctgcttagaaaagccactcggatcacattaaggcataagccatcctaccatgcaggaaagaagagaagtacaacatgaaaattagcccttttcaagggtctcttctctaagccacacaatagtttgtttcgccatccaaattcacgggatctccgatcacaatggacaggtttccactattgtgcaaccttaggtgggtatcaagcccatttcccttgatgcactgactatcacattacgtggtagccccttggtaaacttatctgccagatttttagccgtttggacataatccaatgctatcactccggagtttttctgctttctgacatatttcagtcttctcttgatatgcctagatgacttcatattgtcctttgaactgttcactttaataatcactgtttgattatcacagttcattaggatagctggcactggtttttcacccaccggcaaatccatcaggagttcacgaagccactcggcctcaactgtcgcagtatctagtgttgtaagttctgcttccattgttgacctcgttaagatggtctgcttgtaagacttctaggaaacagcgccacctccaagtgtgaacacatatccacttgtggcttttatctcatcagcatcagatatcaagtttgagtcactatacccttctagtacttttgagtacccggtatagtgaattccatagcccatagtgcccttttgatagcacattactctttccagagcatgccaatgatcatctcccggattcgagacaaaccggctcagcttgcttacaacaaatgagatgtcaggcctcgttgcactagccaagtacatcaatgaaccaatgatttgagagtatctcagttgatcccttgctattcttcggtttttccttaatagcacgctgggatcataaggagtaggagctggcttgtagacactatatccaaagcgactcaaaatcttgtccacttggtgggattgcacaagtgtaatcccaccctcatctcctcttagtagcttaatgttaaaaataacatcaacctctcccaaatcattcatttcaaaactcttggacagaaaatacttgacctcctcaatcacattgaggctagtcccaaagatcaatatgtcatcgacatataagcacaagatcactccttctcccccaccatagcgatagtacacacatttgtcaacttcgttcacaacaaagccaacagatgtaagtgtggtgtcaaacttctcatgccattgcttaggtgcttgcttaaggccatacaaggatttcaacagtttacacaccattctctcctgaccttctagtacatacccgtctggttgatccatatagatctcctcctccagctctccgtttaggaaagctgtcttaacatccatctgatggacgagaagaccatgagaggctgccagagcaagtagtactcgaatcgtggtcaagcgggcaactggtgagtatgtgtcgaaaaaatcctcgccttccttttgggtataacctttggccacaagccttgccttgtacttttcaattgtaccatcaggcctaagctttttcttgaaaacccatttgcatcctacaggcttgcacccatatggacgctcaacgacttcccaagtaccattagacataatcgagtccatctcactgcgtactgcttccttccagtggtcagcgtcaggagatgaatatgcctcttctatggttcttggagtgccatccacgaggtatacaatgttgtcatctccaaaggattttgcaaccctttgtcgcttactcttacgagtatctacaatgttgtcctcctcaggatttccctcaggcgtttgatcattgtgttctatcggtgcaaagtgcttatggggtatgacagtttcttgactagaagtgctaggtgtatttttcatggcaaattcattgtcaaagaatgtagcatctctggactcaataattgtaccaacacgcatgtcgggtactccatagtttactattaagaatctataacccacactgtgaatagcataaccaaggaacacacaatcaacagtattcggtccaagtttatgctttttggctataggtacatttaccttggccaaacacccccatgttcgtaggtatgagagatttaatttcttcctttcccattcctcgaatggtgttacttccttatgcttcattggaattttattcaggacatgacacgcagtcaaaactgcctcaccccaccattccttggaaagccctgcagtgtctaacatggcattcaccatctcagttagagtacggttctttctttcggccaccccatttgattggggtgaatagggaggcgtcatctcatgaataattccaaactcttcgcaaaaggatgtaaactcattggaaaaatactccccacctctatcagacctcaaccgtttgattttcctttcaagttggttttctacctcagctttataggtcttaaaagtaacgcaatgcttcatcctatgttttcaatagatacacataacaaaattaagtgcaatcatctaacagtgtcatgaaatatttctttccccctttagtcaacacgccgttcatttcgcacaaatcggaatgaacaagttctagaggtgcaaaatccctcgcctcagatgccttgtgaggctcgcgaagttgtttcgattgaacacaagtatggcacttagaacctttgactaaagtgaattttggaattaaactcatgttagccaagcgtgtcatacaaccgaaattcacatgacagagtcgcgaatgccacacattggactcatcattcttgctaatatggatcacaacattattattattacacacgtcatccaaagaaaagcggaacaagcctccgctgtcatagccttttccaataaaagtttcatatttagatacgacacatttattggattcaaacacaagtctaaaaccttctctacacagtagagaaccgctaactagattcttctttattgaagagacatgttgcacgttcttcagctgcacggtctttcccgaagtaaacttcagatcgaccgtaccaacaccgtgaacagccacaagtgacccatttcccatcaacaaggagaaacctctccctacctgataagaagaaaacagggaaatatcagcacatacatgaatattagcaccagtatcaacccaccaatcaggtgaatgaaaaacagagagaactgtaggtaataatttaccgtaccccgatgttcctctgccctcactaatgaccatgttggcagacttcctgtctttgcgctcaggacagtccttggcccaatgcccagacttgccacacacaaagcagtctccctttgcctttcccttgcctttcttcttaaaattggttgtagccttgggtttcacatcagccttgactttcttgttgttgtgggatgcatgagggttcttcttctgtaacatattggcactagaacctccctcaacctttttgccccggttgtcctttgccctcgccttctcttcaacacccaaagagccaatgagatcagaaacactgaactcttgtctcttgtgctttagagaagtggcaaagtccgaccaagaaggtagcaatttggcaataatgccatccgccacaaacttgtccggcaactcacagttgttgttctcaagttccttagccagcatctgaatctcatgagcttgttctactatagaacggtcatcgaccatcttgtagtcatagaactgctccatggcatacagctcactaccagcgtcggaaactccgaacttggcctcaagtgcatcccacatgtccttccttgaaggcatctgcatatacacgtccactatgttgtcagcgagtacactgatcaatgctccacggaacaggcaatccgaagcctcaaacttaacctcttcctcaggagagagaggtggttcacttcgtttaccccgtatgatgaggatgttaggtcccgatcttccaataggtattgataaacaatcgatttgggcggagtcgcgacacaactcgatctggcttctgaacgaacacgctactgagccccgcaatcgcagcaccacgtctcctctggttatcaaccgtgccgaaaccaggttgacctcgtcgagaaggctaatccctgcatgcgaatcgaagaacacaagcaagaacaagatagattgcaaccaaattgcatatgaatgattaagcacacgaatttggggttccacaaaccgatctagcggcgaaactgttcttgacagaataatctaaggccctctttgtttaggcttgggcttatttgtctagacttttaagtcagcttattggcttatatgatttataagccagtgaatttaatgtcctaagtttagtggtggagtcatacatctatctcatataagccaaaaaagcttctccaacctagcttttggcttaatagtgttagagtggcttatggcttcaaaaaagccaaatgaaaaagctgcttgtttgttttggcttagacttttcgacttataagttgacttataagcctaaacaaacagggcctaagaaaaacccaactctaaacgatgactgctactgaataaatgtgattagggatgtccgagggttgccctagggcacacacccccttgggctaagcccacgacacaattacaaggcccaaaacccaaatcagattcggactggatgagatacgtgacttgttttgcatattcccggcagctcggtaggaatttcaacgtgggaccaaaaccatatgaaagtagactccataagctttccaacaagtactcatgagccccaaaattccttctagatcagcggctaggtccgtttgaagttgacgctgtcaggaggcctaaatccgaatccaaaacgtatacaatttgatctcttgtcttctatgggccaaaagtgacgtggtgaggtagaagtggacttggagaaggtcttggtttggtccccaatcaacttctttaatcatccatgcattagttacgctcggtctcttttccttcgcccaagcaagtacctctgcaaacgaaaacacacaaaattcattgtgtagcaacgtttgttcaaatatataacatgtaaatctaatgtagaacatatgcatatttatttgattaatacataaggtagtcatggttatatccgagctagttatgtcctcatcatcctccccttcttgattagaaaccgtcctcggtatcaccttttcatggagcgtattgtacttatctttgtctatcacaacatcctgtgcggaacatttcttgatggccatatgattggatcctaaaatctttgtagtcgaaaaaccacaacactccccttcttccaaaccaacctgtaagtcatttaactaactagaggaactagatagagaattacttatatgcatgcggtcctctagacaatatatttcatcatgaaaaagaggtatagtcaaattcgaacaaatatatactcgatgcacattatattctcctttattatcataattgccaataatatgaaaaatcacatcagaagggtatggcaattcaaacctagcaaataatttcttctctaaacagttgagtggacaaagatcatcaaattgaatataaccccaagtatttaaagaagatagcaatttaagctcttcattcttgctagcaatgtgaataacatgcttaaactcaacacatagtggcttactgtacaactaacatgttcattcactagttatggcatggatataagtgaaacatcgcacaactcttctttataacaagaaacataaagcaaattattttgtgacaaaggtattctaacaattgtttccactatgggttactctaatgtagcacaagtagtggacatagttggcacatcataaatatgcataccttgattagttgtagcaccattatcattaccttttttctcatcttcagaaattataggcgcttggtcaattagacattcctcaagcatgcatggagctatggataagtctttttgctctccgtctttcttctcttccacctcaacatcttcaacgtcggaggtgcagatgtagcaatctaccgtagcaacgtatgcccgttgactagggcaaatcttctgcacatggccaaatccatggcagtggtggcaccgaattctggacgtgcgtcccgtcgaagcgatagatgaggcactcttggtggatacctgcgaagaacctttacctgaaactgcaggtcgtggggaaggtggttttggcgctgcagaaactccggacgcaactggtcgcttgctcgctagtggggtcgtccagaaagagatgggcttgggaagccccaaagatggctttgctcgcggtatgtatgtgctcgccttattcttgacctgttgatcacgcccctgcaattccttcactgcaagcatagcaaactgaaacaactggttgacagtgttaaattccttattatctactatgtcctgaatcttgcgcctcaatcccatgtaaaagcgacaaatggaatcctcagttcccttcactatgctacatcgcatcaatcccttttgtagctcaccatagtaatcctgtacagatttatccctttgctctaaacgcatcagtttcttgcttaaatctctaagataagatggaggaacaaatatatcacgcatagctaccttaagttctttccaagtagtaggtaaaattccatcatcagctaacctagcccaccacatgatagcaaaatctttgaactcactactggcttgtcgaactctatgttggtcaggcacaaggtgggcactaaacttttgctctactatcatctcccaatcagagtatttctcagcatcataataacccgaaaaagatggtattttaaacttaaccttagcataaggatcatcgggcacgcgattattgttaccttgttggtatcgctgattttgagcgccacccatacctgtcatagcaagcacaaaaacagcaacaaatagtgaaggttatccctaataatctgctacgcggtgtagtggtgcctctcaacaactcaggtaaatggagcaccttaccaagctcttataagtgtcttaccagcaatgctaaggacggtacaactggtggctggttcgtgacaccttgaagcatgtgatgtgacgattgcaaggatcaaagtggtgctgaccagaagtatatatgtggagcttgggaggcacaatatatagtagcaaaggaacgcaattgtactaataagaaaatgcaaagttgaataatagttcaaagtactagtcaatgtgctagcctagcctagactcaactctagctcaagtaagcacccgacaacactaaggactagatatgaatcaatgtacaactttgcactctcaaaacatactcagagaatgaatgattttttttctttcttggtgcggctttttttaagcacatttttgccttttttttcttttttttttggtgcggctttttctttcttttttttctttgcacctttttgccttttctttctttatttatttttttacttttttttcaacaagaacttaccactgactttgaacagggactcaaatgtaaatatcaatattacatggactcaaatgtaaaatgcaaaactaaaattagatcatctcaaaaatggaatgctccaatcttccatttttataaaaatatctcaaaaatagaattaacatgtccattcattagttgtggcatggatataagtgaagcatcgcacaactctttatcacaagaaacatcaagcaaattgttttgtgacaaaggtatttcaacaattgtttccactatgggttgctctaacatagcataagtagtggacatagttggcacatcataactatgcataccctgagtagttataacaccattatcagtatctcttttctcctctttagaaattataggtgcttggtcaatggaacattcttccagcatgcatggagctatagatagatctttttccacttcgtatttcttctctttctcattaccttggttattctcagatgcctgcaaaatattagtgtccaaaacaataggcacaaaaatacgttcgttttgtaattcagacttagttgaagacatcacaatagcatctttcttggtatctctgaaaatctcatcgattccattcttcatcctttgaatattattttcgaaaatttcagtaaaactcatgggtaccaatttcattttccaaccattatgtctaaatgtgcatgtgttagcaacaaaattatgcgatccattattatcatatacctatggttgaccaaacaacaaagaacatgcttgcatagggacaagatcaaaattgccagtatcatggtaatttccaatcgaaaagtttattctcacaattctatttaccttgaacttaccacaaaagttgaaccatttgatctaatatggatgatgatgcggttgtgtaggcaactcaagtttctcaaccaaatctgaactcacaaagttattgcaactctcactatcgattatagtacgacatgctctatccttaaccacaaactttgtttcaaataattcgtggtactgccattgctccgctttgtccatttgagaacttagcacttgttgcacccatgtactttcatcatgtgcaccttgttggtatcgctgattttgagcgtcactcatacatgtcattgcaaacacaaaaaacaacaacaaacaatgaaggttatccctaataatctgctatgcggtgtagtggtgctcctcaacaactcagccaaatggagcaccttaccaagctcttacaagtgtcttaccagcaatgctaaggatggtacaaccggtggctagttcgtgacaccttgaaggacgtgaagtggcgattgcaaggatcaaagcggtgctgaccagaagtatatatgtgtagcttgggaggcacaatatatagtagcaaaagaacgcaattatgctaatcagaaaatgcaaagttgaataatagttcaaagtactagtcaatgtgctggcctagcctagactcaactctagctcaagcaaacacccgacacccctaaagactagatatgaatcaatgcacaactctgcactctgataacatactcaaaggatgaatgattttttttctttcttagtggggctttttttaagcacatttctgccttttttttcttttttttaggtgcagctttttttttcttttttttttctttgcacctttccgccttttctttctttctttattctttttttaacttttttgtcaacaaaaactgaccactgacctcgaacagggactcaaatataaatctgaatattacagggactcaaacgcaaagtgcaaaactaaaattggatcatctcaaaaatggattgctcatatcatgtaggttccacttttataaaaatatctcaaatccactacttaacagatctataaagagggaaatacggacagtcacggatagatctgatctgatacggagtctctcctcacgcgcacacagtactcccctcatgcgcacagtacacgcgcaaagtacggcaactccaaaaccgtttgataaaaatttctctaaatcacaaaaacggaaacccgacgacaagacgattcaatttttcaaggtcccagcaacaactgacgagatgaaaaactggacccaaaactgacgtacaactcacacacttgagtgatgagccctagacctaagtgatgaacagatgcaatactcaaaactaaaaattaaatctaaaactaaaccagcactcgacatgacgatgcaacctagaattcaacaaagcaaaatctaatagaacaatgcaacggctcaaattgtctaggtaaagaataaattttttgtgtggcaattttctggttatgggaagataaattacctaacgggcaaccgcgctctgataccaacttatgagggagttaggtcccgatctttcgataggtatagataaacaattgatttgagcggaatcgcgacacaactcaatccagcttctgaacgaacaagctactgagccccgcaattgcagcaccacgtctcctctggttatcaaccatgccgaaacccggttgacctcaccaagaaggctaatccctgcatgcgaatcgaagaacacaagcaagaacaagatagattgcaaccaaattgcatatgaatgattatgcactcgaatttggggttccacaaaccgatctaggggtgaaactgttcttgacagaataatctaatcaaaacccaactctaaacgatgacggctactaaataaatgtgattagggacgtcctagggttgccctagggcgcacacccccttgggctaagcccacgacacaattacaaggcccaaaacccaaatcagattcggactggatgagatacgtggcttgttttgcagattcccggcagctcggtaggaattttaacgtgggaccaaaaccatatgaaggtagactccataagctttccaacaagtactcataagccccaaaataccttctagatcagcggctaggtccatttgaagttgatgctgttaggaggcccgaatccgaatccaaaacgtgtagaactttatctcttgtcttctatggaccaaaagtgacgtggtgagatgaaggaagacttggaaaaggtcttggtttggtccccaatcaacttcttcaatcatccatgcattccttacgctcaatctcttttctttcgcctaagcaaatacctctgtaaacaaaaacacacgaaactcattgtgcagcaacgttgttcaaatatataacaaataaatctaatgtagaacatatgcacctttagttgattaatacataaggtagtcatggttatatccgagctagttgtgtcctcatcaccgtgaaacatagaagcattgcatcactgtcaaccacattagtgcacgtgttttccacctcttataattagaaccatcaaatgcatgtggtttcagtgcagcagcaaagccaactaccgaaaatgacctatcaggtttttggattgttagaaatatagtcatatttcggcatattttaatctaaaatattaagacaataatcatggcatgaacaatatggggtgatctagtgataaaatctaacataaccaggagcatgcttaagatataataagcatcatcatcatacaaagaacgcaatagaattgcgactaacatagatatgaaaaaaatgaaataacagtaagcgaaggttataccctgtgaatgtccctccgctggattgtgtggcagaactgcctccgttgatgttgtcgttcgcagcggctctggctcccggcgtgccatctctaggtgcggcagtagcagcggcggcggaagacattatgtagcagacgacggcgacgaacaaaagacgaggagcagtcgtgcggaagcactccccaaaaacctgatcacccgcctacccgatgcagatctcaagcaaaggtgtggttccgaaggccctactcgttccaatctctcgtgcgcgcaagcgatcagaagcggggaagcagaacagtagcagcaccaggcgcgcgcgaggaggaggaagaacaccagatggaaagtaagcagcggaatgcgcgcgcgaggaggaggaggaagaacaccagatggaaagtaagcagcggaatctgatcggattagctctttccttatagcgcaggagcgatatccgcccgttgccacagtaacgacgcgagatcaattggaattgaatcacatgcctgttacttttccttatagcgcaggagcgatatccgcccgttgccgcagtaacgacgcgagatcaattggaattgaatcacatgcccgttacggagggaatctcttggaattgaatcgcctgcccgttacagaggcaatcttgggattggtccgttgcaaaaggatagagataggtgcatcgcaacgcacgcctcggcccgacgcgcgcgcgcgtgtggctttccgatccccacctcaaccgatcaacagggagcctccaataactccctatttaagttgagatactcctcgtttaattcccaaggtggtattattatccttaacatttattatgggcctttgagatttaatagaataaatcgggcctagcccatttattataacagcgcctacatgttcgaggagtgtgggcagcccaccgacaacgacgatgatgcctccccatgcccggcaactttcctcgccatctcctctgacatcttccaccccgtcatctccgtctcaggcgtagacatcgtgctgcggatgtggagagctacttcctcaccagcatccgggattccattgctgacatgacagggatgacgcccaacctattgatgccgtcgagaggagttggggtagagagattggggatttgcggtggagaaggaagaatatagaggtggaggatgatatgtgggcccacttcatttttaattttttgatgactaggatgccatgtgagcgccacgtcagcgaatatcattatcaatactgttataggagtcaaagtacatcagatttaatatttcaagaatcatgatatccgttattgcggttaagggataagaattagattaggcctatatttgacagtcaagtggcgctgtggacgccttcatgtgctgtgcaggttttttttaatgttacattcattaacatcaatatgaatatggaaaatgatagaatgacttacattgtaaaacggagggagtataatacatgtgggcgctttggcaagaggcgagtggatacagtcacagaaatgttaattctttcgatttgttgatagatggcaaaatttatgtgtttctattcacttatccacaggcggggataagtttctacggtcccaaacaccgccagacaattaaagaacatctgaatggctatgactacaattaaagaacatctgaatggctgactgataggcagctaatcgctaatcagctcaacgatctaccacaaacagccattactctcaatcgaaaaactattttagatacacccccgtgtaatttcttaacatctgccaaatagcaagagaaacagagttccgtgtcaaacccaaccaacctgcatagcatatatcaggattttcgttacatgagaataatacaccagtgtacatggcaggaccagtactgactaaaaggtcctggagtatttcttgatctcatataagatagaggatatggaaaccaggtccttgttgagagcagagccaccattgatcttcttgacacactcggtgatccttgtatagtacagcagcagctgcgtgagtgccgctttcaggatctccattccgcagaggaagttgctaaaagatgtaatgacatccttgtgcataagctcaattgcagctttccaccgaccggcaaaatccttgactaatggctcgacatcactaacactggccttgtccgagcttgatgctgtgtcttcagctggtaaaacacacacataaagatgagatgccgttgcaaaaaaaggaaccagcttgatgttgtaacagggatcaacttacacgggcgagatttcacaaatttgatcaaatcactgaaatgctccagtagaagttcctcctgcataaatatttgttcattatatcagcttacccctagaaaattttaactatccacacagctccctctttacaaatattgtcaataaagttcaaacgaaaggagaaaaaatggacatctgttgccagtattaaaaatcaatgggactagcctctgattggcttcgtaatcctaagaaaagaaatactaaactgacagtaggcctcccactattttctctggacatgtaaaaattctagaatcaaatggaaaatacagaggtcgtactaaaataaatagactaggacaaacggcaagtggtcacacaacacatcacggtttggtgccctggcaagttaggatgcaaccaaatagcccctaaacagatgcaaacaggtaccccctaacacagtaaaaccaatgaaatgtgcccacgcagaaattatattccattatttctatctcagagggcacattgcataccacatatactgaaatattgctcttaagaacctcctcaaagtgaacttgtgcttttccaccctcagtgccagcttcctgtatgacagctcagaacaaatttaataagatgatactagtagattgcaccacagtacaacttaatgaagcttgaactttcaccgcctaccttcagtatggaaatcgttaaatcatagttgtttatcaggaaaacagtttgcaacttttgtttagggaacatcttagccaacttaacaagcaattcctcaacagccatccgcaaccgctcgagattaagatcaagctgcagatataaataacattatacaattcccataagccatataaaggggttgcttatcgcatggaatgggaatcaataattcttttcagaaatcgggttgagttgaatttgataaactaacctgaccatctccatattcaacattgagatgcacgagggatgctgtaaattcagcatatctcctcatgacatagtgaggatgaacatcatcctcccaaagagtcttaacatttgcatttcgtaagctgttcaaatgcaaatcaaacaccatcttgaagcgaggccagagtgataagttaacctgtgcaagtgtgcaatgtgcacaaatggacttgatgaatttgaaacaaaagaaagattcatggcgaagcattggctatccaacatagtgacccttaaaaaagtcgatacaagtataaaatttcaacaaaaatgcgacaaagcacacaccttgtctaagtaagagtccaaacatgggattcgccgcttaaacatgattagctgcataaaacatcaattccacttagatttctcacatataacaatataaagggttctacctaaaatggagagagagagagagagatgtggcctccttcaaagcaaggacagtcaacaagggcatgaatggtgatatttctaagctgcttcaataggtaactcaaagcgtacctgatgctgatgaattattcggatcataagcattatgccgattgcgtcataacagttcaggagcacagcattgaaatgttcatcaacaacttggataggtcctaagggaaaagtaacagacatcacttgtttgatgtttatgttaaacatttaaaacacatattcattgtctattttcaggtagatgacagtggtaatagtataaaatggcttgacttgatatattcaattaatcagtttggattatctatgacatggagcatttatatgtcagacatgataaaataaatggattatttcctaaagttaaataaaatgaacagatagtatattactttggttactagtgtaatgcaaagcatattcttattttctatcaactctgaaatcttatcctgcacattttctaaatgactgagaagagttatgctcacttgctcagccagaaatgttcataacaaagactggacttttaatttcagcaaaatttaaatcagggtaaccacaaaacatctgaattaagattggccttgacaaactaaatgtatggtagttattcaagccactgtggcagaacaatattgatcaaagtatgtctcaatagtatgaccagcaaaaacaggcatataaatgtatggtagtctttgcacgcattgtgcttcctacgggtaaaggacgatgtaaaagcggtttgggggagtatctacgcatctttgaacttcaggttctaaaatgccaactccatctgggttgattcataattttaggtggatcagatccaaacaggatgtaatagccacatggaccactatttacaaataataactgccttgcggtttgagccatcatttatgagtgtcccgtcacatccctttaaatctgatccatccaaacctcatcaaatggtaaatatgaatgttcattcacatgctagaactgagcgatggatttacactagatgcttctccatttagattactacatccacataagatagacattcaaaaataggacaaaacaaacctgcaaatatgtcattaaacagtgattcttcaccaaagaaatcatcagagaaaaggtacctgcagttagtggatatctatcaggttgccactcattcaaaagccattacgaataaaaatacaagggaaatcaggcttactctgaagtagctgtatcaatcaaaagtttttgcaagcttctgaaaagaacttcatatggatatttttgagacttggcttcagctatgtgaggtatcaaggcaggctgatcaatttcctgacattccaacaaaagcccacatgacagacagaaatgatgctactgtgctgcttcaacaataatatggtactcaaagttcaaaatggcaagatcaaaatctaaataaagttaggtgatgattctgtccaaaactgcaacgaacatatataggcatgaaacagtcaatagcttctgtgagaagaattcaaagcatgttaaaataattctttttggtacaacaagcaacaagattttcttgtctgatcaactatggcaagaacattgcattcatagaatttgactggatctattacagtagagaaatgtatccacaaatttgattatggtgctaactggatcctcaatccttaaatttgtgttggcatgtcatttgtgtccctaaacttgggggttgcatggcacaatcatgttactgaacttgtataatcaccataaatggtgtgggcaagtccatatgtcttgttacaatgttagagacaactcaaaatgtgaacaagacaggactaagtgtctggcaactagccacatttactctaggattatatttatggtcatgtgccaattatgcactataagatgatttacaatgataggtgtctcgtggcatgtttgaccgctaactaaatagcttgttatgttagtccattagttcttgttggaaccttatagcatcacatgacccagtttagctcccagcctccgtgtcatgcttaacaagtagaatgcagttgaagacaaccataagtataggatcgactgattacagctaacagtgaattacttgacaaactacattatcaaaaaaaaaaaaatctaaatgtcagttggagtgtcaggaataaaaatacctttaatatgtttatcctttcacccaaagcaaagacagaagaacgggtcttcagagattcttttcccatggagaaaaggaatcctgtacttctagtttcaactccaagtaagtcggtagaggttgctatgtccagttgtagtttctctaatgcttgaatatacgcacggaaatgtgcactcagcacctgcaaattggtaatatggtaaaaatgtcaagaaagcatttgctccaaaatatctaagaagacacacaatgcaagtgctcttgttattgttatcgactagtacactgcattgcacaagtcaaaagtcatcgcacacagactagtagtgttccctaacctatgcagaaagtttcaaaagtatgtacatatggaattatttttttatgagtaaggttgataccacaacaagcacagcagtacatacagagaattgcaaaaagaacagaatgaagaaaaacggacagggatgcaactgtaacaatccatcgcccaaaagtcaccaatgaccaaaccccaccttggggaagcagcacaagcgtgaaaaagctagcttgggcctttgaactctttgcctaggattaacacatagttgctaaatttggaccctcaagcatgcctgctactactctacactttgtacagcagtgcagtagtaaaccttaccctggcaatgattgggacacaaagctggaccaggatccaggtcatacattgataatctaatacctattcacaccatagctatgagatttattataacattcaccttgttcatggtatcaatataagctgcacgaacttccgcatatatctccttagcatgttccttaagaaaaactatcgtgtacctgcaatggggagcccaaacgaaaatcaagaaattgccccccagagagagggagagagaagaagatttaatcgcatggccatgtagaggaacttaggctcagattgcagttctgcattgtgctgcgttatgcatattgtaaagctatcaaacgaaaaattaaaatcaagtatacttgttttataatcaaactaaggttagacaaaatatattatccaactatcacgtctctccaagttgttccatatttttagaacacaataataccgttgtttgaaacataatattattatatattaaatggaaagcaatttgccagacaccaaaatgcctaaagcagttgcaccaaataaaaggataacaatccgctgcaatgccatacggagacttgtaggcacaaggtgcatttgatgcacttggtccacaaatcacatttagtgcaaggtacaaaaattatacgagtgtcagaaacatgaggcacctacaacaagaacataaaaaagaatcctgctaaccccatctcatccctctcggtctccctttagattcatgacccacaagtttgtctttgacttcagactgaatctgagagcatggaaaatggcattgacccatgatcccaatgactatccatagaacattgctcatgcaagaactaaatgtggataaaacaggatcagagaagaccattttgcatacttgtatttaagaagaacactctgctgtagaatctgaatatttgttttcggttttctcaaggcatagaacttttggatgacaaattcaaaaatctgcaagaacaattatgaacgcatcagtcatcagccataaaactctttagtagctttctgcaattggattggctagatataaaaattcaatcagcaggatgccatgaatccagggacgttttattaaagttcaagttcatactcatgaataaacgagacattttttttccaatcttgccttcccgaacatatgtaaagcctgataaagtttcagagaaatccagagggacattgatgtgacttcttacttcaaatgaccaaatctacaatggcttgtatttgctctggagtacgctatcaagtatgatctgagcaataaacagaggtagcagaaattagggcaactcctaattttaaatgacccatatggctagtacatttgatggtaaagtgacacactggttgccatcaaatgtaccagataaattattagccaacatagctgcatctttcttagtaacaccaaagtggttgccatcaaatgtaccagataaattattagcatatcattctagttaatggtggacataccaggcactttcaattgactcatttctatgatattactgagccaattatctctattgaactgagatgacatagcatgtatgaactaaccagaccttgcaaactcagaaagcacaaaggcatgacacataatcccctcaacccacataaaacagatgctgaaagccatagattgtttcctataattattttgacaaaaataagcatgtacgaaagatgaaacgcacatacaccttcagcatgatataaatcctagacctgctcacactcataagaaactagaagtaataaactagtgattgttcttcaaacctttgagactgctttctgcctaagtctctcaacctcaggttgaacatcctttagagccttggacgatttaaccattgcatcaacttcaatgaacttgatttttctgcttagagtctcaagtgttttcatgtattcgtcattaacctgcagtgttgatgcataggtcattttcagttctcaaacaaattaatcagaattaactgcaaaagaagcaagttgactaggataacaaagtagatccttgggacggatgacacatcaaactaacaattgaaatcttctgttggaaaaaaatatatcaatcaaagacaaagaaaaaaaacagctgcaccaaaaaataattaaaaaaaggacaaatcacctacgaaaggatataaagcagttaaactgaacattctcacggctgagccagaagagaagaaaccattggcataatggcatgtttggatctcttgccaaggactctgtaatagtaataccatagcgtctaaaatccccttttcactagctttgtgtgtgtgcctctgtgattatgtgtgtgtcgggggaagggagcagacccacttatccatagcaccctctaacactctcttctttgccgcatgtaggattaattccaccaaatgactatatttgggccaccacttaaggccagggtattacaccttgactagtcagaattggctatctttcattgacaaggatctcctcgtccacaattactagtaaatacaatgttatgcaagaaaaaatgaggcatcctcactatcaggtagaagcaaggctacgcaagggtgggcaagagaaccaaacatgcgctgcataactacacatggtattggtaccatatcagaaagttgcaaggttagctgcaaacgaacatgaaaggaatatagtgatcacctctccatcgacaattatgtcaatcattcttggaggcactattatatcctcaacaaattttgacaatttagactctgcagcctgcagtatttccaaatgagtgagaaccaacattaggatcatcaaagataattaagcatggaacgaaagaaatatataacatgcaaaaagctataaaaactgtgaaacaattccaagataagctacttttgatgattcagatgacagtgactgcccttataatgttgcaaaaagggctcattttataatttctatgccatgtcttgtacttgagtcttgtctcattatttgataaacaaaaatctaaataacaaatcggtttgtccaattagttataacacatttccttaaaaaagatacaacacatggctgttccttcggtaacaatttatgatgcatgattatttgtcagaagtgtaagatagaaccttaatcgcatatgcaatattttctgaaacattatatcaagcaatggggtgatcattcatgtgtcgatatgtaaagaactattgtagtaacacagaaactatgtatgctctggcatctactcttgagatattggaaggtacaaattttaacagtcataaaatatccaagatgcaaccaatatatgctaaaccaccaatcccctagatatttcaaatcaaggacctagtatgcactcagatcagaaaagattgaaatggaggaataattggatatatgcggataaaatgtacagtatgaagtgaaccaaaccttacgatttttcaactttaatcccatgtccatagatttctcctgaaggacctttatctccgaacttatagaaccaatttctgtctaccacagaagtcaaaagaattgcagaatgacttagtgatcgtaaaagagtgagttacttttgtctataggtgaaagattaggtagagaaaacaggaaaaaaaaagtataaagacttttttggtttgagagggaacattggtcatccaattaaatgataagaaagagtaaataataagctaaaaatgttttgattcaattatgtcaatgaacttctcgcatggatcacatagtaaaaactagaaacattgagcatagaattgtgatacaggtaaagaaagttcttccaaggaggttgccttcatgttatttagttgacaaaaggacagcttaaaaatgcagagacatgatcctggtgaattttcaggtagctcacagtaggcagactcctctttgagaagaagttcagaaaccacgtgaattgctaattgatacaaagtaatactaaagtttgcacattccaaacatgatgataatatgttcagtataactactcattcagctagccagcacacaagagaatgccacagatagttttgtcagaacatatgagaatatgcttttacctggaatccagtcagaacagtttccatttgtgacaaaatgttatcacagtcacgaatctgatcatgcagcgataccaagttttcactttctccaatgtaatcctacaaagagggaacactacattttatccactgccaatttctatttatgaagcatcagaagctgaagatcataagtttttttttccacaacatttgtgcaattatttgatcaacgtaaactttctctggtaagaataggcaagtcattggatggattcgtagtcttatagccatctggcaaaataagctaaataatcttatttcaaaataaaataaaaccatgctgtaactgtattcctactcaacgtcaaattcaaactgcagttcatattcatatgtatataaaaagagcagctctagatcaagcatattaacttggatgattgacgtgaatgaccatatcatatataaatacctgtatagaatccagctcaatttggcgaatgttgttctcgacgccttttgtgtaatcacgcagtttgatgccgttagccaggatatttgccacttcctacatccacacagaaaagtaaaatcagcgatccacacacaagaaagaaaaacagacggctacactgtttcttgctcgtaattgataagtgagctcggaaagacaacaatgcagcacccagggacctgagaagcacgtagcccaaagagagctcaatcgccaagctcgttactagtctacaagtaacaaaaataaataagcatcggatcaacaggcagcacctcgtcgtccttgcagtcgtcgagctcctgcctcaacccctccagcgactcgtcctcatcactgtcgaaaaaaaaaaaccaaaccaaatgttattcaaaacagcgcgcaaaggctcacgttctcggacgttatccacgggacgagatcgggcggcgcggcatcccgtcaccgtccgtacctggcgacatcctcgtcgagggcgaggtcgccgaccaacaccccgaggtcgaaccgctccctctgcccgtcgtgcgcctcggcggcggcgggggcagcgtccatgtcgtcgtcggctgcggcggcggaggggctaccgatgggtggcgaggatgccggggatcgccggcggcggggtggctccgatccagatctaccaccggaggcggtggtgtcgggatcggatcggatcggaggacggacggggggggagggaagtgggtcggatcggtcccggcaaaacgaagatgggggaagaagaagaaagagagaggttgggttgcgaagggggaacggacgcgtattgggctgggctttcaagttaggaatttgtaggcctattgcagtccaggaaggaaaaggttcactccaagtccctcgtcttgtcgtctgagttgtaaaatcatccttaaacccaacgcatctgtaatcttataaatccgggtcagttacaagacagtattgcttccgattttagctaacgtgacgagctgacttcgatcatccagactgagtcagagaccgagacccacatagcatacatacaaaatattctacattagaccagttcttcctctaccacctttcctccatctctcttctctctcctcagctcacgattttagcgagcaagctatgccgatgatcattacagaggcctgacgaggaagcacataatatgctgcaggaggtacacagcctcgctaagctataacggcgagtcggcgattaaaaaaaaaaagtgttccagtgtacaattaattcgttctatatagattcatttttcaagtgaaaaagagccttttgtaactctttatgtaacaccttgactaccattaatacaatagttataaggtagagtctctctacctttttcagtcaaaaaaaaaagtgaaaaagagacatatcagcgtttttacaacagcagctatatttgttacagctccttgcgtacaacactttgattgatggattgcacaaggaaaaaagataaggcattgtttagatcaaaaaaaatttagccaaaaacatcatatcaaatgtttggtcacatgtatggggcattaaatgtggaaaaaaacaattgcacagtttgcatgtaaattgcgagacaaatcttttgaacctagttgtgccatgatttgacaatgtgatgctacagtaaatatttactaataacggattaattaggcttaataaattcgtctcacagtttacaggcggaatctgtaatttgttttgttattagtctacgtttaatactttaagtgtgcgtctgtatacttcaaaaactttacacccaaagaactaaacgcatcctaaagctgtgtttggatgcccttttcccaacccctctctctcgttttccacgtgcacacttttcaaactgctaaacagtgtgttttttgcaaaaaaaaaatgtttctatacgaaaattgcttaaaaatcaaattaatctatttttgaaaaaaaatagcaaatatttaattaatcacgtgctattgtaccgttatgttttccgtgatcactgttccggatgggaacttattctagcgaactgagcctactccctccgtcccaaaaaaaaaacaaactctgagtttccgtgtccaacgtttgaccatccgtcttatttaaaaaaatcaaaaagacaagtcacatataaagtattaatcatgttttaccacctaacaacaatgaaaatactaattataaaaaaattcatataagacggataatcaaatgttggatacggaaacccaggtttatcttttttgggacggagggagtaagtatgttccaacttccaagagaatgtactgttcgtatacatgccccgtacgtagctatctgtcgtatacatccccacacgcatcagagcaagtttaatagtatagttcactactaactccaattcatttattgccaatctaatagtcaattcatacaatagttgcttactatactaataatatatggtcccacctgtcatacacatattacgtcttatagtccgtgttgtaactggctatagatctatagcccgctacttttctcttttatcttttatcttattaaaatatatttgtagttggttaatagtctgttactatacctgctctcacgagacaatgcatatatatgtgcatgcatgtgccagcctgcttgttggtttgtagtggcagccgttttgttggtttgtagctagctcggcatacgaccggctgctaagagcaaaagtttaatagtatagttaactgccagcttcaaattatttatagctaatttaatagccaattcatctaatagttgtttattatattattaatatctgatctcacctgtcatacacacattacgtcttggagtccgtgttacaactggctacaaatgtgtagtgtgctactctttcctcttttcttttatctctttaaaatatgtttatagctggcttataatctgttattgtacctgctctaagttcgatcgtggatgatcgatcattcgtcaaatgttaccacgtccagtgacttatccatggttcaccttactataaaaaatgatttttacggacaactcctttaattttgttcaaacggaccaaagaaacccgtatgtaaaaaggttgggaatatctgatcccgtatgtaaaaagcttggaatatctgatagagggcaaacttgtgaaaattgtttttttaagatagacctcttaacaagcctacttgcaaaaatcgacctatttacacagacggacttgttaagagacttgtctacgaaaatcggtggatagcatgaccggtcacaatacttcccctataattttttaatcctcctagataaaccctatctctctctccatgttctttgctttccatctatagtctcgcatccctcatcacctcccattcctctctctcaccccctgctcagtgggagcgcagctggcgatggcaccaccagtgacgaggggccagaggcctcgcatgtgcacggaagtgacaatggcgccacattattagcatgggagcagcggcggcgatttcgtcgggacacgctgcaattggctctagtgacggcacccttgagaggacatggtagcggtggcggcctcaggagtggtggggcacggtggcagaactccggcggtggcaagccaccacacagcgacagatccaccaccaccgaccttgggagtagcggggcctcagcggtgacgacgatggtagatcgaagctagggtttctattttttttgctgcaaaaatcactttttacacatgggtacatgtatgttttttacatacacctagtgttaggtgggccgtccacccgttcgcaaagatcatttatgcagtcgtcatgataggagatggaaccatggaggcatatatgcaagtatttggccaacatgtccaatgtccaccagattgggacgtcaatcctacccgtggtatgggtatattaccgtgcgcctgatatttacgtacgctggtttaatatatttttaaaaaatttgctacatactccctccgtccccaaggttggctttttttttttgagggagagagtaatatttagagtttgtggtttttgttattgaacaccttaaaaggcatgaaacgacttgtcggagaacgaatctcctctagcagggaagcaacgaacctcccaaaaaaaaacaaaaaaaaactcctcctttcatgattcaaccaaagggcaatttgagatcgagcctactttgtgtgatgaactcaaaacacaatcaagtatacttgtgtgatgagcggtgagccagatatgttcctgctctgtccgtgctcgactcaattcattgtcaaccctagcgatttccattaatgcaatgactatatgaaatgcaaagatgtactatatgactactagttggatgcacaatagtgctactatggaaccccttttcccctctaaataagtagcgcatccctaggcaaaatgactttccaataatcacagttagtaagggatgcatgcatatgcatgatatagtgatgtctgttaatcgtggcaaattggcaatgcaatttgttgttgaaaaataccaagatgccaatactacgcccacttcccgcgcgctctatataaagccatgcgctcccatcgcttcttcctcacaaactttccctcaatcagtcaatctgtatacagcaactcagcgatcttatatttacccaacacaccatgagagcgctcgctgtggtggccatggtggccacggccttcctcgcggcggccgtgcatgccgagcagtgcggcagccaggccggcggcgcggtgtgccccaactgcctctgctgcagccagttcggctggtgcggctccacctccgactactgcggcgccggatgccagagccagtgctccgccgccggctgcggcggcggcggcccgaccccgccgtccggcagcggtggcagcggcgtcgcgtccatcgtgtcgcgctcgctcttcgaccagatgctgctccaccgcaacgatgcggcgtgcccggccagcaacttctacacctacgacgccttcgtcgccgccgccagcgccttcccgggcttcgccgccgcgggcggtgacgccgacaccaacaagcgcgaggtcgccgcgttccttgcgcagacgtcccacgagaccaccggggggtgggcgacggcgcccgacggcccctacgcgtggggctactgcttcaaggaggagaacggcggcgccgccgggccggactactgccagcagagcgcgcagtggccgtgcgccgccggcaagaagtactacggccggggtcccatccagctctcctacaacttcaactacgggccggcggggcaggccatcggcgccgacctgctcggcgacccggacctcgtggcgtccgacgccaccgtctccttcgacacggccttctggttctggatgacgccgcagtcgcccaagccgtcgtgccacgcggtcgccaccggccagtggacgccctccgccgacgaccaggcggcgggccgcgtgccgggctacggcgtcatcaccaacatcatcaacggcgggctggagtgcggccatggcgaggacgatcgcgtcgccgaccggatcggcttctacaagcgctactgcgacatcctcggcgtcagctacgacgccaacttggattgctacagccagaggcccttcggctcctaagcttcgcctacctagcttccacacagtgataaataatcactgatggagtatatgtttacaccatatcgatgaataaaacttgatccgatcgacgacgatgatcagtaatgcacgacgaagcgattggtaaaatataatgtattatatggaaagaatacagtaccacttgattaatattgtatggaaagaatacagtatcatcgagtggacaaaaatcggagagcgtgaaatcatagctactactaattgatgtgcagcatacccatgaaagatattccgatatacatcaaaatgggattaattcagcccaatcgatgtacacgtccacgtctaactatggtaatcaaacccatgaataagaacttgtagtctcttaaaatactacaacgataatttagtccgtatatttgttttgcattaaaatattattatattttttattaacttgattaaacttaaaatagtttgactagaaagaaaatcaaaacgactcataattaatatgaaacagaacgagtagcaattattgacactatccaatgtctttcttccttcgactggttatgggcagtcttcggattactagatccttcagaaatattttcttcatgtttgggaattagttatataacgggatgatgaatgggaagtggattttgatccctcgagggattccctcattgtttgcatgtcactcaaatagttatgaaaaaaatttgacaagatgtattaacatgtgatatatcactctgcaaatatgcaagttcaaattcaacttatacatctcgcaatgaaaaaaaacaaatttaattgtgaatatatgttaactacctatggtttaatttgtttttcgttacgagatgtagaagttgaatttgaacttgcatgtttatggagtgttatattacatgttaatacatctttttaattttttctaatttttttataatcatctaagtgacatgcaaataacaatgggatattccctcgaggatcaaaaatagtttccccgatgaatgtaaggtttgaggatttttttttcgcgtggctgctttatgttgggttaactaattgtgttgtttctgcaatagcaatgacacactatacttttttgttttgcactacgtctgtcaaaaaaaaacaatatagtattggatatgtggcgtttcttagtacaacgaatctgaactattatgttggtttttttttacggagggagtatgttgtttggttaaataaaaatgatattgctttttagaaaagacgaaaaaaaactgcatgtctaaccctataaatggctgattttcatgtgttatttggatgagtacgtttttagtctttgctcaaaatgaggcatgacaatcagtcattgttacgtcaagtctcacttgttggagcagacaacaatagaggtgttcttcaatggtgatggacagagacgtggcaaccggatttgcgaaagttgtttctctttcatatcgaacttttgccaaacttgtttgtgtggtacggtagttctactgtaatagtgttgatcgctgtgtataccatggtcagaatgttttgaaagaaatacgaagaagggtttttttaatcattatatatcctgtaattatcatggaaaacatttcgttttaatttggaacggggggtgaaatagctgagtggactaaatagacagaaactcagaatgtgatagatagatgcatgcatgcatgtatgcgttcgtggaattccatcgatttctggcagcaaatcaaagatgcctgcatgcgaacggcaaggtgcagatgaagtgatgtagaagtagctagctagtcaacgaggactagctatagctagcgctagttagaccattaattcacaatgctcccatgtggcattcaacctaggcacaccgaaccgaatattcggtgccatttcctccaccagcagagcttttccaagactgcgtagctctttgccatcggttcctcatcagtttttcaggaagagagaaagagagaagaggagagggatgcgtcgtcgtccccatgctccacgccgccgcggggaggaggacgaccggacgccgtcctcgccggagaagctcgccggctcaatagggggaaagcgacggcggcggtgaagatcgatttggcatcggcgaactcagagagagaaagaggggaaattcggcgagttgtcactccgcccggctccgcgaggaccaccgacggttgggggagtcggccgcgtccgccggtgaggttgacctcgatccgcgccgctgggagctcacccgccacgctaggcttgatccgcggggccgcgtgaggccactccatggacgtcgtcgccgagacttgcctcggggtcctccgccgccgacgatgtggggagtggggactggcagtggggaggagaggccccgctcgggggcgtcacccgagaaaggggaggagaggcgctgcccgggggaggagatcaggctccgcccaggcggccggggcactggcgtgaggggaaaaggaagtgggtgtgaggataaggtgagagaaatgatttttttatagttgtgtggatcctgtttgaggctacatagcactgtgaaacttgtgacaagtattattcttcttgtgtttttatcctatgtggtagccccaggctctgcaaaataggtggcgcactgctaatgccattaatgcgcagagcgcggccagcaggaacaataatgcccacgtgcatgaaacatctcaaagtcgtcttgcactgttgcattaggtacgtttacgtacacagtaatactaattcattatacatactactactagcaagagctagagctagctggatatttaccgcaagtggtatattacatggtcaactagaccatgtacggaagcaattcgcccatcgataattagggtatgtttagttcacgaacgaaaaatttttgatatgtcacatcagatatacatgtatatatatttgaagtattaaatatagactaataacaaaataaattacagattccgtctggaaactgcgagacaaatttattaagcctaattaatccatcattagtaaatgtttactgtagcaccacattgttaaatcatgaagaaattaggcttaaaagattcgtctcgtaatttacgaaatctgtgtgattaatttttttatatatatttaatactccatacatgtgtccaaacattcgatgtgatagggtgaaaaatttttatttaggaactaaacaaggccttaagctagagggatatatccatgtcctcctaatcgatgcggaccaagtcgaaacttgacatacacgactggctagctaggattaaattaatgcaacaagatatgctactgtcaacagtcgtatcatccaatcaggcgagagttatgagagaaagagagagcaatgtgtgtaccgagccatctagatcttataaatatactcctaaactaagacttatgatggcatgagaatggaggcccccgtgcgctcgtgaagagcaacacgggcggcgacccatgccgctgcaactccaacccccccaccccaccccacttccctcccttcccccttgccatgccgccggagccagcctgggcgcagtgatgatgcaacggcagtcgccgccggtaatggaggatgaagtcgtgggcggtatggttggatctgtccagatccatcggtggcgcacccggatatggctagttaggggcgggtagcatcacaaaccgtataggtggtgggggtagccatggtgtcaagctggagtggaggaggccgacggctgctataggtcgggctagcgaccgagctcttggaggtggcaacaacaggaattcttccttgtcgtggttaggcacgatggtggcttggagctagcatgaagggcagcggtagccagcttggcttagactaggctaaaaatagccagtcatggcggtggcgtggcttgttagaggaggcaaagctataccttgctgccagccagtcatggtcgatggtggtcaggagagataaaggtatagagggtgatggagggtcgcgtcccttgatgttggccgaacactctctctttttttttttggagctccacttctccttccgtggagaaggtagtagtgggataacaagggtaggcttgggccaccgagacatcgctgcccaaatctagactctctttgaccggatgtggcgagcaggctactggatagcggatcagagggatcctgaggtagtgcacaggggagcggtggcatggtagtaggcgctaacgatgaggcatggtggtggtgtgggttgtcttcctaatggttggcttgatatcctatctatttgtcgagctcctcccccctctcagtagggagctctgtaacaggatgaagaacagggtgaaggtggcgcatggaaagttttgggctgccaagacaacacaactccaaccgatctctccttggtcggatctggtgaagaggctagtggagatctgagccagcgtagcgaggagtggagatgggctagaaggcgttgatggcggagagcagttgcggaggacgtctaaccattttcccaacattttggatggacttccttcaatcaaccgtgaaaaaaaaaaggcttatgggccgttcagtacgtataattaattagcccaagcagcagctcagcccattcctaaccttgcacgcatcagttgcactgttctccatgtggtttagtcacgttgcctgaattattttggctcgtcagatcagagctgaaggacatatattggattctattttgtactgggactaattaaccataatatatgttaataaattttcacctgagaattatcaagtgtaaatatagtatagtcgtagtaacttatatattacaccctccatttcataatataaggtacaaatacttttaaaagttgtttcataatataaggcgtgtatacattcatgccattaactggcaccacttttccactaaaatattattatttaaatcctccaccatcaagatctctaattttattgggtgcatgcattctactccctctgttttaggttataagatattttgattttggtcaaagtcaaactgcttcaaatttgatcaagtttatcgaaaaatagtaatattttcgacccaagataaatttattataaaatatatttaattactaatttaataaaactaatttggtaatgtaaatatcattatatttgtgaataaacttactcaaacttaaagtagtttgactctgatcaaagtcaaaacattattagggtaatctaaactatgaggtgataataataattttttggtttttgggttaagggtggttgtgtcttatatttttgaatggagggagtataatttacatatataaaatataactttacaaaatcttgcagcaacacgttatttcccggaagcagaggttacagggctaaatcccctcatacacgtgttatgatttttttccctattctacttgcacaaatattgatgcaaatctaacggttcaaaaaagttagacacatgttaatatgttatattgcaattatatgtaagttatgatatgattatattgtgtgtgtgtgagagagagaaaatatgttggtagttacaaaatcatttttgaacagtaaaaccggatatgacgcatcctccaacttacaaaaccagtgcaaactaggtccctcggcggttttgactcagattttgttcaatgtggcagctgactcagcgtggaacccacgtgggccccatacatcagcctattcttgccctcccctctccacctctcttcctctcacctctcttcttcatgggcagccaacaggggagtagctgggcgcaggcggcggagcggcgcccgggcgagcgcaggcggtgggggaagcagcggcacgggcagtgcccggcgagggagctgttgcctgcagccggtgggcgtaggcggcgggaggaggagcgggcggcgcgtgacagagcagcgcgctggcaagcgaagcggccccgcgcgggcaggtgttgcggcagtggccgtggagctggaggtggggccaggcgtcatggaggtggacacggtggactcggagccccggcctactcccgcgccgcatcctccctctctccgcgtgctcgctgtcaacccccgccccatatcctccctcttcgtgcgtgcttgccgctggccggtggcatgggagcaagcgagctgtccgtggcgtcggcagcaatggcagcgcggtgtatgaggatggggaggaccagcgttgtcgctgcatcatgtccttgtcggcaccgcacaacgtcactgccaccgcgtcgccccctctcaccacctcggggctcaggctcgtgggctcgctgctggtgccagtgttgagagggggtcgccgcccgctggatgccggatgccacggctgctgctctggaccgccgccgtcgttggggtatgtcgttcggcaaagtgagagaaagtgaggagggagagaagaggggaagagagagatggtgatgtggcatcctaacatgtgggtcccacgctaactcagcgaccacgtcagataaaaccaggatcaaaaccactgaaggaccaaagtgaacggttttgtaagttgagggatgtcatacatctggttttgcgattggaggatgattttgtaactcgacgacaagttgagggaccttcgatgtactttttccatttgtacttacagtatcagatcatggaataagttcactttgtgaccctcaaaagtgatcaaaatctaatccgtgaccctaaaccacaaaaccggatatctcgacccccaaactcttaaaaccagtgcaatttgactcccttggcagttttgtcgacgtggcgcctacgtggtggtattgactgggtctcctttacacgtggcgtttaagttgcatttagaattaaaaaaatatgtgtgtgacccatttgtcattgacatagaaaagaaattgtgggacccacgtgtcccttctctctttccccttcctttagttccttctcccgcctagtcgctccctctctctcccgcggcgggcagcgagggtctgggcgagagccggcggcaggagggcgggcgggggttggatcccctttgcgaggagctgtgctgctctcctcctgttcggcgccgaataggagctggcgcgagcggccctcgagcggcgagacgcggaagtcggaggacggcatcggaggaaaaagagagagatgctatgggtgttggaggacgctgggtggcggaggcgggaggcacaaacggtggggtgcgaggagcttggccgcgccctgcttgaactgcagggcgccaccgaccaggactttgacgctgtcacggtacaggtacgcgtactaccctcctcccctaagtattttggtgtcgggagtctgtgatggtgccggcaccggtttcatgtcatcgggaggtggtgtggtctccttcatcttcaccgtggtggagctcagcccgagcgccgccgccatcgccgctccagtgcctgccaccgccactcccacgtctctgctgctcgcaggccgccgcgcctccgccgctcgccacggtctccgcccgccgccgctccggccctcgccgccaccgcgggagagagagggagtggcgaggagggagaaggaactggagggaggggcgagagagaagggacacgtaggtcccacaatttattttatgtgtcaatgacaaatgggttccacacatattttttaattctaaatgccacctaaacgccacgtgtaaaggagacctggtcaatatcgccttgtaggcgccacatcagcgaaaccgccctccaaaccgccaaggaagtcaaatcgcgccggttttagagttggggggggtcgagatatccggttttgtggtttagggtcacggattagatttcgatcacttttgagggtcagtatgtgaacttattcatcagatcataggcgcctagcattctccagtacacgggccttcactcaaagctcattcgaagctcacgctcaaatggggcagcaggccagacgatctagcgctttggcgctcctcgtcctcgagatcgtcctcacgaccccgccacaagtccacaacgcgcctacgccgatctcccagatgcctatttctcaataagatgtgcttctatgctttcaaagaaaaaaagcacgaaagttaaagcgcataagtggctcagattaaaagttgattaatggagtaactgtcattagcgagaggcacttttgtccaagtaaagttgagtccacgtcctggcacctcgagcagcgcagcgcagctcttcctcgtgagcagcgtcaatgccccttcccctcctcgcctcccatggtatggccataaggcccgcccggcctagacacggcccaaggcgatcaggccggcacggcacggtcggcagttcgtgtcgtgccgtgcctgcccacgggctgcccacggtacggtcggcaggccgtgccgtgcctgtggttccacgggctgcacacacacacacacacacacacatatatatatatatatatagctaatataagtctattttatgtccctacttgttggcccatgccatataatatgtgtatttttcatccctattctttgtgccgtatcttacatatggttgaaaataagtctgtttcacatccctgaacttcgtgtcgggtcctgccggcccagcgtgccaaggtaacagcccagacatggcactgccgtgcctgggccaggccgtcgggcctcgggccatatggcctcgattccacgcggcgcgtggaaccgcacacgcttttggctcggctcctttggcagaactaactatgtggcgctcgcctattaccaggccgcgtaccggttccgcggcaacacggcgtggctcaacttgcccgacaacgccgcatcccgtgggttgcttcacgcctccgtggacgccaagctctaggctgtgccagaacatcatggccgccaagaacgccaagtcctccatggcaccgcctccacttcagtctctgccactgccacctcctccgcgctcatcaacaactgctccttctcgtcctctggcaatgcaccgtccgctgactcatccctttccctgtcatagtcgttgttgatgaaaaacacgaggcctgagagatctgcttaactccagtgcaggtccaaaactcgccttcgggtatgctagcatgccagttgatttgatcctgcaatcaacatgaaataaagacaaagaaagaactaaatcgataaacgatagccgatcggctaagtgccgatgacatatcatttatctttgagccgatgtcatatatatacatcgatcgacagttataaatgaataataaagaactaaatctacttgatcggctgtagatattaacaatatataatccttatgtggatatatacttaaatcaagtgattgggatagatcggtcgccatgccgagacagtataaatcacttagattgaaatatatacaaacaacaaaactatatatgttcatagcatagccgatcagatagatctagcatgtatcggctagtactccgataccactctatattaagatattaaagcaagcagaatataccaaacaaaagcataatatacctaaatgcgataagatcttaatataaaggacagatttaacatgtcagtaaagcatataaaacaaatgtagttaaatcaggtaagatcggctgaaactccgatactaccctaatcggcaaccaagaagcaggctagagattgagattctaatcacgactcataagatcaaacaactgatgcagctataagtatgaaaagaaggacaatatctagacaatcaagccattggaagtttcatagagtggtagatatcatataatctaagccaatgttgatatttaacctaatcggctgccatctattgatagacgttagccgattgtaggttagatagcgatattgccagagattatataggatatatgataactctacgaattacataaacaagattagagtatcataaagatggaagcactaatcccgagaacgcaagccgtcataacaagttttacctcttgttgaagatcgaaaccgatgcagctcaacccgaaagcaagaactcgtcgaaataaaactaaagcaaaaagggtggcgatgcgccgagattgtattgaacgtatgtgttaattgattacatggggtgcggggtctatttgtacccgaaaattacaaactatgtccatatcggacatgactcctatctctaacaaactctaagatatcataagtctttatggcagacttttgccaaaacatatatctaagaaaattacataaaatatcctaagtaatatatacaattgccttctcaggattctatccatgcgtggcaatcatcttgaagcatatcaattcaacccgatgtcttacaccaagtcgtattgccagaatcggctgcatcaccaaaccaagtctgacttgaacttagccgatctaatcgtagccgatccggactctagccgattcctactctgtttctgcaacgatcttcatctttgattccgcttcaatctaatcctcatctccgatgctgatattaccaaatttggtcgttaacagtcgtacaccgccaccacgctcgagacgtacataccgcgccgaagcacagagatgcaagcctgcatgcgcaacagctcgacttcagcgccctttccctgtcatcgtcgtacaccgccaccacgcccgagatgtccatgaccgcaccgaagcacagagatgcaagcctgcatgcgcaatagctccacttcagcgaggcaccgtggggcgagtctgctgccttcgcctaaacaagtacccgtcctacgagatcgaccgtccgggactccctcctcaccatcaaattaaccaccaccgcttggttagtactcacatcatcgttgttagcttaatagccgccgccgctatgcagatgggattttagatattctgcaatctactgcaccgacgggcactagggattagcagttttaagcctcctgttggttggttcgttgtgtatgcatgcatagatctctctccagactagtagctcggttcttctgttgtactgtcatctggcttctcctgggaagaacaccaaccaaccctgtgatacagaagaaccaagccaatgatactgaagcttgtgtttttgtgttcggcgtacgtctctagtagttatccagtcaatcattggtcgatgctacagaagggtcggcgggccagcggcgctgtttgctgggggagccgcatggctttgcttgaggtgggcttgggctggacgtgtgctcaagtttccatggatgaaaatgcccctcaccaataacgatcactctgttaatccacatttaatctcaaccactgatgcgctttaactttcgtgctagttttttttctggacgagcatagaagcacgccatcctccaaactgaccactcggccatcaccagggactacacgagtaacaattcctcaccgacattcattttgtcataaaagtctggttactgaatctgctcccgtgcgcaggcgatccaggaggcgatcgcgatcccactctcgatttaggccgccatcgccggcgatcttgattagcaacaccggcgacaactccgatcacagtgcccacaccccgttttccgacctttgtcggcgacggccaccgcatatcgtcggttagccatttctggcgccaccaaacacaatttctcactaggggtagcgccgctaggaaccctagagtgggatcggttttggtgtgctagcctccaatcggtacgctgcatatcctatttccctccgatctgtggccatggccgcaatcgggagtggaccaccggtttatgccgaaagtgcacgttgcagatcagcttcagaacctcaacctgactacagaagaagaaaacgttgcggaattcagcgatgatgatgagactggagacccccaggaggttgaatggatgcttgttggcaaggtcctctcgccagcaatagtgcatgccaccacagtattccgggcgatgaaaccggcacgggggaatccctacggattgaagatcagatccatcgacgagaaggcggataacatttttgtcacgaaatttaaagttgagcgggacttgcaacgtgctttgggtggctcgccgtggatggtgggacgccacgtcctgatgctgcagccctatgatggaaacctcaaaccttcagtaataaggtttaatcgaatggagatctggattagaatcttgaacctcccactcggctggatgacaagcaccgtggcgaactcgctatgggattggttggcgtagtgaggaagttggaggtggactctgacggcaaagcgagtggcccttacctacgtggacgtgtggcgattgtggtggccaaatcactaagaagaggtatgcttttgaagacaaaaaaggatgcagcaccagaatggttttatctgcagtatgagaagctgccttattattgtcttgcgtgcggtatagtaggccatttagagctggagtatgagaaaccggtggtccgatatgggtcgggtaagctaccctacgacataagacttagagcaccagagattcggaagaagaaattgctgagcttccaagccgcagtggcagaatcctttggcagtggctcttcgggtggttcgaagcagccgaagggatcatcgttgagatccaaggacgggcgcccgaagaatcctacctatgcgatgaagatgatgagaccttgtcacctccgggaaaccaggcctctacttgagagaaggcttctaatcagggggtggttgcaaatcgtcacttatcctagaataacaatgaagatcctcagattgtgctgcgaaaaaggaaagcgaatggttcgtgtagtacctcggtgtcagaccccaacaatcaagtggccaatatgacagccctagttccaaggggactggtgtcggagcgagtgagtcaactaggcaagacaggtggagaggtggaagcatctatttcggaggtgtcgccaaagaaacagaaaatatctgaatctctgacaatcgcatcatcggcagcgacggcaggaagcagtccccaccgggcacaatgaaactcttacgtttgaattgccagggcctagggcagctcgaggcagttcaagaagtacatgtggtggtctttctctcagaaactcgatgcttctccaacaaggtgcaaggattgcggagtagcctcagtttcccgaatggcattggggtgggaacctatggttgcggtgggggtctcgccctactgtggaacaacgaggtctgtgtgaagctgcaatcatatgacaagcttcatatagacgtgatggtggtggacccggtatcgggtgtggatctgtgtcattttactggcttctatggtgaagctaagagggaacttcgacaccgaagctaggaactgttgaattttctgaatgaccaaagcaatgccccgtggctgtgtgctggggattttaacgaaatcttagatgccggcgagcaatttggaggggcgctgcggccagaaagacaaatgaatggttttcgtgatgctgtggccatgtgtggctttcttgacttgggtttctcgggactgccatacacctgggataaccgtcaagaaggaattcataatattaaggttagactcgacagagcttttgctaacgcctcgtttgcggatatgttcaaacagatcaaggtagttcataagctaacaacagaatctgaccactgttgcctggtgatcgagtgcaaccgatccaagaggcgaagaggtagaagaactttcaaatacgagaacatgtggaggagggatccttcttatctatagctggttaaagacacatggggggatgtaaaccatgtccaggattttggtgagttgcaaaactcgcttaggaaaatgcaatcggcgttccaagaatggatcacacggtttttggctcagtacggcaggaagtgcgcaggttacactgggaacttgagaatgtgaggagctcttccctccatttaggcccatctcggtgggaactgcaaattatgactcatatttctgaacttcttgcacgagagaaaataatggagaagcaacgctcacgcttgacatggttgaaggaaggggactgaaaagcaagggaacgagcaaagactaatcagatactagctctgagggcggctaatggtgatctgattatgggacaggcagcgatggagtcaatggctgtggacttctatggtgacctattcacggcccaaccaaccttggagccagacagcattctgacgcatgtaccgtggcatgtgactgaggccatgaacgagtcgttgtagaggcctttttctggacaagaggtagatcgggctctatctatgatgggtgcccacaaggcgcctgggccagacagcttcacagttggtttctaccaagcgcactgggagacgattggcccgagtgttaccagagctgttctgaattttctgaatggaggcgagctaccggaggcaatcaatcagacaacactcgtgctaaccccgaaggtaaaacacccacaggatctcaagaacttcagaccgatctctctttgcaatgtggtctataagttgtgctcaaaagtactcgccaatagactgcgagtgttcttggatgagattatctctgcagaacagagtgcatttgtgcctggaagactaatcacagacaacgtgctagtggcctatgaatgcactcactatctaaagaggaagaaaggaaaaacgggggcatgcgcagtcaaacttgacatggcgaaagcctaagatcgagtggaatgggactatctccaaggtacgatgttaaaactaggatttgcagaaagttttgtgcgaattatcatgagatgcgttacctcagtatctttctctgtacgggtcaatggacaactttcgaacccgttcaagccgtcgagagggattcgtcagggggacccaatctccccatatctcttcctactgtgcgctgaaggtctctcctgcctcttaagggtggttggaccggtgcatcttgccagaggtgtgcaggttgggatacacgctccatggatttcacacctgtttgcagacgactgcattgttttcttagaagcttcgtagagaggggcttgacggttgcaagatattcttgacttatacaaccgaggatcaggacagttggtgaacagagataaatcagcgatctttttcagtgctaactgcgataatgcatgcaaacgggaggtaagagaagttttacatattgatatggaagcattagcggagaagtacctaggcctccctactgccttggggcgggcaacaaaggacacctttgaatttatgccaaccaaaatcagaaatctagttggaacatggagtggccgtgaagcaagttgtgcaggtagggatgtgctgttcaaatcagttgctcaagttgtaccgacctatcccatgagctgcttcctaatcccaaaggatacttgtcggaaaatgaaatcaatgatagcgaactactggtgggggagctcggcagatagcagacgcattcactagcagcgatgggaactactgactaaaccgaaagctgatggaggcatggaatttcgagatttgagattgttcaacctagctatgttaggtaaacaaggatggagactgatcaaaaatcctaattcactatgtgcccgagtgttgaaaggcagatactatcatgagtcagagttcttacaagccactcggaagaaacattcaagccatacttggagagctatattagcgagaagagatattctgttcaaggggcttgtgcgccgaattggtgatggcaattcaacgaggatctggcaagatcgttggttgcctggacatttcagggggaagccgattactgaaccagttcggcagcatgtgcatgtggtgtcagaccttttaatcccaagtggaagttggaacactgaattaatcaaacaactcttccttgatgtggatgcccaggctatcctgagtttgccggtgagtggagtaagagaagattcctgggcttgggaactcaaaagacattggaattactctgtcagataagcttatcgctgcttgtttgatgaacagaggcagttagatgctacatctcatgcaagtccctcaggagacacgacttggtcccgaatttggaaactatgtgtgcccccaaaagttcgcgtcttctggtggagggtggtaaatgatttccttccggctaaataaatctgttctgaaacgcagacacatagaacccattgctaattgtgatgtctttggaggggaaaatgaatcagtgaggcatgttctacttgaatgcacggtggctaaattcttttggaaccagacgaaaaccttatctggaatcaaggtcctgcacctacacccgcttacttgggcgtgtgatctggtcgacccaaggtgtgtcccatccaaagaggctgcagtaatcttgtgtggctttggatggcgaggaacagcaggtggcatggtgaggagccgcgaccggtgagagctgccacacaatgggctattgataccgccttcgatctctggcaactgattcatccggaaaaggaaagaacaatgattggtaatccaataccctgggaacgaccggctccgagatgggtaaagtgcaatgtcgacgcagccttctaagatggcaaacgctcggcggcatctggggcagttcttagagatgaaaatggaagaacttgtggaggcactgctcggtggtacgagtactgcctaaatgctcttgctgctgaagcattggcgtgctgcgatggcatgatgctagctcgggaaaaaggtgttcaacgactgatcttggagactgactgccaagtccttactggtttatgggagatgagagcacagcaatgttcagaaatctcagctctgcttacacatatggagatcctcagccggaggctggagcttcatagacttcaatttacgttttattagccgaaactgtaatagggtagcgcatgcttgtgcccggatggtatcccagaactctctcaggtggtggagtggcttataaccccaactgaacttagggatatcttaatctaagattgtaaccctgaccgtgattaatgaatctacggtcccccgcaaaaaaaaaaataacaattcctcaccacataaaccacatcgccaaacaaaatcagccaagttgtgatttacccccttcttaagcctatctcaattcctcaacaaattaaatcctcagtttatagatacgcccaccccactaactatattaaatcctccacaaattgtttgtcttgatatgttaattggttaagatctttgtcttttaaaaaagaagacaatgcccatggtacgtatatatgaaacattggaaatgtatctgcccgatgcaaggagtgcatgatattgtccaatcatttgtttttccagaccatatgagacatggctataagcacgacacgatcgagagctagacagctaatctccatgcgcacgcttaattccgtcatgtgatcgatgcaatcgtccacacatattaattactagttgggtgcccgtgcgttgcaacgggaaataatatatcaatttaaaattacacttagtgaaatgatttaattcgattatggtcatatataaatatattaaagacaaaatacgataatatggtatttaaggaaaattaaaaataacttccgaatcaaaatatatgcataaaaatttgcatgtcaaatccaaatatgcatatcaaagaatattagtgacccaaacatcgtgagcttgcgaaaaagcattaagcgccagcaagaacatacctaaataaagatcaattattttcactccttgctgcaaatcgcccaaaaaacctgaactaccataatgttacctgaagttttggtttctgtatggttttgttaatatttataatatatacactgtaggaatcttttctatagtgtttttacataaaaaaaaactgaagattattgccagttgaccaccatgcaaaagtctgagatgcaatccaaaggccaaacctgaggtaaataaggaaaatgataagaggctcatccagaaacctccgcacaaatttattatattatatttctctttttattttggctatcaagcaaccgtcagtgacacaatgcagtctcaattaagtatttgacatttaagaaaatagatggtataagttcagtacagtaaaggggaaaattgcgagaacatcttctgctcaataatgccaaaaagtgacccagcctctgaccagctgacctaagaaatgttgaatatcgataagcatttcttaactgcaatccatttgctctgttcctgaaaccattcacaagatgctcgtaaagaatgatagcatggtgaaatatcactgtgaggaatacattacttgttactaccattacattgcctacgagttttacttggctatatggaaaacagcctgaaaagaattccaacacacagggtgtgtttagttcacgccgaaattggaagtttgattgaaattggaatgatatgacggaaaagttggaagtttatgtgtaggaaagttttgatgtgataaaaaagttggaagtttgaataaaaagtttggaactaaactcggccatattctcatagcaatcatgtcaaaatgatccagtaagggatgtcagcatgtatcagatgtgaagcttctaaattttgtttaataaccacaacctagcaagagcaagctttatactacccataaaaaaataataaaagttcctcaatatcaggagtaaagccagagaggctggtagagggtctatttcattgataatgtgcattatatctggttgataaaccaattatgttctggttaatgagctatacctctgacacatctaaatttcttgttacaaatgcccagtttcctaataagatccaagacactcagaccaataactcagctccttctctattaatacaaaggaggcaaatcttttgcccatctttcaaaaaaaaaaaaaactcaggtcatatacgaattgagatctgttttggcatttaagtgctgagagcaccaagctttaatgaaatttgtgcgtatatggctgcagctacaaatgaaaggttgaagcctatcaacagaacattgttttcagactgtgaacagcctcattgaatcaaatatttattttcacagttcatgaaacatttcaatgtctcctataatatcagtccatgattctttttacccacgcatttggcacctggaattctttttacccacagtttctccctaattatgaagcgtcctcacgttgatgcaatgcaaaaaaaaaaaaaaaaaactaaactaaacgatcaggtctgataaacaatcagatgatggcgatgtcagcctacaatttgcaaggaataaacaaagaccaaacaaaattgcaaagaggtctagaaagctgctcaccaaggtggacctcatgaccgcactgcagccttgctgtagaccatcgtgtcgaggtagatcaagcagtcgatcagggggaagggccgtgaggccttcccagcgatcatctgagaaggccaaacgtggcgtggcgtatgcaaaagatcgcggcggacagcagcacttcgtcggcagaagatcgtcggcaggcaactgatggatagagagaggaggcacagggtatggcgatttgttgaaactacaatgcagaaaacaaacaagtcattattaatacccttcattgacgtgttcagatctactacaaaagaaattggtaagactacactatataaaatatcatctcaaagattatatatgatgtatatatgaatttggtggtgatatataaaactatcagataaaagaattacatagaggtatagaacagaggaaattgagggccatagacctccctattattcctatattgtgatagtaagttttcagacttccctatcttatatttttcagaaactttcagtgttgaaatagataatgtcgcatcccaatgtttgcatatatgaaaatatatacatgtatattaagaaaaaagttctgctgcagcataatatgcatgatagactgactgtactaaagaccatatgagaacatatactactaagtagccttgaattaaataaccatgaacaagtgatatgtgtctggcgatcggcggctgcagaaagttgtcctgggaagaagatcagcggcggcggctgctggagaagtacccgacagccagcagctaatcaccgttctattcaaaccttcgatccaacattcatcaaatcatcagacacagataataccctgcaaacaagttgaaaattttagacattgttgcaaacaagttgaaaattttcctatgtacagcaggataataatcgacaagcaaaatatgcctatattttgctgatttaatggaacacacattgtcttgatcatatatatttactgcatgaataaatctgtaaacatatgaagatgtgttttcaagagagagaatgaagggggttggagaggggcagtagtgaccagctgaggtggcggcggcctggacagcgaccggtggagccggtgaaacg

SEQ ID NO: 7509 - DNA, 20219 bp, Oryza sativa
catgtcaccgacaacgaacatgcgagggttgtcaattctttgcctgacaaactcacttaccagctcaggagttgcaaaccatcccgctgtcttggccgttcgcggtttgggggcttgatatggtcggtccattcaaaaaggcagtcggcggttatactcatctctttgtagctgtggattagttttccaagtggattgaagccaaaccggtcgttacaatcactgcagacaaagctagagatttcttcatcaatattgtacatcggtttggggtaccgaatcgtatcattactgataacggcactcaatttaccggcggagtatttaaagacttttgtgaaaactttggcattaaaatttgttacgcctccgtggcacaccccatgagtaacggacaagtcgagcgtgctaatggcatgatacttcaagggatcaaagcacgagttttcgaccgactgcgtccctatgctggcaagtgggcagaacagctgtcgtccgtactttggtctttgcgcaccactcccagtcaggctaccggccagacgccgttcttcttggtttatggcgcagaagcaatgctgccgagtgaagtagaatttgaatcgctacgatttcggaacttcaacgaggagcgctatgaacagggccgagtagatgacatcaaccgactagaagaagctcgtgaagcagctttaattcagtcgactcggtatttgcaagggttgcgccgttatcacaatcgcaacgttcgatcacgagctttcttagtcggagaactggttttgaggaaaattcaaactacacgggatcggcacaagttatctcctttatgggaagggccatttataatctctgaagtcacccggccaggttcttattgactaaagcgtgaagacggtacacctatcgacaattcttggaatattgaacaccttcgtcgattttatgcttaggcatttcgtttgtatctttcctctttgactgctaacttcaagtttttccttgaagttttcagtcggggggctactatgataataatagagtgtgatttttgtcaattcaatttgcttacttgatttatcattgccctgcttggtctttcgacttagtcaatgaggactgaaggtttttaatagcttttacgggttttaggctcaataaggcttgacaaaggcttttaagaaatcaaaagctaagtatggaacaccaagcatagcataaattcatcagtattgtacaaattgtgcctccatcatcattaatcatcaaaatcattgttatatcaatcagtatcagttttttcatcatcggaattatcagacccagtcggccgaaagtcgacatcttggaatctctcaaccacgtcagcagcaatcttgtcagcggctttttgcgcatcattgatgaggtcgagggctgattcttcactcgtcccgtctgcaaacccatcaatggtatcgacatcgattttggggtataaagatttggtcatagctaatgccatgcttgctcccatactcccagcttccctgatattcttgaagtaagtatccggagcgactctcagcttgtcgaagatctcggaagcatcaagtgtactcggactggcgttattgaagaacatggcttggatgagtggggtagcggcattagcgactttatccctggccccttcaagcctgttgagcttttcaactaagacatcaaactgtgcctgggacttgatcttgcggtctgcatcaacagattcacattaatgaatcagcatatagaagataatggtttttgaggtattgattattggtatcttcaacctcatttaaagctgagtccctctgtcttgccagttctgccttgtcattttccagagtttgaatctgcttctccaattgagatatcttggcaacttgcactacattgactctggttaatcaagattacaaagataacaacagaagttagttgggcggagtttgtgcgtaccttttgatgagccactcagttcaaaattggattcctggagctcagcaatccgatccctcagatcatgttcattcttcctggcaagttcttttgtctcgtgcagttgattcctgctggctttgagggtcccgagatgagggactaacctctctaaggttgtcgttttagcttcattcctaagatgaatcctctgcaagacagtttaattagcgcttgaactaaatggcaaacgagatggttgagatcaggcgccaaagagcttacatttacaatgcgggttgcctgaccaagtgcctttttcagtaggcataactcttcgtcctctttttgcttatttattacgatcccttgaggttgcatgttgtcatcccaccacttgaccagaatgggagggcgcgaatcctcagctgctcgtatccggaggatctcttcttcatcaccaatcattggccctagtgtacccatgaataaagatgaagcaatcaaataaagtctgttggattgaaatgatttcagatagcgtgtttacctgtgatgattcccggtcggggacgagtggactcttgtgtcttcacaggagatctggtttctgagtcattgccagcatcctttccgggaggactgtttgtttaagcttcaacctcgggaatcttttggcttggccttgtatccgactggtttgcagtcgggggctcctggttaactccgactccagcttcggccgactggcttgcagtcgtgggtttgtcactgggttttacatagtcgctggcctgcggattatcacttgggtgatcttttgcagtcagcccggtttcttttgaggaatccgcttccatgttagtcgggtcagagtctttctcagaaggatctatgtcagatggtttcctacaagttttgctatcagtgttattttcatgatgggagagtattaatacaaggaagattgttatatgatttgtacctagaagactttctgatttttggtacaagacgcctagaggtcttcttcttcggattagttgacttcggaggtcttctggtcactcctttatctctgagctttccggtatcatcgctttcgtcgtcacttagaaccagcttcctcttgcgagaatctgactggccgactggatcagaagcacttggttgggtttcagaccgaattcttggtcctccgcttccctgaccagtttggcggcgaggtgattggtgctgggagattggaggatctaacttcatcaatgcgaactcctgagcataaatgtcaagcaatttaacaagagacgaaatcatgtttttaaggaaggttggaacgttcgaatacataccggtggaggaggattgaatgcattgaacggtacgactggcagcaagtgtgaatagctgacaacgatagcatttgagaagatcttatacatcctttccttcatgactttgaagtcaagagaatctggatcttcacggtttgggtcgtgcttgccgtcaaattcgaaggctgtgcgagatctctctttgattggagctaactgacacttgataaagtgccgggtgatctgttctccttgaaggccttgttcttttagctttatcatcctctccatcagttccactacttgcgcagtttcatctcccattggcagtgagttccaagtatcccgataaactggaggaagacaggagtactcggggagagcaggctcagggttttgaacataaaaccagtttgcgtgccagcctttgtttgaggttttgaagggcatagagaagtatttttggcttaaggttcccctgagttggaaaccagcccccccaacaacacatggtttgctcttgtttggctgtggtttgaggaagaagatgcggcggaacaaggcgaaatgtggcctaatacctaaaaaggcttcgcaggcatgaatgaaattggtgatgtgaactatggagtttgggttcagatgatgcaggctgattccatagaaattcagaattccccgaaaaaatcttgaggttggaagggagaaaccgccatagaagaaatgagcaaataccacgatttcatgcgtatcgggggttgggaatgcttcgccgaatgctggtcgccacccgatgatctccttcgctggaagaacgccgtgcgccaccatctccttcagattatcttccgtcacatcggagggcgcccactgactctcaaagctttctctttctttcgccatgaatgtgaactggatggtttaatttggtctgagatacggctggaaagggatggggaatcggagcggtggacgcggggagaaatttcgtaaggtttttgaagatggattggagcggattgatgaaccctagtttggccggcgcagtttggtactgtagcaggaaatggggaaaatggcgagagtttcggcggggaagacgatgtgacgcttggacttcggtgtttttagggtatcgggagtactaatgggcctggtcctgtacagtacttcagcccaatattataatcagcgtggcccgttgtgatccctagggacttaggcgctttttgctttggcaatttgtgctcacgatgatgtggccagatgctgttaaaatcctttttaacgtgattcaataattctttggaattattatgatgcacataaaaaggtgcccgacagaaaggtgttataccgtttttgtaagctttcttagtctgcaaaagctgtttgggttgatttaagatgactggtttattaatagtcattcttttagcatgttatatgcttattttagttatggtaagggtcatagcctaggctattagactcattgattaccatgattttttatcatgtttggtggatcattttaagagttttttactcggattcctatcaaatatgtctatttttggaccttttgagtgtttatcactcggccctttttgtattttttatccttgatatgttcaagttgagaagcagtcggctgggtattttactaagtaccatgcatgcttcgctataaaaccactcggttcttgactacatgtttagtttttcaactaattacatagtcgggggttacacctaattaggtgcatctactcgatgcaccatgttttattttcgcccttcgcagtttttgattttagcactcggcaagctggagcaagttgaattaaagcactcggattattgttttttgtttcgagaaggctattttgtcaactgcgaaggtctcgggggctactgtggagattatggataccccatatctacatgacattataatttagtcggatatacggtaccaaatatagatagaatatctctatgaggactcgggttagattctaaacttgtatgtcaaggaaatactcgggatcttagtcagttacgattgtattttatctataatcccatattccgttaggatatggactgtattttgtaaagcggacatcttcccctatataaggagaggtctgtgtgcctcttagggcgtgatcttttttccagtttatgcaatcaataacatactcggcggaatcatccccggacaagagttgggtattacttcttgaataagaaggcctgaacctgtataaaattccttgtcttcaaacctatccactttcctaacttgatagccacccctttttattattgccgaaatcttgtttcgacgacgagcattcaaatgccttggtgcacaaaccgtttcaggactcggatttactccttgatcgctgggctcgatggtttggcggccgagaagccaagctgctctccctcgaactcggcgagctccaccgccttgcccatctccttcaacctcgccgcgtagtccaccacgcggtcgtagagcacgtcgccgccggacgccacgacgagcgccgccgggagcgccaccgcctccaggctggggctctccgggccgaacgggttcgccaccgggtggtccctggtcgcgcccaccggcaacgacatacgccacatctggtcggccatctcgacggtcagcgtggagacgtcggccggcgggttggcctccgccgccgtgcgctccaccccggcgaggaacgggtcgacgaggacgtacccggcgaagcgcgccgggtcgacggccgcgagctgccccgaggcgacgcgagccgtgacgtggtgggccaagttggcgccggccgacaagccggagatgaacgtccgcgcgaagtcggccgactccgcgagccacggatcggcgccggcgccgagcgcggcctggccgcgcagccaggagatgaaagctgcgccgtcgtcgatggccgccgggagacggtgctccggggcgaggcggtactggacggagagcacgacggcggggagctcgtaggcggcgcggaggcagaagccgtggcagatggactggtccagggcgcctatgcagtagccaccgccgtggaagtagacgagcacggggagcttacctccatcgtcaccggcagcggcggcggcggccgtgcgcgacgtgtacacgcggaccctgaggccgtgcgtcgcgtcgtacacgacgtctttccactgaacgccgccggggacgtcgtcctggtacggcagctagctctaccgacgggatgaggacggactcgtcgccgcggacgacggagccgtcgctgaggagcttgacgacgccgtagaagtcctccacgacgtgcggcgccgcgttgtcgccggagccggacatggtgctcatcaacgagtacgtactctcgcttcctcgtctgatgaatggacagagcagcctatgcctcctcgacctcggtacgtactccgtctacatgtgcttttgtcgacgtggagttgccaacatcacaggatcagtcaccagcacgtgaccattgacttggaaagtacgtactcactcagtcccataaaacacaaaacttgagccaaaaccgaatgtgacatattctattacgataaatctgaacatatgtatgttcagattcatagtactagaatgtgtcacatccggtactagattgatttttaataagacggagggagtacttggagagtcacgcacgcaaacgaaagaatgagttttaaactatcgggaggttatcgccttgtcgtttgcatttcacttaaataattttaaaaatacttttgagaatatatatttacaggtgatatatatcattccacaaacatacaagttataatttaaacttatcaagttgtaaaaaaacaaattaaactataactaattaacatatacatttaaatttgtttttttagttgtgacatatggaaattaattttgatattgcacgtttgtagggtgatatatcacattttaatatacataatttttttaaaaaattcataactatttaaatcacgtgtaaataacgatagaatattttatcgagtttatagtttgcccgcaaatgctactagtacgattcttggaggtacatccgggtacatgcgccacagcagccacgacaagccatctacattgtatgggggctactagctggcgcgtgcgcaccagcagcgagcactccctctcccctttagtctactcttaactaactaaattagttaatatacttaacactaataatagtaattagaaaaattctggagatttttttactaacagattgaaaattttttaagttagatttgaaaactttcgatttaagttttaaattttaaagtcaaaatttaaaaactttcaacttaaatttgaaaactttcaacttgagatttgaaaactttcaacttaagatttgaaaactttcaactcagattcgaaaactttcaagtccagattgaaaattttgaaaactttcaatttaagatttgaaaactttccactcgagatttgaaaactttcaactcgagattcgaaaaccttcaaatcaagatttgaaaattttgaaaattttcaaaatcgagatttgaaactttcaactcgagatttgaaaactttcaagttcagatttgaaatttttcaactcaaaaattaaaaactttcaaactcaaaacatgctaaagataaaaaaataaaaaaaatggaaaaaaaggaaagaaaatggaaagaaaacgaaaaaaaaagtggagacgcgcgcacgtcggcgcagcggcgctaggcgttctgggtccgaaacgcgcgccggcggcgcgcgcgtattaggtttttcgacattatatgggctgtacacgggccaaatgcagaagcacatggacagtgggctcattccacccagcgattatggacggcccacggtccatagcatcgttgagaagtactacagatttacagctccaaagtacagcaactcgttgtccatcaattcctttgcttcaatttggaagatcattctgttgcttcgttcgttcaatcgataatattatttcatgaatgccatcttattcagatacaggtttctactttgtattttgacaagctacacgcatataaatgacatcgttcatctacttgccaagttttacagaatcgaagttgcacacttacacaaaagatgaaacagaacacagattcagaccacatgagaacaccaaccatgcatctctactgatccaacttaatttacttggatttagaagttattagaaccttcatctttgtggataaatcgcttcatgactcggattaactcgttggctggctcgctccatggctgcagcgacaagaacaggtgcttctcctcctcgaaggtgacgagctccaccggcttctccatctccttcagcctcgccgcgtagtgcacggtgcggtcatggaggatgtcgcgcccggccaccacgacgagcaccggcgggaacgccaccgccgctaggctggggctgtccggtccgaacgggttcgccaccgggtggtccctcgtcgccccctccggcagcgacagacgccacagcttgtcggacatgtcgggcgtgaagaacgcgccggccggtggctctgcctccgacggcgcgcgctcgacgccgccgaagaagggggtgaggagcatgtacccggcgacgcgcaacgggtcgacggtgagttggcccgagccgatcagcaccgcgacgtgatggctcatgttgccgccggccgactcgccggcgacgaacacgcgggcgaagtcggccgattcggcgagccaggaatcggcgcccggtccggacatggcctggtcacgcagccatgacaagacagccgcgccgtcgtcgatggcggcggggaggcggtgctcggggccgaggcggtagtcggcggagagcacgacggcgcggagctccgacgcgaggcgttggcagcagcagtggaagctgggcttctcgaacgtcccgaggcagtagccgccgccgtggaagcagacgagcaccggcagcctctcggcgtcgccggcggtgggcggccggtacacgcgtagcttgagcccgtgcgtagcgtcgtacacgaggtccttccactggacgcccggcacgtcggggaagtcctccggcggcagcagggcgccggcgccggagccggcatcggagcggacgacggtgccgtcgctgaggagctggatgacgccgcgatagtcctcgacgacgtgcggcgccggcgcggcgtgcccggacatggttacttcttcagtgtgccaacgcttagtgcctaattaaacacggttgtttcgtttaagtaagcagatgggctaattaattaattagataattaatcggttgacacgaagcttcctaatcctagtcgttgccttgatcgccaaaccatgactttggctgtcaagacttagtagatatttttctcttttttttttgagaaaaagatggaaggagtgttacttttcagaacgggacataataaaaaaaaagttttataagaaccacttggtacttttctgagtattatagaagaacaacttcactgaacaaaaactatgtagccatgcacctcttggctcttgcaacgaaatttacatgaccgtacttattactagtatagactatagagctatgattttatccggaaatttgagattacagtttgaatgttcgtgtgatgagatcagactcttgagtgatccaaagaagttattgagtccagcatcagtgatgctctgtctcagctttcgacttacgttatgcgtaagcgggtgatacagagtgcaattctgacattcttacgcgcatgaagctctttttctacaattttgctgccatttttacaaacaaaaccatttttacggcatatgaagggtgaggtctggagtcaatacttttgtttgtaagaatttctggagaactaacgagtctggcgttcggatgcacatgcgatacgacacaaccatacaatattttgatttcaatacgtttaaatcatgttattttgcgtttcaaaaggattgagaaatttacctcaaaattgcaaaagtgatggacgaagcctattatgagtactgttcgccgtctagtcctttttcgctgctagctttcctttacatttttggatttgtcccatttccgacgaatgtcagatgtactccttttcctactagtatgacatgataaatttttgtgtgttcgaaaaaagatggccgaagcccatatttccccaatcaatgggccgtgcagccgagagcctgagatggcagttattcctattgggccagaaatatggtccaatacccaattgaaaagcacttagcccaggcccaagcgcatgtactagtactcccgaaaggaataagtctgcattgagtcccttaaatatacatcggatctatccctcaacggcaaaatcaaatataatgactccaactgttaaaaccatattaagagaggaggaaacattgacatgtgggccccacatggtgactcgactattttgaccaagttaactagccacgccaatcgaccaatgaaaaccactgtcaaaacagtccagaaagccaaactacaccagtttttaagtagttggggatcaacatatctagtattgcagtcgaggatacaaattaaatcggacctatattgagggagttagagtcgacttattccttcccgaaaggccaatctgcttccgtccacgtgactatccaacggctgagattccgtgcagccggttttgcttgcaccaaaaggcgttttctgtgatttttcacaatacctttacaagttgtaaaaatgttacctataccttttctaagttgcaatcttttcatatccttgtaaaatactccgtatttcatatgagcaaatggataagtcaaaccataggctaaatagtaaatacatgggcgatagatattaattcggtccaccagtttcaccagactggtaccctcaactctccatcagttgctggccaaatggcaaaatatcattggacacttatagttgcatcatgcctaatccagattccagttaataataaaccttactttctgagttgacttagtctctatccccacaacaaaaagagcactaggtaagtagatataatggggtagtataaactagatacaagtcgctgcaatgatgcatgcaaaatatcaacgccatatcatgttgacctagcataaacaaaactcaaatccggcgaagtacgcttgtttgctatcaataatgcgagcaaacaaatgaatcttaatagcatcacactaaggaagaatggataatacatctcatccacgtctgttaaataatttatattcagccaggaggagaaatcacagccaagacctcgtctcattcactgatcatcaatcaggtccctgaccagtaatttttttttagaaaatagattttcattaatccggtctctatatccacgaaggatatacacatccaaatcatgaccagtaattgatctattcaaatattgatcgcggcaaattaaccattctaatcaattctaagcaaatttcgattggtttggacgttcatattgcaagatctctcaggtaaatcagccactggccggcctgaaccaatttcctttcactatgaacataagatgcccatttttccaggaaaaaaaaagttaacacaagatatcaagggttacttaatttcagggccttatctgcaacacagccagtgcttagcttagcatgctacatactccaaagttcaaaatctgcagaccaaagcattccatctgacagagaccgcaattccaccagacacaccatttttttacgctcatcatgtatgccttctacgtaatgcagcaccaatcatcaatcatttccttcaaaaaagcaaaaccacacacacaatgccaatcaaacactaagtaattctctctttctgagaaagaagcactatataattcagggacagcaagatcgcattcttagcaagggagaagactgaacaaacagagagagagagagagagcggccatggcgatggcgagggggaggaaggagagggcgccgcgagggtacgtgccgatcctgatcggcgggcagggggaggagagggagaggatcctggtgcgcacggagcagctcaagcagccgcacttcctcgcgctgctcgacctcgcggtgcaggagttcggctacgagcagcgggggattctctgcatcccctgcaccaccaaggccttccgttccatcgtcggtgcagccacgcccaccgccgccgccgtcgccggcggcgagatcaagtcatgacacatgctctttctctctccagtgttcttgttttctcctttcctctttgatccgttttagctctgtgctatgcagagttgttgttagcttagctcatgtacgtacacacggatccaagattgtatatgcagatcacgatgagtttatggaaagtcgtgatgtgttatagcagtggatgtaaattgtgatgttatcttgtataattgcacagagatggaacttaaaaaaaaactcgaatattagggaaggacctaatatcaaataattagaaggggtgaggctttgaacccaggtcgtctagcccatcaccttgtggagctagccggaagacccctgcacagatatggaacttgaaaacaagtaccaaatgaatccaagtgctagcataaactactgctctgaaattttccccaaaattatactaactccgattttcaatgtacgacgcagttagcttttgacgtgatttttatcatttgtcttattaaaacaatatataaatattatttattttgttttgacttgttttatcatcaaagaaactataatattaacttatacttttacatatttatattaaatttttaaataagatgaatggacaaacgttatgtacaaagtcaacggcgtcatatattaaaaaattggaggtactagttttttttttctcaactgcatcattaatacaagaatatattgtggtatgtactattgtttcttctcgactgcaaaatctctttccttttcttaaaacaaaatgaatacaggaatatacacactttgatgatcaaattacagtggtataagctgcttgtggtatgtggtgtgatagtacaatacatactacaaaaatgaactaaagtttcagacataacaaccttaaaacaaaagaaaaaagaaaaagagagagacattcagatatactgtacattccaaactgatactgtattctcattggcgttcagggctaccgacaaaaaggaaaactggtgtgctggtgctaactgaagacggcctctcaaagattctctgaagcaacctcggcaacggaggcatgtcgcagtccaagacaccctcaagaatctggaccacttgacccatcgtcggccgatcaacctcatcctcttgaatgcaccagcaaccgatcttgcacactctctcaacctccttcaagtccgcttcaccacacagcttctggtccagcaagctcatcacatctccatctagaagcttccttgaagcttgcacagggaagtagacagaatagttgccatcagtgtcagtggatgtagaagtagtggtagtagtagtgcattcttcttctgatctggctgagttcctcctgcctgacactagctcaagcagcaccattccatagctgtaaacatctactttcggtgtaattgctgttccactaatccattcaggcgcaagataacctatggttcctctcatggtggtgagtgctctgctgaaatctctccctacaaactttgccatcccaaaatccgcgaccttgggaagaaacgatgcgtcgagtagtatgttttgcggtttgatgtcgcagtggatgattcgatcatggcagctctcgtgcaagtagcacaagcctctggcaactccaagagctatctggtagcgagtgttccagtccaagaacttgccattgctttgaaacagatgtgtgtcaagagatcgatttggcatgtgttcgtagacaagaaacctactgtcgccgtcactgcagaagccaatcagattaaccaagttgatgtgttgaatggttccgatcgatctcacttcagctctgaattgcttatctccttgtgatctaccgtcgagtcttttcacagctatgccggtagaatcacgcagttgtcccctgaagacggagccgaatccgccttcgccaatcttttcagaaaagtttttggttgcagaacgcaaatctttgtacctgaaagccacgaggctaccataattttcactcctgttcttgtctttgttcctcctgatgatgaacatcaaaatgaacatcagcacagccaaaccagcagcgcatgcaccaacgacgacaccgattatcactctacgtttcttgcttctctgcatatctcttgctgagagacggagatacatgatttctccattggaattctgctgctgcagttttgcattgagcaattcagtgtgccaaacaaggcaacctttactgccatatgaataagcagtgcaagagcaattattcagacaaaccttcatgcattcatctgaactgtcaacatcctgcatgctttcagctttgtcaggcaagatgatatcagacatggagtagaacttatcagttgaatctgatgaactcgtgttgctacctacacaatccaactgattctttctcacacatccaccagtttgatcgccttgctcccaatccttcactgatccaacagtgaatcccttcatgcagctgcagagtggaagcaaactgaaactgcagaccgagaaagccccacatacaccgtacacatcacactgaaccttcggattggagtacagcgtcagccaagactgcgagctgtccagccaaacctgctgcttgttccggccatcgacgtcgatgaagttgcgtgtcaccacagcttcatttgacacattgaactggagatattcctctctgctgttgtcgaagaacccaaggtgaaagccaggtgaattgccgatcagctcagggatgccagtgaagtactgaccattccatggtccactggaccagtaggtgacagacgaattgcagagcttgagcacgagctgaggcgtgtcttcgtctacctcgaagcagtaggctccgggggacgggccggccatgctcttcttggagacgagacggcggttcaggccggtgagcttgtcgcggccgagcttcgcgccggggaggagcgtgtcggtcgggtggtcgacgctctgccacagcgtacgaggttgggacatgttcgaggtgtcttgcagtacgaggtttccactgttcagaaggacggctgcagtgttgttgctgttgctggtggagttcttggctgaaacgttggttgaccaggctattgacttggtggttgggtgtaaggcaaccaggtcgccgtcgtcgccggagatggtgagctccggcgagccggcgtcggcggcgtccatgattggctctccgccgttggctacccataccgtggtgcggttgggcaccgtgttgaaccatatgcccaggaaccatttctcttggtttggagccggggctttgaagaagccgagcgcgaacttgccgttgttggagacgaccttgtccttgccgccgacgacatggccaggcttgacggtgtccgtcgcggctgaacacgccggagcaccgccgccgaggaagacgacgatgagcacgaagaggttatacagaagaggaggcatgtggatcggatgtgcgtacgtggtacgtgccaacgtacgtatagtgaggtgcacgcgggagaagagacgaggggcattaagtagaggaggcgacggttacggttcgtgcgcggtgagcggtgtgagtttgaccgaaacataagtggtgataaacatgtactataagcggtggcgacggcgacggtcgccgacgtaagatcgccggcggctaagagccctataacagctagccaagtagtagcgagaaggctgcgtatgtgcgccgtttttaacgggtgattttgtaactgctttccttttgccttctcaacttaatttcgacgaccgtggaattaatcccatggcatttgtgatgccacgttatctcacttgcagagatggttctgtaacgagttattacctgttccagacggcggctatgtatccaagatggatccttccggtgctgtgcgcctgccgttccactgacgtcgtgtccggttcagtcacgtcagctccgcggcggccggccgatcgagataaggtcaacagtgatttaccattatttttttaaaacaaactcattattaacagtcatatatttgttatatattctcaagttttagaaaacagatttttacttgtatatttgtatggattgagatcctctaatgtaaagtcagaggaacgtggtgacttacatgtgagttttaccactcacgagcccacctgtcagtgaccacgtcaggagaagttcatgttagaggatccttttcatcttgtaatgatgtattgttgtcattttttttaaaaaaaaagttattttacacccaaatgcaatcgcacccgttagcgttagcgtgaggcaacgccatttgacacgccataaaaaacacccttccatttttttttgtcctcaaaagaaatctccgaagagtgttatgggtattgatatgtaaaactctaaaacaaaaatatacttttataaatattaaataattaaaaagttaaaatatcttgatctttatccgatctgcttcatctgcggcaggccggcctgtctgatcccttgggcctccagcacgacagggaactgggccgcagaaagctgaaatggagcagtttcggcctagtgccaactcgcgccaaaacgaacggacactgccgcgcgcgtgcgaccgcaactaaaccactctcttggttaaacttaaatcactcgctcgagcaagtgagcaactccacaaggccaagctgctaaccacactcagtaaatcacgggttaagtataactacttaatcagcatttgcaaatgtgcatcgctataaatacagcttttttctaaaacccgtaaaaccatcaccatcagatcgagagcataggtcacagaacaacagtaacaagacactaattaaaacgaagcttgatcaaatggagttcaagaagccaacgatcgggatctcctccttcctcctcctgctcctcgtgtccgccgccgccgcggcaaggccgacgcgccagctagtcgccaacgacggcaccgttgccgcgcccgctgtcgcaccggccgcggcggacgtggcggccggtgttgccgatgcgccggtggctgctgccaatgccgacgtcccagctgctgcggcagcaatgggccctgtggctggcgcggcggcggccggagcaccgatcggcgccagcaccatccctgtggcggcgggcgcgggcgcggtggggatgaacggcggcggcggcggcggcgaccaccctatggtgttcttcatgcatgacatcctcggcgggacgaacccgtcggcgcgcatcgtggcgggcatcgtcgacaacacggccgtcaccggccagctccccttcgcgcggcccaacggcgccgtgctgccgctgaacagcggcgtcaacgtcaagagcggcgcggccggcgccatcgacaacaacaacatccccttcctcaccggcctcggcggcgccaccaacgccgccttcacgtcgaacagcaacaacaacaacaacggcgtgcccgtcttcgccggcggcagcctcccgcaggggaccacgctccagaagctcctcttcgggaccatgacggtggtcgacgacgagctgacggaggcgccggggctgggctcgccggcggtgggcagggcgcaggggttctacatcgcgagctccgaggagggcgtgagccagacggtggtggtgacggcgatgttcaaggaaggcgagttcgccgacagcatcagcttgttcggcgtgcaccgcacggcggactcggagtcgcacctcgccgtcgtcggcggcacagggaagttcgccggtgtgaagggattcgccaaggtggccgtcgtgaggcccggaggtgtgacggcgactgccgcggagcacgagacggacggcgtcgagacggtgctccagttcaccgtgttgctcatcatgtactagttaggtaacgtggtcaagctcaggtttaccaaaatgtttggggctgacgttatcgtggtcaccccatggtttaacggttacaatgagatatatcatggtttaaaaaatagaaaaaattatcacaccgttttataaaccctcgctattaactacagttgtgaaaggtgttgtgcttgtccgtgtgtcccggaaatatgttgatctcataattatgtataagtgcctgtattttgaaatatgaacgaaattttgatcccaaaaagatgaagagcaacatccatctggtacaaatagttgtgaacagttttaatatttcgaactgcgatgttactttttgtggtctaattgatctattgcacatgtcaacgtggcactcttaaatggattagatcaaacccaaaaggggaaaaaatacaaagggagaaaggggcgtcctaatgggcgactggtcgcgcccacgcccaggcgcgcgaccacccctcagtcctctagtctctactatagttactagtactactactacactagaactagtgtaatactgtactaatgtagtagtatatgtatatacatgtatataaactatgtgtacgtataaaaaacctaaaaaatacatgtatacaaattttgtaaatatgtatacaaactttatatacgtatgtataaaaatctaaaaaaatacacgtatataagtttatatacgtgtatttttttagatttttatacacatatataaagtttgtatacacgtatacaaagttcgtagacgtgtatacaaagtttgtatatgtgtatacaaactttatatacgtacgtataaaaatctaaaaaattacacatatacaaagtttgtatacacgtatacaaagtttgtatacatgtatataaagtttatatacatacgtattataaaaaccggaaaaatgaaaaagatacgaaaagaaaaaaagaaaatacggaagaaaacagaaaaaaacgaaaaaaaagaaactgtacacgcgcggcagaagaaaacagaaaaaacaaaaaaaaaagggagaaaccgtacgtacgtgcagtgcgcagctcctctccacgtgcgagtcacacgcgggaggatgcgcgcgaccgatcgctgattagtgatttcggaggttttgccatgttggtagagtagttggtttgatatataaaaaggaaaaaaagcaggggtgtcaacgcaaattggaatcgccttgtctacgtaatcagtacagtattcagtagtcaccgccgccgtgccggctgactagcacctggaccaactcgaagtactactccactgatttgtgggccatgatgcctttggccccgtatgtcggtgataggtacaaattaaactggtacggagtagctagtaatctcttcatcctaaaatataagcgattttaggttcgaggatatatcatattcatctaaaatcttttatattttaggatagaggaaatactatttcgtggtaattaaattaataaacatctcgggttaatttatctgcgccaaatcgtgtcgtggactcgtggttgtccctatctcctacctcgagttcgagtggttggacgtgttgtacgtacttcaaaattcaaatacggttctacatgcatgtgcatcacaccaaaccgatatacaactcgcgttcgttagtatataccaaatcgattaggctac

SEQ ID NO: 7510 - DNA, 9058 bp, Oryza sativa
cttctttgatgtgccttgatctccgtctgagggcttacgtgcattcttgacgtattgcttcgcaaattgtttgtagacgaagtagtctttggccacgtggttggagttgggatgatgcggacattgggagttcattatcttgtcgaatgtgttgacgcggggacgttgtcgggaagatggagaggttgttgccacaagttcttcgggcttacgcttgcgatccttgcggttgttacttccactccctcctgcggtcggcgtgtctttccttggcttccaagtggtgcccgactgtttggacgcagtaatagcatcttcggctttggcatactcgttggttttttcaaacatctgcttaaccgtcttgggaggtttgcgtccgaatttgccgactaggtcgtcgtggcgaatgcctttagtaaaggcggcgatgatgatgtcgtcggtgatatcggagatcttgttgcgttgctcggagaagcgtcggatgtaatctcgaagggattctccagacttctgaatgatgttgtagagatcaaagtgtgtaccagggcgttcaaaagtgccttggaagttggcgatgaagtggtcgcgtagttctacccatgatccgattgtgccacggggtagcccgtgaagccaggaccgggcagaatccgccaaggccacgggcaggtagttcgccatggctttgctgtctcctcctgctgcgcggattgcaagaccgtagacggtgagccaggattccgggttggtggtgccgtcatacttctcgattccagtcggcttaaagtcagctggccaattcactcgacgcagatcatttgtgaaggcagcaactccgtccatgtcgtcgtcgtagcggtccggtgaatgatgtcctcttgccgcgcggcgctggttgatggtgtcacgaagatcgatggggcgtcttcgatgtgggaagtgtggtcgttcaactcggcgctccctatgttgttcaggaggcaaacgaacagatcgttcatcatgtcccttgctcttgcgactagatccggcgccggtaatgctgaggcttggttggtgatagtcttgagatcgaagatgagggactcggctaccagtcggggtgcgggtgcttgcggagttggctggaaccgaggcagcgatcatggtcttcgtctggttcaagatgttgacaacatgatcagcttggttgagtgcgtcttccttgaggagggtgtcaaggagagtgattgctgcaaccgcgttctgctggggggtgcgaaaaaccgttgtttcatcgacgtcttgttgcccgatgaggtctctcgctcgtcgcctggattccaaggcgcgttgccgtcgatcttcagcctcctttgcaactcgctcgcgatcttgttgctcacgctgtagtcgttctcgctcttgtcgttgtcgttcttcctccagtcggcgacgttcggtttcttgtcgtgtgcgctcttcctccacttctttggctcggcgttgttcctccgtttcgttgtcagccatgaatacgccgaaaaagagaggcgtgtacttatcctcatagctgtcgtcgaagtcgccgtggtcgtagtggtagccgaagtcgtcgcagtcgaggatctcggttggtcgagaactgacgtcagggaagctaaggtagccatccaactcttccgtcgagactgtcccaagaggttggagtataacgccaacctctctggatctagattggatcggggccgaagccggagttcgcctagatcttcgagtgggagatgtcttggctgtaaagacagcggccaaatcatcaggaagtctcatcaggattgagggataggacccgtcgtcttgatctggtcgcggaggagtagattggatctcgtccgagtggtttgaagccgacccgagagagatgatcttggagtaggcctcggccgagttcggaataccgaacggcgcggggacatggtctctccccgactggttcgaatccgagtcaaggagagagatcttgctgaggttgttggtgatgaagttgaggctatcgaaccggaacgcctgcccgggagggaaggcgaagtcgtcgatgccggagacggaacccatcgtacttagtcagcaaaaacttgatgctgcccctacctggcgcgccaactgtcgaaacaagatttcggcaataataaaaagggggtggctatcaagctaggaaagtggatgggtttgaagacaaggaattttatacaggttcaggccttcttattcaaaaagtaataccctactcctgtccggggatgattccgccgagtatgttattgattgtataaactggaaaaaagatcacgcccccgcacacagacccctccttatataggggaagaggtccgctttacaaaatatagtccatatcctaacggaatatgggattatagatgaaatacaatcgtaaccgactaagatcccgagtatttccttgacatacaagtttagaatctaacccgagtcctcatagagatattctatctatatttggtaccgtatatccgactaaattataatgtcatgtagatatgaggtatccataatctccacactcgtgttattgaatttgcatgtgccatggttgaacccgaaattttcaataaaattaattttactgcttcaaatttatgcctttttggaggtcatatacaaagaggacacagctgacagctggcttgttcaccagttattttcttgtttggacgagaatggtttaaacatttcaatcaaatttattttgaatgctattttctatgtcaatccttttcatgtgacttcatcagcttagaaaaatcatgcctagcgatacaataatggatgctttggatggattggaaaagtacttccttataattgggagtttgtacccataatttgtggacggagtaagtatgcaagtactatcaacatgtaattccatcggtcgtacagtaagtatttgatggtcttatttgtctgtgtctaggataagagttggttaaacatttcaaactttcaccatccattttgtattataaaatctaaaagtttataatattacttctagaggaaaatctactcatacaatctttttttttctttttaaatgcacaagtttgtcataatatgatattacttttgaaggcaaatctacacatacgaaaactatttatggtcaaagtttaagagataatccaagaataccattgacaagcgtcaaatccaaaaaatatcatcgtacaaacgattttgtcccaaaaatgtaatcgttgttagggttccgttcatcctatagcactaagcaatgcagaatggacggaaccctaacggcgataatatttttaagaaaagtcatttgtacgttgacatttcttaaaactcacacttatcaatgatatttattggatttgaatgtttgtcaatggcattttttagattatctcaagttttaaaggtttaactaaatcttacgctaaacgtcaaaatatttacgaatcttgtcaattcttctactaggcgaatataaatggtcatgagtacagacacggaatgaacagaaaccccggaaggccagaacaaagaatttgtaacccagaatttatccaaacaaacatgactatgtaaaacgagatggtattaacgtataattgattgagttttaatcattacaaatttaaaaaatagattaatatgatattttagagcaacttttatatagagagttttagcacgaaacgtaaagtagtttgaaaagcgtgcacggaaatcttaatcttgatctaactcttattggagaaaagaacggacctacgctcccagttgttaattggcatttgtcaatcgatctgaaccacgacagctaacaataacaaatatgaatttggaagtcatatatagagacattttcaaactagtaggccaactgttttctaggctacttttactaaattgataaaaaaagcaatgcaaagtgacgctttacactaaagacctactgaattctactttcagaattatagcaagctgtggtaattttcaggtgtcgttcctggtaaaactgcattataacaaaccagaggcttccctcttgcagctaacttttctcttcgggagaaacacatcagtcagcacagtcttagacttcagggaagcaaggagtatctccagtacctacatttgaacacaaaaatcatcaacagtgccaattaaaaaaaaacaaaaacgactgatttttttttctctttactcaaagtgagagatatgtacacagtagtacagtacagacctcttccttgccaatcttcacggtccgttcctgcagcgcgctcaagtccttgacaccacactgtgcaagtaagctgacgcttgacacactggacgctggagtcattgagagatcatccctgacagtgtatgtggctgtcccaaccacaaatccaacggttttgacatgtggaattgccctgtgcatttgagtggagcagacagggcatacagcgcctttgctaacagaaaaatatccacaaggaactttagtggtactgtagcttacgacggtcgatttcccttcacatgtgaagaagctggcattgacatttaactttgcatccagcagcagctgctgcaatggacagagcacggtgggggcaaccgtcgggctgaggaagcgttccttgctttggcttgagattacatacttggaatccagcttctccacgctgtcaagcacattgcccatgctaccaaccatacgctccttggtaagcatgttgatgatggtgctcattgggaggcaaaggaggcaggagataaactcaatgacatcactaccagcctcggcaaagcagactttctgagccttggtatcaatcaagagcttcatcgataatctgatggctgccatgattttcccccttctatcaaaattctataaatttcttgggagttgattggttgcttctacaatcaacaacaaaagaaaattatatgggttttcagttaactagcgttagagtccaaatgatcagaacgcgcagcacactgacacatagtggaaagctatgcaaacaattttccagagaaatttagagcagagtagcagacaaagcaaaaacacgttccagattgtaatccaatgaagcgtctagattggttggcagctgctcaaaagtaagcaaaaatggcatcctagtatacaggatacaacttctcctgtggacttgtggggtaaccgggtaaggtaacaatccgtgcagatgacacatttccaaataagaaatggcagagcagtatgttcatattttccacatagtgacacgggaaaatagattcagtgcaagtaatctgctttccttactatctcatttggcaatgccaacaaaaaaaaaataaataaacacgaccttataaatgttcttacaggcaaactcattggttgcagaagcagtgaagcacttgagacaaatattagcataacatatcaagtgtaaactagtactatgtactgcactaatgttcaggatcaggtttatcagttacgttttttctgtaagtcaaatcgaatgttcctaaaaaaaatcgatctaggaaaaccttgaaaagacgggtaaatgtttttatcctgaaccatagaaaaatatttcagcaagagtgctagattcatttcgacagcaagatcatgctagcagtctccattatactagaatattcaaactgaaaaataccattccgtttgcctcactagatctacggtccgatatcaatagaaccaaccaaaagtaagggagagaaatcaacgacgatgaggaaaaccaaatcaacgagagagagagagcaatctgcaaggtgagaggagaatgtatagcaccgggggacggagaggaactcgctcacacaatggatcgccgttgatgcccgccgctgccgctgccgccgtcctgcgacggcaaagaggagggaggcgacggcgaggagtcgaggacgatgatggatgagcacgggtagtagtagtagtagcctaatggtttgcttcctttggccatttacaaataccggcccgccccgatgccgccgtaatcggagttgccggaggtgctgcacgttgacgtttcctgacttcgtgtgctgtttcagggcccgcgtaattgtgcggttagcatcaaaataaaattacgttatgatatgattttatctatattttttcattgcatctttaaaatttgtggaaccgtagatttgttggctatgtttatatcaccaacatatcgtattgcatacatatagacatgtttcttggatagagagagtttataaatcagtgatatgttatttctgagtgagtgaaataaataaacaaagcaactaaacggtattacctctgtcccaaaaatataacaacttttgattatgttgtccagattcataactaaaaatgcttataatttaggaagaaggaagtagtaaattttctacttgactaagtatttccaagagactccttatcctactatgctaaaatttaaggattttatagaaaaaaatagccatctattattgtaatgtttagaaagtcccattagccactagcccactaccaacttctcctcgtttgcatgctgtccttgtccatactctttcgttgttgtcgctacccatccgttcgccctccagcgtccgtcagctttccttctcttctttgctgctctttattcacagcctgccgtgactcttaggctgtgttcagcagctgagttttccaactcacatttctctttttttcgtgcgcacgttttttaaactgctaacgatgcgtctttataaaatttttatacgaaagttgctttaaaaaaagtcatattaattcatttttcaaaaataaatttagctaatacttaattaatcatgcactaatgagttattgacatatgggtgacaaatagttaaatgttaaatctaaaagtggcaaatagttaaatgcccccatacaaagagtacacagctggcttgttcatagttattttcttgtttggaccataatggtttaaacatttcaatcgaatttattctgaatattattttgtacatcaatccttttcccgtgagacgtgactttatcagcttggaaatgatgacgtaatcatcttgcgaatggaactacaccttcgtcttattttaagtgtaactataagtttccatgttcaactttaatcgtatgtctttttaaatttttttgaaaaaaattaaaatagaagtcacgcgtaaaatattgttcatgttttatcatctaatagcaataaataatactaatcattaaaaaaaagaaggttgtctttatgattgatcgtgacatattggacccttgagtctttgatagttactacctctgtcccaatataagtgcagttgtggaatttcgtgtccaatgtttgattgtccatcatacttgaaaaaattaaaaaaataatcacatataaagtactacttgactagagtaaaagatcttgtactgaatattggcaaactattctaaactctcgagagaccgaggggatgctatcattatttacatatcacttaaatggttatcaagaaattaataagatagattaatatatgataaactaattatgaatccactctcctgaatattacttagatacccaattataaatacatacttcctccggtcattgtttgggataaaagttactactatacgaaaaatctatgtataatattacttttaaaggcaaatatacccatacatttctttaaactaagcatttgagaaaatattgatgtttaaagtttttaaaaccttgtccaaatcttatactaaacatgaaatatttataacccgagtactcatttgtcaatcctttcaatgagtaaatacaaatggtcaagactaaatacacggaaagatcagaaaccatatcgcgggataaagataaaggctctcacagtgagccccggaaggcctgaacaaagaacttggaacccagaactcatccaaacaaagatgactattttacactcccacttgttaattggcaatggatctggactatgacggctaacagtaaaatatctgaatttggaattcatatacacagatagcattggatcacttctgaaccaattctacaagaaccgaaatcacacccgtctcttttgcatgtagaaggcacacaggtacatttttttagataatgacacaaaaagaacacaaaaacatatttctagtgagacacccaaattgatagtagaaagatttcattgggtggatactgcataattgcatatcactaccaaactagtaagccaactatttgcaagactacttttgcttcttttttttttttgataaaaagaggccgcacctctcccgctttcattaacgaaaacgaaggaaatactacttttgctaaatggatacaataagaaatgcaaagtgacacttcacaataaagacctactgaaatctactgtcggcttaataacaagctgttgtaattttcacttgtgatgcctggtaaaactgctcatgcatcaatgcatcataactaagcagatacctccctcttgcaactttctttcttctttgggagaaaaacatcagtcagcacggtcttagacttcagggaagcaaggagtatctccagcgcctaaatttgaacacaaaaatcatcaaccatgccaattaataaaaaaaacgactaagatttttttttcttcactcaaagtgacagatatgtacaaagtagtatagtatacctcttccttgccaatcttcatggtcctttcctgcagcgtggtcaagtccttgacaccacactgtgcaagaaggctgatgcttgagacactggacgctggagtcattgagagatcatccttgatagtgtatgtgcctgtcccagccataacccttgaggtgttgacatgtggtattgccttgtgcattggagtgtaccaaagagggcatatgctgcctttcacaaccgaaaaatatccacaagcaaaacgagtggcattgtaactggagctg

SEQ ID NO: 7511 - DNA, 10311 bp, Oryza sativa
ttgatgatggtgctcattggtaggcaaaggagactggcgaggaactctacgacatcattaccggcctcggcagagcagactttctgagccttggtatcaatcaagagtttgatcgataatgtcttcatagccatgatttttcccctttaccaaaattctttaaatttattggtagttgattgattgcctctacaatcaccagtgaaagaaaattacacaggcttttaattgattataggtccaaatgttcagttatgagtagcacaatggcacatagtggaaaattatacaggcaattgaattgtccagggaaatttaaggaaggcaaagcaaaagcatgttccagatatatgatcgaaagaaacatctagattggttgacagctgctcaaagtagcaaaagtgatctcctatgtatatacaaaaaatacaacttctcctgtagactaagttaaacaatctatgcatataacacaatttccaaataagtaatagcacagcagtatgttaatcttctccaaatggtaatatggaaaaatggattcagaccaagtaatctggttttctgaatatctcatttggcaaggcatgggaaaaaaacaaaacctagaaaacacaatcttataaatgttcttccagacaaaatcataggttgtagttttgtacaagcagttaagcgctacagacatgcaagtatatgcatgttatgtcaacttgtgaagtgtaagccttcaacagcagcctaatcttactttttttttctgcaattaaatttactattcctaattaaatcaatcactcctttgtattttaggatagaattccgggctattttaggatagaattgactcacaatggatccgtggtccctaaaagtattgaaaacataggttgatgggtatatatatttattctgaaccatatagaaaaagattttacgggtgtgtttactccatactaaaattggaagtttgtttgaaattagaacgatgtgacggaaaagttggaagtttgtgagtgtaggaaagttttgatgtgatggaaaagttagaagtttgaagaaaaagtttggaactaaacaagggccatttcgtttgactcactagatgtctggtctgctaccgatggggcatccgtatttgaataaactgtggaaaatcacacaccatgctccaacataatccaatactctccaatatagaaaacgcaagtcggtttcttctttataattatcatccttacaacctctctccccaaaacccccgtacccaaaccctcactcccaaaaaaccccaaacgctcacaacctgtggttcatggcgatcatgtcaaaaattcaaggagaaatgaaccgggagaaaaaaaaaggagagaaatcaacaacgacgatgatcccttaacaagacgaaatgggacgaaatcaggtggggcggattcatcgcgcgtgaggagaaccagaaataaaataaactacagacgagagagagcaatctgcaagttaagagttgaatgtatagcacgatgggtggaattgtggaaagggagtcgctcacgatggatcgcctccgccgccgccgccgctgccgcagccgccggcctgagaggaggagggaggcgagtggcgatgaagagtcgaagacgacgagcagaccacgacctgtaaagcgggacccccctttcggcccatttacagataccggcccatgttatcggaggagctgcacgttgacaggctgtgttcggccgtggctgttcccatcctctgctacacgatttcctcgcgcacgcttttcaaactactaaacggttcgttttttacaaaaagtttctatacgaaaattgcttaaaaagatcatattaatctatttttaagaaaaaaaattagctaatacttaattaatcatgcgctaaacattgctccgttttgcgtgctagagagtagcgttggtaaccctcactccccaacgcagccacggtcggtaaacgaagcgaaccgacgtgcacgatgtcagtcggaagttgaataaggttattaaaaaagttgattgaattaaatgaaaaaagattgtgatcgctttcgtcgagaggaaagattgttattgatcgggacaaaaatgtatgcgatagatattgttatattttaaaataaatttcatacaccgaaagttgttatattttgagacggaaatattaactcatgatgacgacgggggctaagcctctactattggcgtgagaaccatgagagggctaagcctccactatcggcatgagaatcatgagaggccctacgaggtcttactaaaattttttgttctatctagataggaagtgtttactttgttcagacctcctgttatttctttttaaatccgtcattgtgaaaatctcgctgcatctcaaccttcatccttggtggtgcttctaccctcgaatgcaatcaatcctttaaaaaaaatgaagtcatacctgttacatttacctctagaaggcaagcagaaacatatttatagcgagacgcaaattgacagtaagatttcactggctgggttgtaacatttctattaaaaaaaaactattccaagtgtatttaagactaatctaaaaatgagcaatacaaagtgatgctttccctttaagacaaatggaaacctactccatgctcacaatgaaggtctgtaacttgtacggaactttccaatttctcagatgcgatgcctggtaaaactgctcatgtatcatacatgtatcatactaactaagtagcagcctccctcttgcaactaacttttttcttcaggagaaatacatcagtcagcacggtcttagtcctcagggatgcaaggagtatctccagtgcctacattgtaacacagaaaatcatcaaccacaccaattaagaaaaacgactacgactgttctcttcactcaaagtgattctgatagatatgtacaaacctcttccttgccaatcttcacggtcctttcctgcagcgtgctcaagtccttgacaccgcattgtgcaagcaagctgatggttgacacgctggatgctggaacaattgagagatcatccttgacagtgtacctggctgtcccaaccacaaacccagtggctttgacatgtgccattgccttctccattgcgtagccgcacttagggcaaatgctgcctttcataaccgtaaaatatccacaagcaacacgaatgccgtggtaatggttcaatttcccttcacatgtgaagaagctggtatcggtgtctagctgtgcatctatcagctgctgcaaaggacagagcgctccaggggcaaccattggcttaaggtaaggctccttgctttcgtttgagattacatgatcggcgtccagcttctccacgctgtcaaacacatttgcaatgcttccaaccatatgttccttggtaagcaggttgatgatattgcttacagggagacaaaggaggctggagaggaactcgacgaagtcactgccagcttcggcaaagcagactttgtgagctttggtatcaatcacgagcttgatcgacaattcagcggcagccatgatcctttttattcgaagttctttaaatttcttgggagttgattgattgcttctgcaatcaccagcaaaagaaaattaaatgggttttcaattaactacagttatcgtccaaatgttcagagaaagcgttataatttaaagcagataaagcaaaaacatgttccagattgtattccattgaaagtttgaaacatctagattatattggttgatagctgctctaaagtaaggggaaaaaatgacctcctacatacaaattctcctgcggagtaaggtaacaattcatgcatatataacataatttccaaatttcatataagtattaataatagagcagtttgttaatattttccaaatagtgatatggaaaaatgggttcaacttgctttcgtctaaatgggatgccatgcaatccttttacacgttcgcgaaagaaaaatgaattcagtgcagtagtctgcttttctgaacatgtcatttggaaaagcaggaaaaacggataaaccacaatcttataaatgttcttacaggcaaactcataggttgcaggcttgcagcgttgcataagcaggtaaggacatacaaagattagtggaacatagtgttagacacaaactaaaaataccaaagatcaggcttatattactttttatttcttccattcaaattgggtagtcctttatattttgggctagaattcacagttggatcatgctaggaaactccattatactagaatattcaactacaaataatcatttcgtttgcattgctagatctccggtctgctatcaatacgggacatccgtagttgtttgaataaactgtggaaaatcacacgccatatcgtcttcgagaaacaaatcacacgcgatactcaaaaagttatgaaaatcaatgaggcatccatagttgtgtgaataaattgtggacaatcacgcaccatactccaatagtctccaatatggaaaatgtgaaaaaaaaatctgtatttactcatacaacctccctcccccaaaacccacatactcaaaaccctccgtccccaaaacctccaagcgcttgcaaggctgacgataaaaatatatatattaggagaaaaaccaaccgaaaataaggtggagaaacaaccaccacgaggatccctaaactagacgaaataatcaggtagggcagattcatcgcgcgtaaggaaaacaaaaatagagagcaatctgtaaggtgagaggagaatgtacagcacggaggacggtgaggaactcgctcacacaatggattgcccttgatgcccgccgcaggcctgcccgccgcagccgccggcctgcgacgacggcgaggaggaggagggaatcgacggcgaggacgatgagcacgagcagtaggtttgcttcctttatagcctgtagtaaatcggaccactcctctcggcccatttacataacggcccaccacgaatgcccacgttatcggagggaaaaagtctattttgactcttcctcattgaattgtctttctaaaccacacaaccggaaataacatctccggcatcttcaaagccaataacatctcccgcaccttaaaaaccaatgcaaataaacgcttttgatggtttgaaaaaaatatttctattgacgtactatcttcttcgataataaaaatcgctttgactttttcttcgacgtttaatcatttgttttatttgaaaaattagtataaatataaaaatagataattcaattaaagcacttttaataataaagtaagtcacaaacaaaataaataatagagtgaataacgaatgatcaaacattttcgttacaaacagaaacttaaagcgagtaatatgagatggaggaggggtttcattttgcgtgccggggaggagacccctcctcccgaacacagccatagtaccaactagaggatgccccgcgtgttgctgcgagacttggttaacatcaaattgttagatatgaggtacaatctcaaaaagaaacagaagaaacaaatagctttcttgaataaattctttttagcagctctatccaaaatttgtagataatttaggtagcacatgtcaactgaaggggcattcagtcataaagctcttttatacagattgacgggctagatacatatagatgtgtgtggagatgggccaatgtgttcatgtgggttacatttggcactgaagaggcgaagagactcacccggtgactaatgggttgagctctatgctacattctatccaacatctgagaagcgatctaatgcatttatccaacggttcactatttgatgatgatgtagaagcatgtggtttgagtttttggccttaactttatattatagaaagaagggatatggatggaggtaggacccatgcatcatcgacttttctcgtcccatcgtctgctttctagtctcctctcgtttctctctctctccccctcttccggcggttcgtgacttcgtgcgccggtccatgtcacggccgggaaacgaagcgacgtgcacggtgtcattcgcattgatgtgcctgcatcgtacagctccactataaaaaaagaccatttaaatttcgaggttgcttcaaatctcgctgcaatccaaaccttctccattctagtttggtgcttctgatctctcgtacgcaagagtgtgtgaccgtgagatggccggaaaaacatctaaagctgccactctaaccatgaagctgctcgtcgacaccaaggcgcagcgcgtgctgtacgcggagggcagcaaggacgtcgtcgacttcctcctctccctcctcgctgtcccgctcgccggggtcaccaagctgctcactgccggcgacatggtcggctccgtcggcaacctctacggcagcgtcgttgacaagctcggcgccgactacgcctgccgcggcgacgtcaaggccgcgctgctcgcgcccacggccgccctccggttgggctcgccggcggacgccgacaacggcggcggcgccctttaccggtgcagcggctgcgcctgctcgagaagctgctacaacttcgtgaccaaggtgaacggcacgccgtgtccggtgtgcaagaggaagatggcgaccgaggtgagtcttgttgagccggacgatgtctccggcgccggcgccaaggtcgtgacgtcgccggcggcgccgtctggcgaggcaagctctagcaaggctggttacgcgccgggcaaggtgacgtacacggtgatggatgacctcaccgtcgcgccgtcgtccaccgtctccgccgtcgccgccctcgtggcgcttggcgtgacggacatcaggggactgcaggagaagaccgtcgaggtcggctacgacgaggtgacttgattagatatccacacttgaaattattttctcatgtacagtttggcttaatttgttttaaaccttgagctttcgattaacaatattgaatgtgtttttatacgtatagggtttggctgtgctgaaggcttcgttgcagtcaaagacagtgctcactgatgtcttcctcggtgcgaggcggactgctcaccgacgtcatcctatgctggtttgaggccaagatgatcagattacagagcaaacaagtagccaacgttgtagtaccttgttgtccatgaaggcatgaagtcattttggccatatggtcacgctaattttgtggagcacctgtattcgtcttaaaaaaaatgtagtttaccccttttcctagtataatcatcatctaacaaagtactaatcaaaattattttttattggtttcaagccatgcaacagtgaattattttttgttggactgaatcaacggagcattgttttgttgtccttgttcttggtgtggatcattaaattaggatggagccatagtgggagggatttcagcatgaagtttctgtttaaagtaggaattttggtgcatggattaacaaatgtgttaaaatttgtgacatgcacatactatttcgaggggatatcccctcatgtcgtgtatgttatctaatgtcacaccctgaaaatcattaatatataaattgttgtttaattggaattattagaatttatttttaaaagcctagaagagaagatctaattttttttaattaataaattccaatataaaatggggccagataaaatttcattaaatactttgcttaattctataattcctagatttttctgggatttatttgagctaaggaagtatttttaataaatggaattgcatttcatgaataatttaaattgaaaaaggtttttaaaagtctcttttggctttgggccgaaagtcggcccaaaaccgttctctctctcctcggcccagtccggcccagtccgcagccgcgccctcgctgtcgctgacaggtgggtcccgcctgtcaggtcgtcgtcttcgtcgcgccgcagccgtccgaaaccctagcgccgcgccgccgtcgtttccttccaaatccggccgcttctttccttctccggccgaattgatagaggggaaatgatcctcgggatctcctccgccttttctcctttggaaacatcggctaaatcggtttggaaatcgttggattcgagatcgaatcggtttcgtctctctcctccgaaccctaaaccttccttcacgttgccgccgtcgacccgaagaccgccgccgcttcaacctcgccgccggtgccgtccgttcctcttccgccgtcgctttggtcgccggtgagttcgccgtgccgtccgctacccgttggtgccctccgtttgtgccctagcgccgccgttcgccggtgagcttgcgccgtccgagctgtcgagccgccgagccgccgccgccggtggtgacgtcattgccgacgtcatcgtccccgtctcccgtgagccggtcgtggaccgatcgatctcggccgtccgttttggatggatcgatctcggccgtccgttcgcgtgaaccgccgccgtgcgcccggtcaaccgcaaaccctagccgctgacgcaataaatctatttttccttttcaaaaataattcattattgcgtcataattcaattaaaatcaatataagtgttttaatccgattaaatcttcaaaaattcataactaattcatcttagctcggatttagttggttcaagtctctaaatttttctaaaattgagatctacatgataaaaatatccacatgtactgttcatgcttgtttatgtgctgttttggtgattttgcttctttctgtttagattccgtcgtttccggagagtccgttttcgcaggagaagagtttgaagagttccaaggccagcaaggcaagtcacacagatcctaaacacaaccctttgagcatgttgaatctgtttaaagctattgatttatttcaacttatgcattgttttcgaatgtcattgggtggtgagcctttcccatttaattatggccgaagatgactttattttcctatgggttataatttgactagcatggaccttatatattggattggttcagctagatgttatttatagttgcttagccatgcttagaaacattagcacacttttgggataacttatgactcactattatttaatgatggcataatgatagttcacgatggtcaatcgtgattaggttaattaattacttaccaactaaaacttgataatggtgggttgtgagcacatggttttgagagtcgtgctcatgacaattaaggaccggttcacgagtttcggttgtgaaacattaaccatgccaaccacaagccagcgtgggcaacggctttatcttttgtatagcatggttcattgcggagcaccagactgagaagtggcggagataagcccacgggggtcgctggggagtccatgtcttgtttataagggggtgattatgatccaggaaaggtgtgccgtaatggattgtgttgtgcaaggggtattgtcacaactcctttccgaggtactgtggtggtattgaggcacatggtgacatgatgtggggttgtgtcttgtgggtatagtggtacacctctgatcagagtaaaactattcgaatagccgtgcccgcggttatgggcgggtctaacaatgtctttcgtgattagtctcacccttctcatcataataaaaggtgctctaactggtaataatttgattagcttctggtttggaatggtatattcctggtttggagatagaactgtgcagccgggatggttgttcagaatggttgagcctatacaacagggtatgttatatagcgttggattaatattgacggagctcgtggctcctcaccgggagaccgcgcaggcccccctttgccagttcggccgggggcttagggtgagatctcaagctctcgctgtgtgtggaaagatcgcgtgccaggaagaaacacgagacacggcgatgtatacaggttcgggccgctgggaagcgtaataccctactcctgtgtttttgtggattggtgtatgaatgagctaccaagtgtcagccaacttctcccccgttctaagctctaaatctggaaaagaatcaaccaacccccttctctatgggcaaggtcctccttttatacttcaaggggataccacatgcaccctcctccttccaaactggacttttcttctctttatggacggagattggtattgttgctgttcgaatgacacttcgatgggacagcccccacctaccttcacttccgggggaagacgggcacaacgtgggatcgtggctgcc

SEQ ID NO: 7512 - DNA, 8181 bp, Oryza sativa
tggatcggggacgacgggcgggtgacgcaggagcgcgcccgcagcctggagcgcgccctggggcatgccgccatcgccatagacgaggcggcgacgcgccccgtctcgccgtcctccgtcgtcgcccgcgggtggcgatgtcgcggatcctccgacctccctgagcgcctccccccgcccaagatttcgacgagagggggacggtggggtgcgagcccgacggcgcgggttctgctccccgtcgtcaccgctagcgttcggagagaggctgtgcgccactgcccgttcggccattgggctgagcgggagaagcttggcgcacacgaaagaggacgagggcttcgaaagacacgcgcgccccctatctggcgcgccagatgacggagcgtggggctcctcaccgggagaccgcgcaggcccccctttgccggttcggccgggggcgctaagtgaggttcttcgccctcaatctgaggaacgtcagcgagaagaatcgcacaagacacgggcgacatagacaggtttgggccgctgagaagcgtaataccctactcctgtgttctggtggatctgtgtgtaaaggaatacagagagctcgagagcgagagagagttccagctctagcacccctcctccttttttttctctcccttctctcttaggcctgggcctcctttttatctgatcaggggtcaccacatgggcctctggctgcctaagaaaggaaacatgctttttacaatgagggctagtctacagccggaagtgacttctgacaagcagagcacgcgcctcctgctccgctcgcctgctttttccgtggacgcccatttcaaccttcatttaatggccagcgacttccttgccgcgcttgcgctgcagcctggaatgaatctgatcgggactgacataccaactccaggagtcagcacgccagctccggctagggacgagagccgggaagccctcatcattccgacgggacggggcgaggcgtgtgacaggccgcctgttgccacctaacccgcgatctgaccggtctatgaccggtcacacaccgcgactggtcacggaccggataagcgtgcgctgcgccgcattaaatgcggcgtggcgcgctcgtccaacctgctataaatgcggttaggtgagccccgctgtgctcacctaaccacacacgtggcgccaaaaccacagggggtcggggcgccccagccctcggggccgaaacgggagcggcccgacccctcggggagacagagggaggggtggccgtgtcaccctcgggcccgacccccccccaagggggtcaagccacgtgggtgaccgcggctgcccaagcctcagtcacgataccctcggccccatgtcaccgacagtagcccccggcgttacgccagggcgatcgcccccctcgagggaagcgctcgggcgtgacgccaccccttaggcctggtgacaggtggggccggtctctacaggcgggcagaaacccagcggtcgcaaatcgcgcgcatcggcaagggaaaaccgaccgacaataatgagcggcctctttaagaccgctacattactcgagcagcgcgcgaatcgagacgagccggttcgtttcgcctagagacatgatgatggcgcttttcgcggttggcgagcgcggttaatgcgcgcacgatctgccccatctcaaccgccacggccgcacatctgctgcgtgcgccgcaaacgggcgggtggggttagtggaggcgtgggagcgagaaacgagggggcaaggtagtgggcgcgggaagcgaggagccgggcatagcgttggcaagggaataaagacgccgaggaagggattcgtttccttcctctcgccattcttccccttgccttcgccacttgcgctctaactcttcgtttcctgtgccctacccttgccatactcgctcgctctcaagctcctcctccaccggcgtcatggcacggggctccgcaccgctcgacggtagcgtgctgccgccttcccgcatcgtgagcgagaggcaggccgggctgccgcgccgattcatgccggaatctgccaccggccgggaggtggtcacgctgggcgagggacgcccggcgccacactacccggggcggtccgtcttcttcctctctttcgcaatggcggggctggtcccgccattctctatttttttcatggatattctggagttttatgatctccagatggcgcacctcacccccaacgcgataatgacgttggccatcttcgcgcacctgtgcgagatgtttatcggggtgagcccatctctccggttgttccggtggttcttcaccgtacagccggtgtcgccgccgacggtagtcggtggctgctacttccagccgcgggggcaggtgttgaaccgctacattccctgcgtcctccgcaaaaagtgggacgactggaagagtgattggttctacacccccctcgtcgacgaagcgcgcctccgacttccgagccagcctccggcgcaggcctccagctggcaggcggcggtagatctgggagacggctacgacgccgttcttgaccgcctggtgggtctgcgatcccaggggctcacgggggccatggtgttcggtgactaccttcgccgccggatcgcgccgctccagcggcgtgcccggggcgcctgggagtacactgggcccgaggactacatgaggacccaccaggggcgcaaatgggactgggaccctgaggacttcaggatggtggtccaacgggtgctgaatctcagctccgtggaggcatccctcatcccccaaggggtcctccccctctgctgcgatccagagcgcgccaacatcctgaccatcatgcaggaggtcggggcgtcgggggagcgggccccccgaggccacgttggcgcgggcgggagccgcaggggagaacaatctaccccgggggggggtcgtgcttctgggccccgcgacggggacccgggggggagccgccctgccgacgcccgggggaagaggaagcaggagggtacccctcccccatctcctccccgagggggcggggcggtgcgtgccagcagcaggcgcccggagggtgccgtgccgacgccgcagcccgagggggagcgaaagaagaaacggctccgcaagatgggggggaccgagccatgccgggtgaacctcatctcgcccccgaggtggtcgtttagccgacctccccgcaggttcgtccccgcgcccaccgcggccgtgttcattatcccatctcccaaggcgagttttcactcacccgtttctttttgtcttctggtttttcttctgcctcagcgagatcccatcgcaccccccccccccccgccattccatgtccggccggtctgaagccgaggagacggcgaccgcggaagcccggaggcgggaagctgaccggcgagaagccgcggaccgcctccgggaagccgaggaggctgcccaggaggccgtccgggttcgccaggctgaggaggccgctcgggaggaggccagactccgccgggccggggagtccgtccgggaggcagaggcggcacgcgcacgccaggcggcctgccaagcccccgacccgactccacccgaggcgacgatgacttccgaggccacccacgacgaggccgcggacgcgccgctcgggcccgacccctcgggcgatgcttgggacgagccagcttcgggggacgcccccgggtccggcacgtcgatcggcgggccgagccgcgcggcacccacaccgaggcggctctcccctctgccttccgctgccccactgagcgcggagcccctcctgcaggccttagccgccgcgaacaccacggtgctggacgggttaagtgcccagatggaggtcctgcaggcagagagggcggagctcgacgcggcgtgggcgcgcgtagaggaggggcggcgctcggtggaggccatggtggaggcgggccgcaaggcacaccgccggcacgcctccgagctcgaggcccgtcgtagggacctggcggagatcgccagggaggtggaggaggagcgggagactgccctcatcgccaccgccgtgctcgacgaggtgcggaacgacctccgcctccaatacgggagccaggcggcggagctagagaagaagctcgacaccgcccggggagtccttgacgccgccgctgcccgggaacggcgggcggcggagatcgaggcggcgtcccggcagcgcgaagaggcccttgaggctcgcgccacggcgctggaggagcgcgcccgcgccctggacgcgaaggagaaggacctggcggaccgcgaggccgccgtcgccacccgggaggcaacactggcggcgcacgaggccgcctgcgccgaagaggagtccgcactccgcctccgcgaggacgcgctcaccgagcgggagcgagctcttgaggaggccgaggccgcggcgcagcggctagcggacagcctgttcctccgcgaagcagcgcgggaggagcaggcgcgccacaatctggaaggcgcccgtgccgagagggccgcactggatcagcgggccgctgagctcgaggcgcgggcgaaggagctggacgcgagagcgcacagcggcggaacggccgcgggcgacggcgacctgccgcccgcctcgcagccgccgaacacaccatcgccgggctgcagggcgcactggactcgttcgccggggaggtcaaggccctccgtttggcgagcgaggtaggacccggcatgcttcgggacgccgtctcccgtctagaccgcgccgggcggcaggcgggcctctggggcgggcggaccgcgaagtacgccgccaaccaggggggcctcgcccagcgcctctcagagatggccgggaccctccagcgactccccgaggagctcgaggagacgatcaagtcatcctcgagggacctcgcccggggggcggtggagctcgtactggcaagctaccaggccagggaccctgacttctccccgtgggcagcgctggacgagttccctcccggaaccgaggacggcgcgcgtgcgcaggtccgggacgccgccgaccacatcgtccacagcttcgagggtacggcccctcggctcgcgttcgccctcgactccgacgaggagggcggtgacgacggtgcggacgacagcgacgacgaggccggcgacccgggcgcgtcggagtgagcccccaggcccccgccaatcttaatagctttttcttctttttccgagaccttcgggcccccttcttgtatagactgatttaatctgtaatcaagtaaagaggaaatttctgcgtcagttctgtttgttgtgtgtatgagacgaggatggtctgtgccacggtccttctgtgtcttagcttgaacaagggctcatgcccaggtcccagcctcaagcggcgcgggtcggggctagtgcctggggagatccacgtgtcgagactggccaggctgggagcgcggtgaccgagggttatggatgacccgattgtgggcctttgccgattcccccccggagttcaccacgccccggggcacggctcggttctgggccccgtttggcgattttagccggcccgggccaccgagggcagggtcgagcacgagcgtgctaattcaagccaagattcttcaaaaggaaacgatggcacagacacggtcctcaggaaatcgaaaatgcttttattgaaatacggaagagaaaagagataagtatatgcatgtggtagcccccggccaaccctgcacgcccgggggggtgcggggttggcccgagcccgagacatgacacccgacccccactaggggtagaagcgacgaagctgtttgatgttccacgggttaggcagctctgtgccgtcgcccgtggccagccgaacgcagcccggccgggggacgccgatcactcgatacggaccctcccacattggtgagagcttactcagtccagcacgcgtttggacgcggcgtaggacgaggtcgtcgacgcagagtgatcgggcccggacgtggcgctgatggtagcgccgcaggctctgctggtagcgcgcggctcggagggccgcgcgccgccttcgctcttccaaatagtcgaggtcgtcttggcgaagctgatcttgatcagcctcgcaataaatggtgacccgaggggacctcagggtgagctcagatgggaggaccgcctccgcgccgtagacgaggaagaaaggcgtttccccggttgctcggcttggcgtggttcggttcgcccagagcaccgctggcagctcctcgatccacgagtcgctgtgcttcttgaggatgttgaaggtcttggttttgaggcccttgaggatttccgcgttggcacgctccacttggccattgcttctggggtgggcgggggaggcgaagcagagcttgatgctcatgtcttcgcagtagtcaccgaagagctcactagtgaactgggtgccgttatccgtaatgatacggttaggcaccccaaaccgagcagtaatgcccctgatgaatttaagcgcggagtgcttatcgatcttgatgaccggataagcctcaggccacttagtgaacttgtcgacagcgacatacagatactcgaacccgcccggggcccgcctgaacggacccaggatatcgagcccccagacagcaaacggctacgaaagaggtatggtctgcaaggcctgggccggctgatgggtttgcttggcgtggaactggcacaccttgcaccgccggaccaggtcgaccgcatcgttgagagccgtcggccaatagaaaccctggcgaaaggccttgccaaccaaggtgcgtgaggcggagtgggctccgcactctccttcatggacatcggcgagaagctcgacgccttgttcccgagggatgcatttcaggaggactccgttagccgcgcgccgatagagggtcccttccaccagcacgtagcgcttggagatgcgccggacgcgttcactcccttcgcggtcctcgggtagagtcttatctgcgaggtacgcctggatctcagtgatccaagcaatcaatctaggggagctgggagcgctcccctcgggtcccgaggcctggactccgacgggcctcgggggccgttcaggcgcgtccgtctcccctagggggtcgggtcgcgccgacggctgggcaagcctttcttcaaaggcgcccggtggggtctgggctcgcgaggaagcgagccttgaaagttcgtcggcgaccgcgttatcccgtctgggcatgtgccgaagctctatcccgtcgaaatggtgctccatacgccgcacctggcgcacgtaagcgtccatctgcgggtcagagcaccggtactccttacagacctggttaacgaccaactgggagttgcctaacaccaggaggcgtcggatccccagtccagccgccactctgagtcccgcaaggagtccctcgtactccgccatattgttggtcgcccgaaagtcgaggcggaccaggtatctgaggacgtctccgctcggcgaggtcaacgtgacccccgccccggcgccctgaagagacagggagccgtcgaactacatcacccagtaggcggtgtgaggcagctgcgaggggcccgaggtggcctcgggggcggagacgggctcgggagctggggtccattccgccacaaagtcggcgagggcctggctcttgatcgcgtggcgtggttcaaagcgcaaatcgaattcagagagttcgattgcccatttcaccacccgtccagtaccctctcggttatgcaagatttggcggggttgacgcttccgtcgtatttttcggtgatggtgggccggaaccttgggggccaacggacgttccgaaggctcgccacaaaggctcgatagccggcaccgccaaccggggacacggggggccggcccccgtgcccggaccgaagtggcgctccggacgaggaagcgccctccgttgcatgggcggcgcgacgaacgtcgcgccggcgctcgatatcgaggcgggcatccggccccccacgcacatcttcttgggtcggaggcgttaacgagggaatggcggacgaacggtgggcaacggccgacgctctccgcgccttccgcctcgactacatggagccggcggcggcattgccataggcctcagtggcgga

SEQ ID NO: 7513 - DNA, 20953 bp, Oryza sativa
tgtaaaaaaaattgtgtccatatatcatagtacaaagaatattatataggatatatttcatcctccgaattatatcctttcctctcttgatgggttattaattgattctctcctgattttattctataaatactccctctattttataaaaaatcaaccaagttctagatgtgacatatttttaatactggctatattcggctgtcattattttcactgtggtgcagccaacaaacacagtatattgtttctcggctgtgacagtgcggcggtacaaaacagccgacccactatgaatctggatatatctttatccagattcgttgtaagattagatagacatcgagccgatgcgctcgtgttccgtgattaatctgattatatatcgtattgagctatacacgctttcaatgcacactcaccgaagtcaacgaccttcgctgcttaaaggcaccgcaaatgcacataccatttccgtccattcatcacacacaaccagactccgatcgacctcgtctcgtcgagcgccaagtccggctccggcgacgcagcgccgccgccacacgtcgtggaggacttcttcggcgtcatccagctcctcagcgacggctccgtcgtgcgcgccgacgacgccgccctcctcgccatgcccgaactccaggacgtccccggcgttcagtggaaggacgccgtgtacgacgccacgcacggcctcagggtgcgcgtattcaagctggccgccgccgccgccggtgacgatggaggtaagctccccgtgctcgtctacttccacggcggtggctactgcatcggcgccctcgaccagtcccccttccacaccttctgcctccgcgccgccgacgagctccccgccgtcgtgctctccgtccagtaccgcctcgccccggaacaccgtctccccacggccatcgacgacggcgcagctttcttctcctggctgcgcggcgccggcagtgcggatccatggctcgcggagtcggccgaactcgcgcggacgttcatctccggcgtgtcggccggcgccaacctggcccaccacgtcgccgtccgcgtcgcctcggggcgccaacccgtggttgacgacgtcgacccggtggtgcgcgtcgccgggtacgtcctcctcgacgcgttcttcggcggggtggagcgcacggcggcggaggccaacccaccggccgacgtgtccctgctgaccgtcgagatggccgaccagttctggcgcctggcgctgccggcgggggcgaccagggaccacccggtggcgaacccgttcggcccggagagccccagcctggaggcggtggcgctgccgccggcgctcgtcgtggcgtccggcggcgacgtgctctacgaccgcgtggtgggctacgcggcgaggttgaaggagatgggcaaggcggtggagctcgtcgagttcgagggagcgcagcatggcttctcggtgatacaaccatggagcccagaaaccagcgaggtcatccaagtcctgaagcgatttgttcacaaggcgatacgcccagctgagggttgaaaaggacaaggcaaaattgagtgggatactttcaatttcaacatttgtgttttgtttgggttataaaagtgtttgttaaatatccattatctaaaaataaaaaatataaaagtgtttgtttaagactacggtgtgcacggttgccttgttcacttctccaagttattttcttgtttgaatggggatggtttgaacatttcatccaatttcctttttattgtgcttatatagctgggtggacctcatatccaggaatactttttccggcagaaagtagccattgaatgcctctctgtgtgtaacagatgtcctgaatcctgatagcatttttgtgtatgactgtatggtactagtttcatcgtttgacctaataagttttaaaacaatttattaattagaaaaaaaattgtctttcatatatatgtgcatgtgaaaaatgataaaaagcctcaaaatctattctaaattcactttaaaattcaaattttgattgcggctaataaccaataacaaacaatgtggttttagtattgtttaggacatccattttacatgcgacaatattttagtaattcgctacaattttctttcttttttcgagacatctattttttcaaactgctaggtataaaatcacttaaatttgaagtttggattagttatggcaatgtatgcgataagattagctcaagcctgttggtgtagcacagttacaccccttcataatccattagctagattgaacttgcgaaacaataatatgtacaccttgatgcttggtccatttggaacgaaaggaacaaccgtgtattcaacaattgcatacggttatggcctaaggttgttggttttgttgcagccatggtgcaagaaaccaccctttggcggcatgcccatcccttgtcgctcacactccctcagggtagtatactcggtcgctaggtcgtcacattgttagcgagagaatagcctcaagtattttttttaaccaagggcacgcgtaggacactagcttgcttgtgtgggtaagcagagtccaacacccagttattcaagagacatgtagatcgatctagccttcaagcttgcctacctaggaagcaggcttcaggccaatgaaaacgtcagtcaggacagtcttggattgcagggaagccttaagaatcgccagaccctgcagagaatcaacaaatacatgcataccgcctaaaaccaactgatattaagttccaacaatcaagtagagtcatgtgtacggttacgaatgtaatcacctcagtgtagccgagctgcacggtcttctccttgagcgcgcccaagtccttgaccgcgaacctgttgagcagcgtgatgctggagatggacgacatgggcgccacggtgagatcgtccatcaccgtgtacgtcacgatgccctgcacgaaccctcctcctttcgccccttcggcggcggcgttctgcgtgttctgatcttggccgccggcaacataggtgcatgccgttgccatctggttgccgcagttaggacacttcgtgccgctcgcgttcgtcacgaagcttctgcaggcgttgctgctgtagctgcatctgaagaagctcttgcttgactgcgcagaagacggcgccggcaagcggaggacggaggtgttggagctggccgccggcgagagcacgacggggctgagcagcgagtccttggcggtgtcggcctggacgaaggcgtcgtcgagcttctcgaaactggcgtagaggttgccgacgcagccgaccatggagcccttcccgagcagcttgatgcccgaggcgatcggcagcgcgaggagggagaggaggaagtcgacgacgtccttgcgtgcctcggcgtacagcacgcgctgcgccttggtgtcgatcaggagtgtcatgctcatcagatcgctacttgccttttggctggttgtttcagaagccatttttgcagtagttgcagtgtgcagtggcctgcgtctgaactctgaagtcgaagtctcgttttgcctgctgcattctggaatttacagcgtaacagacgagagcatcgaggttcacggggaagaagagagtaatttatttgcaaattaaccgctcattgtgaactttaattcctaatcaatcaatgccgtttactccattgccatgcatcgatcgcactgcttgaggccttgatgctgatcggttcagctccatcatgcacaataccaatcggttcagctccgtaaaattgaacctgaaacacaatgcaggccggatacaccagtccgtccatcatccatgcgcctaaccggctgctatacaagcaagcaagcatattcacgcggacccaaaatataatgatttttagtgtttaaaaacatctctaaaaaatcatccatcatttaatttttatccaattttaccactaaggaaagtacagtaaaccaatatccttcttgtataataaggattgccatgttggatttggatttgagctacgatttgtgaattttcatagctaactattggctataatatcaaacttcttgtaaccatccttataaaatgagggtcattaaattatttttctttataattagttacataaaaaaacaaagattcttattttagcccctccattcaagtttagaaacgtgtttcccttttgcacaaagactaagaacgtagcaaagtggactgaatagcactcaattagttagtgtcttaattagtcatacggtgaatactggtagtacgacgtgcatggatagattctcaatgcaatgagctgttaggaaacgctaagcgaataaacgataaaaaataatagatcaatcgtagaagacacgagatttaacgtgaaaaatccttttaaaataggagagaaaaaaccacgggcgccagccagcaaaatatattcactatatctgaggtgagattacatcgccgcacggcggcttacaagaggtacatatattgtggaaccctgaaagggatcaagcctcccggcgacgggcctccgctccactacggtagaaactggcctttattaaatgcaaatgaatttgtatcaacatgagcaaatgaccgtggtgccaaagcgatcgcgtgaatgtgagatacgatcaactgcactggtagcgataaagagaagattgaacgcactgattctagtcgtccgttcagcgaaaagcccatctggtttaccagttggcacagcctaaattaaatcacaacccattgatagcaattacgggccaggcccatctctccatcaaaagctcaaggccatctgtgattttgttctataactcgtacagaagacatcacataatcaacaccaatgtatcttgcctaactaggtaataagtagcagggctaagtagtaggtctttataaagtgggtcccacgagaaaaaaaatattgctttttaattgctttttgtccaactcagcatgcagtagtagcacatcttgtgttggaaggagagagtgaaagagattttaatgtttttttattcttatgagtgggtcataagcttactacctagcattagttactacccactttcacaatgcttattactaggtcataggaatattatattgcctaatacctgctttttcctaacattgtggatgccctaagagtttcaaatcgactggtcacgcttgcggcttgccagcaagcaaaataaacaacaagagaaggaccaacacaaatggccatttcttccgcttcttgccaaggaaaacatctgtaagcaccgtcttcgactgcagcgacgccttcagcatagccaaaccctgcagtacagtgtaaaacaaaatggttaataaaacacaaatcaaaatgtaccaaaacttcatatgataacaacctcagtgtagccgatctgcacggtcttctcctggagcgacttgatgtgagtgacaccggatttgaccagcgcgatggtggacatgggcgcgaccttgaggtcatccatgacggcgtatgtcaccaacccctgcacaaaccccgtgcctgcgattgcagacggcgcactcgcggtcgccggcacctcgccgccggtggatccagcaatggtggtgctcgacaccatcacatgcttcaccggcaaactcatcttgccgctgcactgcggcaactgacaaggcaagccactcaccgtggagacgtagttgcagcaatcaccgaacctactcgcgctgccccggtaaagctccgtggaggccggcggcggcgccgccgcattgatctccggcaggtggagaaaattatgaaaaaaattaaaaagacaagtcgcgcataaagtattaattatgttttatcatctaacaacaataaaaatactaattataaaaaaatttcatataagacggacagtcaaacgttggcacggaaacctagggtttgctttttttttgggacggagagagtaaagtgctaatgctaacatttcgtcatagataggtgttgttctgagacaaattttttgaacgaacaacgaattttacaaccacacgaggagaacgtccatgtatgtgcacatttctactagtgacacgtgctaaatactgtttctagtatttaaaattagatgcgcagattaacactctcattattatttagtttgttttcattaggaatttactgtttccaataggaaaattaattcgtgagacttgcatatctcttaaacatgtgttgaagggggccaaaaaacttcaaatttttaagacgaatactactggtgcgttacaaaattcgcgtgaagtacgacgttggctactttgctgatctgatcaaattggcctcgattcctcaaaccagcataggaccagcggtgtgcagtccgcctcgcgccgaggaagacatcggtgagcactgtcatagaccgcaacgacgccttcagccacacttaagccaaaatctctaataccgattgcagggttagaacccttgctattgattgggccacgtggcatcacgcatagctcacgaccagattctcggctggagaacatgccacgcattcgaactgtcccatagccgtccgattacatacgaacggtgagaaaaggcctagcggacctaaatataaattgcaagttttaagaagggtttttaacaaaatgcacaatcttatctagaacagtccagagtatatgaaaaaagacccagaatcagaaaaaaaaaaatccagcaagaacaatatacagtattcccctttcctaatcaccatgccgtcgcgtagatggcaaatacggggacgatgagctcgagctcgattgacctggtgctccttggccccgccctgccttgatccgtgcgaggcgacgatgcgcctagacgatacgggggaagcgaaggatccgacgacggagttgtagacgacattggagggagcccgctgagatagagagcgccataggggatacctccgcgctggtcctggagcttgacggcccgcgcggggccttgatacgcgcctgctcaccagctagcgctgcctcatatagacgagtagggacggcggcggaggtccacgccgtcgctacatccgcggggatcagctcggctcaacgccaccctgcttgtcgccggcttcctttaccgcctctgcgatcaaccgctcgcatcgtctcctcgatatcctccttgccgcttctgccaccatggccggtcgcaccgccccctcgacccttccgccaccaccgcgacctcacctcatcgccgagccgctcgtcgccggagatcggaggcggagacaacggagttggtggtggcaggacggccggcagtcaacccgatggcggggcctccggctcactcttaacccgctgccgttcgaccacgccacctccgctgcctccgtgatgcatgcagagctggccagcttgaagccttgaacccagtgaccaaagaagccagttacctcttgcatttgcaagcggcctcacccatcagttctttctcagcgcaaatccatgctggaaagtggaaactgaaaagcacaagccacaacaatagtagcgcagtaggtgcagtacagtggagtacgagagaagaagagtgaactgggattgaaagcagaggtgggttctcaaaaaaaaagaaagcagaggtggacgacggggcatatgcatgcatggagcacgtcactgctcccaattcccaatggccacctgctaacttacacgtgccatcaactcctaacaaattttctttttcacccctaataatatttttttattctatacttcactaaatacaaaatattttaaaaaatgcccctaggttagtactcatgtatttatgtttaggaccttagaagttttgacttttcaagacttgtttgtctgtctgagtctgaatcgtctgatgtacaaagagtaacataaacatattatgactctatattgagttgatgataggagtcatttacttaaaaaaatatgcattctaaattttgtaattttcatgtaatttgataaattttgtaaatcctactaatttaaaagacatatcttccaaagtagtatttgttaaaggcatacagatacacttaaagaagttaattatccgttacaaatcttttttaaaaagttgaaatataattattcaccggacaagtactgctagctaaatacgacacataagaattagccaggcataaactaaccatatttactcttattgttgacaatattgttataattgtattctattttatctatgattagctaatcaacctgacaatctctatattgtgagataaatataggtggagggtatatcatatactgaccatataggtaagtaggtggcactaatagtaaacaaccttaagctttcagtcctctaaccatatctaatcataccaattataaatatatgttatttactctgtctaatggaagagaaaaaaggtttgaaagtaaataggcaagtattacaaataaaataaaataaagttttttaaattttttttccgtagtaatgctttaacaaagcttaaaatctttatatgaatagggttactacaggttaattgttcctcaaccttttcaaaagtcattaaatagtttcttctaaatgaacaagtgtatatatttttttctaaaaaaagtaaaatattgcatttgaaactcttaacagcaacaacaataactattataaatatgtaaatatgtactagctataagttggttttccaacgggcacgctgattttcttgaataggaaagcagggaattggaaaagactatagaaggaggatttggggaatgtttaagtttgttgccactttcaatcttaccgaattttggcattgccaaattttggtagtaaacacacttcaactattacgatgttacccaattttggcagttccagaagctctctcttaaaggcatcaaaatgtagtaaaggcatcaaaccaaacaaagcgaatgttaccaaaatttgataataccaaaatgtgttaaaattcgacattactaaaatttgatatggtcaatttttcaaacaaagtgtacaaaccatttatatctatttccgattctaatttttagggtgttcaatgaaaaatgttggactacttattatcgaaaccattcctaagccattatgcattattgggtaagttgaatgtaaaattttgtgattatgtagccttttttatatatatacaaatttagttatgatcaattcgtaattaccaggcttcataattaacagtgtactgggttcatgtaattgagctggcctatgtatactaaggcgtggcaaagccgcggttattttctagtgtatatcagaaattaatctctattgcaaatatctaaaattaagtcgatcacctgtaagtagccgacctcgacggtcttctcctacaattccctgatgtccatcacgccaagcgccacgagggcggcgatggcggagacggtggacgacggcgcgacggtgaggtcatccatcactgtgtacgtcaccttgccggggttaagccgaatagtactagttagagcaaataatagtatagtccactactagctccaatttatctatagtcaatctaatagctaattcatacaatagttgcttactatattattaatatattgtcccacctgtcatacacacattacattttggagttcgtgctgcagctggctacagatctatagcccgctgctcttctctctcatcgtttatctcattaaaatatgtttacagctggctaatagtctgctattgtacctgctcttaagcgggcctgacctatctctccctggataccccaaggcccatatgttcctattcaggccccctttgattcaaaggaaattcataggaattttaaaggattttattcctgtaggaatttttcctatatagccctttgaatcaaaggaatgaatactatggaatcctatgaaattcctatggaataccttttcccatgcaagttttggaggaaatttagcatgaggtagaacctcatattaagaatcctttgagtctttatctctccttaaattcctgtgtttttcttacggttcaatcaaacggtcattcctatgtttttcctgtgttttgtaatcctctgttttacacttatattcctgtgagaatcctatgtttttactattcctctgatttttcattcctgtgattcaaagggtcgattttgttccggaaccggtacagatgattgaagaacatacgatatcaatacgtgacaaactgacaatagaacggcaataattcatagagttcggaactctcactccccggcacataaaacaaagtagcgtttagtgcgtgattaattatggtttagctatttttttcatacatggagtataattttataagtaactttcgtatagaaactttttgtaaaaaaaaaagtaccgtttagcagtttgaaaaagtgcacatgaaaaacgaggaagaagagttgtgaacggctgggaacgaacgcatcctagatcgactgacaaaagcaccaccaacacataagatagctcaatggccggacaaggaacatgaacgttccaacaaaagcaaacgaggctcccgcgcaggcgatcacatcacatcaggccttcctcttcttgccaaggaagacatctgtgagcaccgtcttcgactgcagcgacgccttcagcatcgccaagccctgcaatagtgttgtacaaaattgacaaacagatcggaacagagagatgagagtacgcactgcaagcaatacacattgctcgtagagaaatagtagcactttacctcagtgtagccaatctgcacggtcttctcctggagcgaggtgatgtcagtaacaccgaaggtggtgagcagcgtgatgccggagatggtggacatgggcgcgaccctgaggtcatccatgatcgtgtacgtcaccaccccctgcacaaatcccgtgccggcaacagcatatgctggttgcgccgcctcgccgccgctggccgatccggtagctgtagtgctcgtgctcgacaccacaagcttcattgccaccgtcatcttgccagggcatcgagcgatctgacaacgcaagccactcaccgtggaaacatagtcatagcactcgttgtagtcgcacgagctgcagcggtaaagtttcgtggccagcggcgccgccgtctccggcagctggaggagcttgccggtgtcgaagccaccggccggcgcgagcagcacgttcctggcgtcggcggagcggacgtaggtggcgtcgaggtcctcgacgctggcgtacagctcgccgatggagccgaccatggagtccttggagagaaccttgacgacggtgccgacggggagggtgaggagggagaagaggaagtcgacgacgtccttgccggcctccgcgtacagcacgcgctgcgccttgctgtccaccagcagcttcatgctcagcgccttcgagctggttgtctccgtcgccatcgtagcaactagcaagtgcttgtggctagcttggattggcttgctgtgtgagcagtagaatttatagcgagcagagacgagcaggaaggattacggacgagaggagagtaattagccgcccactgtaaattttcttgatcgatcaagcttttttgcatgcaaaaattgcagtcccaatatatgcgcgcatgtagacggtcaaattaataccgatcggttcagctccgccgcacgtagtatcagcacttgaatgaatcacccatttatgcgaggcaaccgaagcatcatgaatgcgactaccggtgcgtagaggaggttaatttgaaaagaaccaataatttgttttttttttgcgagatgtagaagttgaatttaaacttgcatgtttatgaagtgatatatcacatgttaatacgtcttcttttttttttcaaatttatttaagtgacatgcaaataacgagatgatatcctctcgagggataaaaatccactccccgaattatgaaatcacttttcctaataaaaactttaatgactatttaggtgtcacgcccggaatttctatccaaaattccaaacgcttacatgtgtgtgaacccttgtccaggaatcagccgaggcacacaataacaaattgataatagagtacaattattactctaattaataagcgaataaaatgtcattacagaggtagatagttcctctcaatcaataaagatctaagcagcggaaaataagataaacggcgcagacggctccactccacaggcagcttgaccaaggctacacctaatcctccacaccatcagcatcattgtagaactcttcctctaatgaatgattgcaaggtgagtatatgacatactcagcaagccacgcagcaaatatgtaagtgcacatgataacaaaggatggcatagtagggtttcatttgcaaaagcagcatttagcaaacatttgagaatttaataaaacagttaagtattaaacaatatttgtcggtgatatgggaccaggagtatcatgaccagaggcttgaggcagacgcaatcgcccacgtggcctggcaccttcggggacgtcgggcccgagggtgaggtgtccgccctcctcctgatttcccccgagggggggtcgggttacgcttgccccggccccgagggccgaggcaccccgaccccttaaagaagtctgcgccacatgtatgggataagtgagcacagctgtgctcacctaacagcatttattacagtctggtcaagcgtgtcacgctgcatgtaacgcagtacagcacgctcttttatccggtctgtgaccagtcacagaccggtcagatcaagggttaggtggcgactggcggtctgacgcgcgccttgccccatcccgtcaagacgaaagcctctaggcaactcgtctcaagccggagctagcgtgttatctcttagagatggcacgttagccctggttagatttataccaggcttcatcctaaccattacaggcaaggtgttacacgaagaagggcaaacatgcatcttgttaaactgacacatggtggacaaaagtgaccagtctgacactggtcgcgtcagcaacgggcagccacgatcccacgttgtgcccgtctccgccgggagtggaggtaggtgtgggctgtcccatcgaagtgtcattcgaacagcaaccataccaatctccgtccataaagagaagaaaagtccagtttggaaggaggagggtgcatgtggtatccccttgaagtataaaaggaggaccttgcccatagagaagggggttggttgattcttttccagatttagagcttagaacgggggagaagttggctgacacttggtagctcattcatacaccaatccacaaaaacacaggagtagggtattacgcttcccagcggcccgaacctgtatacatcgccgtgtctcgtgtttcttcctggcacgcgatctttccacacacagcgagagcttgagatctcaccctaagcccccggccgaactggcaaaggggggcctgcgcggtctcccggtgaggagccacgagctccgtcatctggcgcgccaggtagggggctcagtgtgtgttttctgagctctcatactcttccgtgtgcgccaagtttcccttgttctgcctaatggccgagcaagcaaaggcgcacgacctctctccgagtgtgagcggcgacgacggggagccaaacccgcgccgtcgagctcgtactcccccacctcctccacgccaaagtcctaagcagggggaggcgctcgagagggttgataaatccgcagcatcaccggtcgtgggtgatgcaggagaacggcgagatggggagcgtcgcctcctcgtctacggcgacggcagcacgcctcagggcgcgcttcaggctgctagcgcgctcctacgtcacccacccgtcgtccatgaccctgagtctccagctcagcgatggctggacgacgtggccaacttggtcgtgacggcccagcagcgcctgggtgctggtggacggtccgccaccaccaagacttccggcgccgccaccaccggttccgtgtcatcaaggcggagggcgcggcgagcggcggcggctgcacgtcattcggctgccactccctcgtcgacaccttcgactcgggaggatcagcatgaggagccggatgcccgcctcaacatcgagcgccggcgtaatagccggcgtactccccgtgcaacggagggcgcctcctcgtccagagtgtcacctcgacatggacgtgaggaccagccctccgtgcccccggctggtggtgtcggctgtagagcctttgtggcgagtcttcggaatgtccgttggcccccaaggttccggcccaccatcaccgagaagtatgatgggagcgtcaaccccaccgagtttctccaggtctatacgaccgggatcgaggccgctgggggagacgacagggtcatggcgaatttctttcccatggccctgaagggacaggcacggggttggctaatgaacctgccacccgcgtcggtccactcctgggaggatctgtgccagcagttcaccatgaactttcaaggcacttatccacgcccaggtgaagaagcggacttgcacgcagtacagcggggggatgatgaatcccttcgctcgtacattcagcgtttctgccaagtccgcaatactataccttgtatccctgcacacgcggtgatctacgcgttcagggggggtgtgcggcacaaccgcatgctcgaaaagattgcctccaaagagccccagactaccgcagagctttttcagctcgcggaccgagtggctcgtaaggaggaggcctggacctggaacccctccggttccggtgtggcagcttcggccgcccccggatccgccgctcagacagggcggcgtgacaggaggaggaagaaaaggtcggtccattccggcgacgagggtcacgtcctcgccgtcgagggcgctccgcgggccactcgaaaggggaggcctgcgtgcgacaaaaagaaagaggctggtactcccagcagggagcgccccgccggcaggtggtgctccgtccacaacacctccctccacgatctcgcggactgtcgcgcagtcaaaaacttggctgagcgaacgaggaagtgggaggaggacaggaggcaggaacgccgtgaggacaagtccgcggcagttccctccggtaaacggcgaagtgaggccagacagaaggcccccgccgttgaccccgatgacggtgatgatgacctaggtttccaagaacctggggccaccatcgccactgtcgacgggggagcgtgtgctcacgtttctcgccggagcttcaaggctatgaagcgagagcttctggccgcggcccctactcatgaggcgacgcgtcgggcgcggtggtcggaggtggccctcacctttgatcagaccgaccacccaccgtgcgttgcccggggagggcagattgcgatggtggtttcccccactatctgcaatgtgaagttggggcgtgtcctcatagatggaggagcggctctcaacatcctttcccccgcggcctttgatgctatcaaggccctggggatggtgctccgaccgtcccagccaattatcggtgtgacgccggggcacacgtggccattaggtcacatcgacctaccggtcaccttcggtggacccgccaacttccgcacggagcgggtgagcttcgatgtggcggacctcagtctgccctacaacgcggtcctagggaggcccgcgttggtgaagttcatggcggcggtccactacgcctacctccagatgaagatgccgggccccggtggccccatctctgtccgtggcgaccttaaagtcgcgctcgcttgcatggagcagcgcgcggaccacctcgctgctgcgaccaagcccgagggtggtgacgagaggcttggcacctccgcccccaccgccccgaggcagcggattgccacatgcgacgaggtcccggtcaaggaggttgccttgggcgacggcccatccaagaccacacggatcggtggtcttctggatggcaaatagggagacgcgctcgtctccttcctgcgggcaaacgctgacgtcttcgcatggagaccagcggacatgcccggggtccccagggaggtgattgagcaccgtctcgccgtgcggccgggcgcaaggccggtccggcagaaagtgcggcggcaggccccagaacgtcaagccttcatccgcgaggaggtggcgagacttctggaggccggattcatccgtgaagtcatccatccggagtggctggcgaacccggtggtcgttcccaaggcgaacggcaagcttcggatgtgcatcgactacaccgaccttaacaagattaagttgatctatacaaaagaggcatgaaggccttagaagaaagaaaaagaaaaaatcaaagattgacgggggctcgggggctcattccgacgcgcccgggtcgccggcctcgtcgccaccgtcgtcctcaccactggcatcgccctcctcgtcggagctaggggcgaacgcgagccgaggggccgagccctcgaaaccgttgacgatgtggtcggcggcatcccggacgcgcgcgcgcgcgtcgtcctcggtcccgggagggaactcctccagcgccatccatggagagaagttggggtcccgggcctggtagctcgccagcacgagttcgaccgctccctgcgcgaggtccctcgaggatgacttgatggtcttctcaagctcctcggggagttgttcgagaacccaggccatcctgttgaggtgcggagcgaggccttccagattggtggggggcaccgacgtctggcctctccagaggcccgcttgccgaccggcgcgcttcatgcgggagaccgcatcccaaagcatgtcgggcccaatctcgcccgccaagcgaagggcctcggcctccccggtggaggagtccagcgctcgctgcatttccgcgacggtgtgttcggcagctgcgaggcgggcggctaagtcgctttcgcccgcggccgccccgccgataggcgccctcgcgtccagctccttttcccgcgcctcgaggtcagcagcccgctgttccagtgcggctctctcggcgcggacgcattcaagattgcggcgcgcctgctcctcctgcgccgcctcgcgaagggacaggctgtccgccagccgtttggtcgtggcctcagcctcctcgagagcccgctcccgctcagcgagtgcgtcctcgcggaggcggagcgcgcactcctcctcggcgcaggcggcctcgtgcgccgccagcgtcgcctcccggagagcagcggcggcctcgcggtccatcaagcccctcaccacggtgccggcgtgttcttccagcgccatggcacgggactcaagggcctcctcgcgccgccgagacgtcgcttcagtctccgttacccgccgctctcgggcagcggcggagtcaaggaccccttgggcggcgtcgagctttttcttcagctccgcctcccagattgcgtgttgaaggcggagggtgtcttgcgcctcgatcatcgcggtggtggcgataagggcggcctctcgctcctcctccacctctcgggcgatctccgccagcgccgccttgcgggcttcaagctccgagatgtggcggcggtgagccttacggcccacctccaccatggcgtccaccgagcgccgcccctcctcaacgcgcgcccatgcggcctcgagctccgctcgttccgcacgcagggcctccacttgggcgttgaacccatccagcactgcggtgtttgcggcggccagggcctgcagaaggggctcggcgctcagcggggcgacagaagatgaggaaaagagccgccttggagaaaatgcgacgcggcttggccccccggaggatgcgctgggctcggggatgtcccccgggcccgtttggtcctgggcgtcgcccggtgaggtaggcccaggcgatgcgccagcggcctcgtcgcgagccgcctcggaggatgtcgcctgagggccgcccgagggagtgggcccaagtgacgcgccagcagcagctgtcgcctcagcctggcgagcccgggcggcctcctcccgggcagcttcttcggcttggcgagcccgggcggcctcccgggcggcctcttcagcttcccgaaggcgatctgcggcttcacgccggtcagcttctcgcctccgctcctctgcggccgccggatcttcggcctcggactggccggacttggggtggcgggaggaatgtgacggggcatcgctgaagcagaataaaaaaccagaagacaaacaagatgggtaagagaaaacttgcttaatgggatagaagaaagacggtcgcaataagaatggggcgaacctgcgagggggtcggttaaatgaccactttggaggggaaatcaggtttccccgggatggttccgtctcccccatcttgcggagccgcttcttcttgcgctccccctcgggctgcgacgtcggcgcggccccctccgggcgccgactgctggcacgcgccgccccgccccctcggggaggagatgtgggaggtgttcctcccagcttcctcttcccctgggcgtcggcagggcggctgctccccgagcccccgacgcggggcccagaagcacgaccccctcctggggcagattgttccccccggcggcgctcgcccgcgccgtcgtggcccttaggggctctctcctctgaggccccgacccccatcataatggttagaatggaggcgcggtcgggatcgctgtagagggggaggatctcctgaggaatgcgagacgcctccgcggagctaagattcagcaccctttgaaccacgatcttgaagtcctcgggagcccaatcccatctggctccctgatgggtccgcatgtagtcttcaggcccagtgtactcccaggcgctccgggcgcgccgttggagcggcgcaatccggcggcggaggtaatcgccgtacaccatggccccggtgagcccctgggatcgcaggcccgccaggcggtcgaggacggcgtcgtagtcctcccccagatctaccggcgcccgccagctggagacctgcgccgggggctggcttggaagtcggaggcgcgtttcgttggcgaggggggtgtagaaccagtcgctcttccagtcgtcccacttcttgcggaggacgcaggggatgtagcggttcaacaccggcccccgcggctggaagtagcagccgccgaccaccgacggcggtgacaccgactgcacggtgaagaaccaccggaacagctgaagagaggggcgcaccccaatgaacatctcgcacaggtgcgcgaagatggccaatgtcatcaccgcattgggggtgaggtgcgccatctggagatcgtagaactccaggacatccatgaagaaatgagaaaatggcgggaccagcccagccattgcgaaggggaggaagaagatggaccgccccgggtagtctggtgccgggcgcccctcgcccagcatcactatctcccgaccggtggcggactcaggcatgaagcggcgcggcagtccggcgtgcctctcgttcacgatgcgggaaggcggtagtacactgccgtcgagcagagcagagccccgtgccatggcggtggaggaagagatgattgagaacgagcgcgtgtggcgaaagtagggcgtagcagagaaagagttagagctcaggcggcgaaggcaagaggagcaatggcgaaaggaaggaagcaaatccttttctcgatgcttttatacccttgccatcgctgggcctggctcctcgtttctcgcgcccactacctcgctccttcgtatctcgctatctcgctccctcgtttcccgtccccacgcttccactaatcccattcgcccgcttacggcgcatgaagtggatatgcggttgaggcgatcgaaacggattgtatcgtgcgcgcgttaattacgctcgccgaccgaagcggcgttgccgtatctccgggcgagacgaatctgctcgcccagattcgcgcgctgctcaagtggtgtggcagtcttgaatagaccgcccattatggacaaccaaagttaccaataccaatgtgcatggattgagaccgttgggtattttgcccaactacggagaccggtcccacctgtcaccaggctttaggggtggtgtcggtgatatgggaccaggagtatcatgaccagaggcttgaggcagacgcaatcgcccacgtggcctggcaccttcggggacgtcgggcccgagggtgaggtgtccgccctcctcctgatttcccccgagggggggtcgggttacgcttgccccggccccgagggccgaggcaccccgaccccttaaagaagtctgcgccacatgtatgggataagtgagcacagctgtgctcacctaacagcatttattacagtctggtcaagcgtgtcacgctgcatgtaacgcagtacagcacgctcttttatccggtctgtgaccagtcacagaccggtcagatcaagggttaggtggagactgtcggtcttacgcgcgccttgccccatcccgtcaagtcgaaagcctgtaggcaaatcgtctcaagccgcagctagcgtgttatcttttagagatggcacgttagccctggttagatttacccccccccccccccctcaccacctccactgccccgacctccatggcttcagtccccagtggtctggtctctcgaccagattttggtagctgcatggtggcggtgacaagcgagatgaaagattgaagcaactcttcacggcaagatcagtggtggcttggtcagatgagggccagaaggtggaaatcggcacctttgccgatgacagggctgcaggaa

SEQ ID NO: 7514 - DNA, 6042 bp, Oryza sativa
cagtacccgtctcatttgctctctcctatcatggacaagctgcggggatcggagctgctcaccacccatgacgtccgggccatcatggacctacttcttgcacgccagtgcctgcctgccaacatggacttcttgtgctgcccaaatggcgatgcttgtgctcatcgagccaccaaccatggcaccctgcaggttgccacctgcattgggggaggtgcttttgctcgaatctcgaccgaaatcgtaaccccagatcacatccgacctcagcaactccaatacatctccaacctgacatttgatgatagctcagccatggagatgaagctttccaagtgcagtagtggtggttgtcaactggactatgatttttcctcgccatgcgagtacatactgtccctgaaaatgtgcctccttgatgccatccatggcttctacatccgggcactcgccgtgctgcccacgggtgacgactccatgcgccttggccgccttctccgtgccctccttgtgtccggacactgctatggccccttggatcctgtgtcaaacataatcctgaatgctgtcttgtatgatgccgcataccctccgcaaccacacgaaggtgatggcaaggctgagttaccacatgatatctttgacacccgcgccatgcgggacatggcgtcctgttccctcgatggcctcgttgccctcctctgcaccatcaccaccaccaccactggcaccccgctctcaaagcatgaggctgtggagtacctttggtcctggcagtgtgacctcaccgagaagctgcagcagaccgtgatggcaaagaacccctacgccgctgcagccatggcttccaagcacccacagcacaccatgctcggcgcgctgctcgtgtccttctccagcgagaagctcgaccgcctgcgctactttctgagatccattagtgatggctctgggtgtgttatctccggtgatgattgggagcagctaaacaaaatgatcaaaacacagctaaccacaattatcacgacaagagaagtgctaccattcaatccacaagccttgtcagcatcattgagagtgtcagcctatgtgaactcgcatagttttgctcgcagcaagctggaagagttgctactgagatattctaggcaacatccctgggtaaattcagagtagaaacttattttgattgattgttggacctgcttctcttcaagtgtgctaaaattccatccaccctcttgtgtttgttattgcaggaaccaaggtataagcttgatctcatctgcggagtagaggaacccagatcagcccgatgtggatgctaccatgctaacttcttggcaagcgcccatggcagtgtgctcaagttcaatggtgagacaaccgtagcacaaaccactgtgcgcagactcttcttcgctgaattctgggactcacaacctggtcgattttatgaatcacatgcaaaacccatgtgctgccctgttcaagatagtagcccttgttttggtgagtcactgaacccttgttgtgatgttcctactcattttatttccgtcaagtagtagacacactgtggcatgtgattgcaattttcatgcatgttaatgccctggattggtgtaatatatttattgttttgccttatgtcttggctttgttgtgaacaggtcgttgtatcttctgtggtgaagcaagcacgattgtgcatccaccatgtgcagctagaagtcatcttgatgatgatgattatgcccccatccttgactatgatgtccaggccgccattcgtatgtatgtttctgtttcacctatttgtatctatggttctgttatccaagcttagcaaaaacggggcctgttaagagtccaacatcacttattgatcatgaaaggggatcaaaacagaaacaagggcttgtttttgtttcacccattcgtatctaccgttcttgtcaaacttaaaaaaaatttgttttggacaaagagtttaaagaaaaaatcacaatcaactaagaatccagattggaagtcacaatctgtaaataggactgtagatacaatgagtgtgttctcagggatgtggggattattaatgaaacaccaatgaacatgggagattgtttgaggaaaagaggtgtgataaataccgggttatggctttgtggctgacgaggaatgatttagtattttgataatgtgttggtgtcatctccattgcaggtggtttccaaaagccaaatcaggtaagaggaagaactaaggaaaaggctaaaggaagctggtagtgtggatgatatacctgatgctatatagttatataggggtcgacctatgttttgtttcagaagtttggttagatggagtccgcttagatggttttgaaacttatgaactcttttgaggtgtaatcaggggatgttgctaacttgggggaagctggcttatgagtctcttaggctttctcaacttgttgtcaattatgttggaattcaggtggatgatatacctgatgctatatagttatatagggtcgacctgtattttgtttcagaagttcggttagatgaagtcttcttagatggttttgaacttatgaactcttttaaggtctaatcaggggacgttgctaacttttggggaagctcaatgcttatgagtctctcaggctttctcaacttgtcaattatgttggaattcaggtggttttccttctgattataactgaatgaaagtcacaaaggatgtttaatgtttgttaagattttactatctctttggtttgttggttcggatccagatcctccgacattacggagtaatgtcacagtgtgacattccttccatccggcacgttcattctaaagcaacggctgtggattatttagtctataataaataaaattaatcagcagattatttcttaaatagccctgcaattgctagtggtgagagcgggagataatttctgtttactcctctgttggtgccaaaataatccctccatcttcgttaccattaacccactgacaaaagtgtcgtacttataagaaaacagattgattatagactgaggattgcatcgtctcctcatagttctgatgatggaggatggtaccgtacaaatgagaatgatgcacatcattcttcacttcctcaacggcccgatattgtgccaattgcagcatctaactaacaggtaagtaaaacctaaatatcgtattgtgctaagttgtccgcttattctcttatgatttattagtgattgttgcctcctgtaaaaatgcaccatctagtctttcatatgtcaatctctttctctctaactctaccctcttcacttttgttctagtaatatgcccatactaacgctacagcgatagttagtactgcgaattgaacaatcaaatgcttaaagatttgtaatacattaatcatctaaaaataatttcatattcctgtaaattctcgtacatgtagtaacatgatacaatttaccaaatctaggctaaacttttcaaacaaaatagttattaatcagcacttaatgctacattaccattaacatgatcatacatttattttacaatcatcgttctgtacaaacatgtatttcatcacgggacaaaatatcttaatgggaaaattgcaccagcgctactggtgaactttcatccgtagttcctaatattttcattgaactatcatccatgacagagcgctgatgccctttcaacaatgggacactgcaagcaagaaaagcatgaagatagtacaattggtcatagcacaaatagagcaggatgacgaaaaatatttatttgctccgaaccagagtggtgaaagaaaagatctaagtcatctattcggatccaacttatatgttgccgaatagtaaatgcaagtcatctaaaaatgataaatggtacaatataaattttgcactctcttggaacaaatttaatctgtatgaacaaaaataagtgcacaaggcattttaacttttagcaagctgacatgaaaatctcaagaatgttagcttaacaatttccgtataacaatgagcttaagcttcagcttaaacctaaccttctctctacagactgagagaaccaagagagaaaagggacaatttaaaattttgtgtgtttcataagtatactaacaagcaaaaaagcaaccttcgattaagtacacagttttgtaactacttcaagacacaattctgatgacatcccaccattttaatttcttaaaccatgtgctacaggcatatttaggacaataattgcaaacataaatgcagagcatgatacatagaggataaacaattcatgaaaaaatattagttggtgcctacttcaaattagagttctgaatttggaattaaacctactcgaaagtcagctattcaggcattctgcaatcatgcggaacagccatatcatgcatgcatttctgaaacacaaaacaggctttctcttgcaatatgcaagatctcaaagacaaaatgagatcagaggatttgtttttcgctttttctttttagacaaaatgatttatacagaagttgggaacagttgcaaaggggaaaaatatcaaaaaaaaaaaaaatctatacctcatctgacaaatgcagtgaactgaggatgcaaagacgtccacattggaagtaacataaaaaagaaacatacacaaggaatgcagtaacacgttgaatacacaggtgtttattcgtacctagtgcagatcaatgttacgtgacaagtgtttgatgtcagtcagggacactgttgaggcttgcaaacaagtcatcgcttatattggaatttagaaaatctagatcagattcaaattcatttgccaattagtatcttcttcctacaaaatgaagcccagaaactatggcatactgtatatagctattgtatgtaatcttcaaaataaatatagacggttccaatgctagtggtttttagagcatgattaaaaataaatatagacggttccacatggcgaaggcaaaccgcagcgtggagcacggcacgatgaggtcgtcgtcgacggagaagatggcgtcggaagggccagatccagcggcagcggcggcggatcccaggcacacgccgcgccgccgcgaggccttcccggcacgctgtgccgcctcctcgcaccggagacgggccgccgctggggtttttggccccgccaccgccatcccagcgtccacgcggttttcggcggcggcgaggcggtgagaggaggggagggtggcagcggccgggggctagggttcgcccccggtcgcccgcgcgtggatgacttctttggtgttccctcatacaagaatgtgtcggtcgtcttctttgcctgcaggctgcaggtgtcggcgtcggcctccttgttcttcatcttcctcctcgggctcctttgcgtcagcagtaggggtctcgacgcgaggagaggagatcgtggcgatattggggtgggggtgaggtaggcgcggatgcggtgcgggagaggcgggggatcctgagtggcaggggcggtggcgcgggggttagggttgggaatcgcgagggaatcggcgggggccggaacctgaaagagggggagggcgtaggcgcaatgggggcgtggtggagagcgatgggggtgcggggaggagaggagggggagatgtggagtaatctgaggcgttggattggatgattttggaccattggatgtgtaacatgatgaatgatgaatgagtaaaaggatttgttgaactatagggtagatagatagaagaagaaaactatacctagctaggtaccccagatgcgcatgacatttagcactgtagatgaggctcaaaactattggaattactatggaggtcaaattggctttgacattagaaaacgattatgtcatgtggggacaccactaccaccacaggagcaagccggaggcgcaaatgcagcaagcagcatgagtcaagggtgcaaattagaaagaatcatgcaaggaaagtattaattaggagaaaataaa

SEQ ID NO: 7515 - DNA, 8878 bp, Oryza sativa
tgtcgacaaccacaatgcacacatgtaatgtgcatgtaatgaaaaagtgaagagtaaattttacaaaactatagatattctagttaaattattataaaaccacagatttaaagcgatgtatcacaaaactccatatttaactaaatttatcacaaaactacaaagatttatggtgaagtgttatatttgagttataaaagtctaagttttgtgattgacttgacaaaaaaaactgtagttttatgataattttgatgctaaatctgtagttttacagtactccaccttaaatctgtagttatctgaaaaaattagtgttaaaatgtagtttttggtacatcaccttagatttatagttttgtgataatttgaccataatatctgtagttttgtgaaatttacttaaaagtaaacttacagatggtatactaaagtatgtgatgttttctgtcttaagagatatcttttgtctaggggtctcatcggatggcttatttggttgaggcttgggccaaggcttttcagccaaacaagtgggacccacaagtggtggataattatgtgaactctccagtgaccatacacaaaaaataaaaatccaaataccaccagccacagaaaaatccttcaacagccatataagcaaaataagccaaacaatggctgaattgaacttggcagatttggctgatcagccaaagcttcatgccatccgataaggccctaggttatacacttctttgtaaaatatagcaactaataatctaagatcagattggacactctgtaatactatgaatctgggtaggctctatccaaatcactactccagtatagtatgtgtctaatctagttatagcttggtatatttcgaaacggatgtaatattctagtaagttgtgcatgtggttggccaacagataaacatattttttttttggatttgtaaggaaatacaaaaaatagcactattatggtatgtactttctccggtttcatcggtttcataattcttagtgttttggataagattgaggtcatacttttatacctttaactatcaatattttaaaagtatttagtttaaagacactagatttatttacaaattactataataatagtaaaaaagacatttatttattgtatgtattgtaatagaaaagatatagtcaaacatatcattgttcaaaacataaaaaattatgaaaccggacggagtacaataccaatataagtttgctgatgtggaagaaatagggaaaagagagataaatatgataattacttatgataatggtttaacatcgacttagaatttataaagaaaactttttctgcatatgaatggagacaaggaaagcgagctaacaaaaaaattgatttgttgtattacctgtgagtcttttatcatctcagttgttataggagagatcatatcatgatctacctttgaacatctccttatattttcagtcatcctgtgatccaatcctagcatgatcatgaaaatatcccatctctatgtgtttttgctcctattttattggaatggacaatactatcgaagccaaaaaggttatgcttatatgttgagctttgaattgctctaatttgtaagtgatatagtatagttatatttaagttttaatatgtactactcctatattactacggagaagattctgcctccggtgaggacacgtgtcgacgcgcgaacataccctttctcatccctctacttctacccaataccttaatttaattttttctcgaataaaccttatcttctcactaagctttacatgtttagtgagttgtcacagatctagcgttctttatttaccgtcttctaaagtgttttgatttaaaacaatttaatcgagttacttcctccgttccaaaatacgagagattacttcctccgttccaaaatacgagagattttttatcggatgtggcatatatattttgtaatgaaaatccctagtattttgaaacggagataatatttcataatgggctgcctgggcctcagggctccctgagcacgcggccttgttactcgatcttcctccacgtcgacacaataccacacccatccccctgcccttcgccgtctcccacctccacctcacctgcgagcagcggtgcctcctctcctcctctgctgcctccgccgcgcgcatcctcctcccatccatctcttctcggcctcggcgcccgtttcctcgctacttcgccgcctgcgccgatctccattaatccatccatcccgcgagggggagcagcggggtaggggtgccgtcgtcctgccgcttccgcctccggtgagcgcccgtgccgacgcgcgcgcgcaaaccctttctcatccctcccccttgtacccaatacctttatttttttttctctcgaatttgccttagccttatcttgtcatgtactccagaatatattaggagtagatctatctggaagctaggttttctctctgtcttaataaccctttataggactgacaagtaataacagtttttgctaccccgtctaaaagaaatatgttaggttgcttaatttcctaagcatgggttgcagtggatatcttaatcaactcacaaatgataaaatgatgtgtaattagtagtagtaatttgttaagagggattttgaggtcttgacatgtcatagattgattcattcggaggtggccactacagttacagtggctcagcatcagaagatactgatatgcgcgccttttgtggtgtttagagctacctctctttgatggcatggcatcttgagaagttgtcccttgattgcccgccttctgtctgggctcgatgaccacatgattgttgcttaaagttcaccttttgtgtgtgcttgtgttacatttgataggataaagttaccctttggtaccacatatggtaactatgagtgccgacatttgcgtttagtgtttagaatgtgacgtcatttacaattaaaccttttcaaagttttgggaaaaattaatattttttatggctattatccatttccattacgataaaagattacgaaaagtaaaataagtacattgaccaacatataatttgaacataacttcctctgaaggataacttagatttcagctacaacttaggaaactatttactcacctaagagctaggtagctaaacatgccatacgctcagacctgctacttctagaacctttagatccccaaacagggccttaagccattataaggatttgcaacaggtttcagtcaaaactagtgctaaatgtttggggccatttgccaggtgaggaaggagggtgggaatggaactaggaagtgaatggaaccacaaggaactattctctcatattgtcattctccaccctaaactgtgctggcggtgagcactgggaattggaaatcattaaactccacattgattgatttatttcttaaacggaccatgcttgttccgatgccattgaattgattttgattgttatgtagtcatgtggtactggtataccattattcttttcccttatattttccacaacaacacccccatgctccgcacaagtcagccatggatgttaaccatcaatttgtaaatactgccttcacacttctagcatctagagtcacttctgccaaaattatgcagtgccatggttcacagggacaatacttgagcagatttttttttaaaaaaattctggtctgatttggagagttatgggattggaatgggattcctctagtttccccagtgcccttatccctattggttaccggtggtgcatttctcttttttttggggttaaaatggaagtactgattgcatgctggttctttggattgttaattattttctgaatgagcaagttgcggactgcttttataggaactcatataatgttttggtagataggtcttccagtgttgaattatatcttgtggcataccttgtgccaaccaatggtattatttttcggtctgtcagaaggtattgctgacatttcttaggcaaatcagttggagagtctccctctgtgttataatgccttgttagcattattttattttatttcatatccatccttgcggtgctgtttaattaatacatattgttttttcataccgttagtgatgaacctaatcatttacttttgtcgcttccaggactagggatcatgtcaggaagagatcgtctgccacgtcgctttatagaggatggcaggggctaccctgacatccgtgtagttgatgaacgtaggggctatcctgacatccgtgtagttgaggatcgtaggggctaccatggtattcgtgccattgaggatcataggggctatcctgacatccatgaaggccttgtcatgagggttgcacctcgctctcacacggctatgccggaggaagaaattgagattcagggggccgaattcaggaggcttatggcagatcaccgtgctcttgctgaagaacgtttggccttacaccgggaattacaagctggaaaagatgaggtccgtcacttgaacacgatcattgcagacatcagtgccaagaaggaaacttatatcggtgagcttgttgacaaaaggaggaaacttgaagctgaacttagagcaaatgagtctttaagagatgagattgtgcagcttcggggtgaaattgataagcaccttgtagtcaggaaagagctctctgcgaagtctgcatctatcatgcatgaactaaccagggaacaatctaataaacagcagattcctatgttgaaagcagagattgatgcccttcgacaggaacttgttcatgcaaggtgtgcctcttttgctagctctgattctcagatacctttgtaagttattcagaggctttaagttttaagattgatttgactttttgcaggtctgcatgtgaattagagcagaaaggaaattttcagttggttgaacagaagaaagcaatggagaagaatatgatttcgatggcacaagaaattgaacaaatgcgagcagaattagctaattccgaagggagaccatgggccccaggtatgcttgggtattttacagcatttgtttgttgacctctcatttctcttccatgcgtgcttcatttatttgacagtaatcgtaaatgctatccctctgttaagagaaaccaatcagagttttagataaaaaattgcagtaggcttgtgtgtatggctaaaatcatgatgcattcactttacattttaacctcgaaggactgcatgaacttctgcatattgttgcatttctattgactatgcatctgccatctccagtaggatgttagatattgacttgtttttgctgtttcatggggacagcacttgtgattatattgtctgaattttgtctgtatgggaaatacttgcattgtccccaactccacattgagccttaggtgcctttacttttgacctgtagatttcttgcttgaaggtaattatcaggtgcgctcaagtcatcatgaagtggattttggcatttgggtaattgcacaattaggggccatatatttccaatatagtgaaggaaccaatactatattatgttttgtcccatctttgctgcaacctatggagtctgattcattttgtctaagcatagcatataatcatgtctctacatcttttttccccacttcttttatcctcatctgtttaaagggtcatcaaaatcctccaagatttacctagttccattgcttcccaccaaaaatcctgaaaagaagattgtgcatatcagtgatgaaaatttagtgatcttgatttcttgctggagaagtcataccaattcttgtttattgagatcaattatcaatagggcagtgaacagctgcgttcgttgtaagccacatctactgagatgtgggctgtctctgtctagtgaaagccgcaagctgttatagtgtcatatatactttttttttctgtgtgtggccggtaagtgaggtccagcaaattgttaacactaacattggcagtttggcccatatttattcatcaactgggttatgaaggagagttgacttagctttagctgttccatatatttctatttattgcaggacgcctggacctagtgctaagctatttaaaacatttagcaatgtacatatggtacatcaaaatatattaagcttgctttttttttttgaaaagttatgagcaagctttttttcccttgaaaagtcataagtaagcttatttttttctgaaagaaggaaacagtctggtgtcaactaaatcataagtttgagattaataattgaccatttattttccagtatcctaacatttaatttttggcctcctatatgcccgcacgtttagcatagtttaacagtccaatggggcaaattcaggactattccttatcaatgatgagttcttcaatcacgcagacttgtagtaacaatgttctgaaaagcactaagtgaatggcacctgctcactgatcagtcagactgggcatcctcctaggcatgctatacagcaataggcacaaggcaggatacctaggaggtctagacagctgccttagcctggagggtggttttctcctaagtagattcactggaacagtttatattgctttagcattgacacattacatttctatggaacaatgtagaacttttttcatggttgtttacctgatgtttaaggtgcgacatatgggatgaagctgggcagccctgaagtgaccttccctacttcatatggagataactacaatatccatgtggtacgataataagaaatatagcagatatgatacttcctttgttaggctgaaatgactcctacttacttttttctaaaattactattttgttaccagggaggttccgagaaaggtcattcacatcttcctgaatcaagctcatggggtacatatgacaacaatcgccttcagtaccgttaagatcgcagctgctatgaaaaaagtccgtgaagacttctgggtcccatggtcatatcacatggtttagattatcgtatctacctccttttttgtggtacaatcaatagttatctttcttaattaaaattgaaatgcctctaatcattttcttctctgtgtgtcatataaaatatgttccaatggtaactactgcttatactttggctcgatacctatatccaagtttccttggttatatggatccatgacacagttattttaatatgacttgggtatatatatgatatagtttagttaatgactcagtcatgccacatatggagcatgaagtctgaattctatgtggagatataattaagcatatcagagaaatgttccttccatcatgtattacatgtcattctgaaaaaaaaccagtgagctttttatgaaatgaatacacattgttgcttgtgtttactagtatgggtctataccctagattttactcttgacaataactaatttattgtttctctcacttttagttttgcaatggtatctatgttaagggcgttagtctctttatgctagattatttcaagcgtttattacttgttactagatttcatcaaacatggtcacatgggcagcaagctgttttttgtcgagctctcttgccaaattcccaaacggcattttcttcagataccatacttttcttatctaggttgacgtaggtcaatgcttttaccaatagtgaattgcgataagatgatggctagattaatgtcaaccgctgcatatttcaaagtataatgtatcagtgaaccaaagactgttatcagcagaaggggatgcaaaatagaagtgatgtttgttgtgttagaagttatttgcctcagtcaatctttaaggccatcatacctcgaagaagtctatatttaggatcatggttgccttccctttttggggggttttggctcaacttatatgatgtagtttacctacctaagttgttcatctgaatttgtttgcctttggacacatgaatgatgagtatttcacatttcctatccttgtgaactgttcatgtggaagtggaacttgttcttacataccttttgtgagcttgattagaaagtgcttctcacttatggggtttaaattttaattattaagtctgatattattctgaccgctcctaaaatattttgggactgcgtgtcctgagaccatagtttcaatctcatgtcgtattatagagagtgagcttagtcacagacttggcaggtactaggttttcaccattgtacatctcaatagatctagtggtcagtcaggaacatatttggccattttagaagtctacaggtaatattaacctgtatagctttacatatgcatgagcatatcaccttgtgctccctgaggtcagattaccacggtggctgcaactctgatccacgtgccactttgctacctgaggtcagattaccagagtggccacttcgctacttgtcaagttggccttgtcctgtactggattgtctactgggacatccaacttcaacatgtattagcagttctgctttctggaagtggagttttgataccagcagtttgtgtactaccaaaacctgaggttaatatttgagttgctgctactagcctttttcggggttcatggtggaacgttctaggtgatgttaagctgtacatagtgaagcatcactgttgctaaatttgccctttaccttgtactcttggaatgatgacgggcaaaataaattcttgcaaagtgtaggtggaactatgcatgactatcatcaaccaggtgttagagatgcataaagtggttccttctgagttacatgcctaaattgcaactagatgaacctgcctcctgttctaaatgtgatat

SEQ ID NO: 7516 - DNA, 12204 bp, Oryza sativa
aggaaagtattaattaggagaaaataaatgtcatttccttgtattagagaccaagtgcctataaggcatgtaatcagcaacatttgcaagcaagcaatatgaaaccaaatttcctaatctccctccttccctaatcctcctctttccaccattgagcgtgcatggaagaaccctgccgccgcacctgatcctggctacgaactccgtagctgtggtccggctatcctcaacggtaacgcgcttgacaacgcttccaggcgttcctcttcccactccaacacgccctcaccaccagccgacgcaccaccatcgccaacgccctacatttcttcggccatgtccgagcccaccgccgccgagcttgccgcgctcatcaaggcgctctcggcaaccgtcgacaagctccaggcgtccgtcaccacactccagcaggcatcctcttccaccaccaagtccatcggcgagcaccacaacaaccggccaccgcgattccaaaaaatggattttcccaaatacgacggcaagtctgatcctctcgccttcatcaaccgttgtgaatcttactttcaccagcagcagatcgcggaggaggagaaggtttggatggcctcatacaatttagaagacggcgcacagctatagtacatccaagttcagcaaaacgagggcaccccgccatggcatcacttcaccgagctgcttcatctccgtttcggccctccactgcgttccaacccccccgacgagctcatggcctacaagcgcaccggctccgtcgtcgactaccaagacaggtttgaggtgctccttccgtgcacgggcaagctgacgaaggaacaacgcgtccaaatcttcacggtcagactgcaaccgccactcagcctcgacgtggagatccacagcccgtagtcactcgccttcaccatgagtctcggccgcaagctcgagttgcgcgaccagtgcgccgctaccgccgcgccccagcaccacaaccggtgtggcctcctgcccgcgccgccacagcggctggctcttccggcgccggcgccgccgactgcaccggcccaagcgacagtgaccgtcgagggccgcacggtcaactgcctctcccaggcagagatggaagaacgatgccgcctcgggctgtgcttcaattgcaatgacaagttctcacgcaagcataaccacgtatgctagcaccttttcctcctcaacttggccacgccagatgacaacaacgacgacgacagcacacccgaggagacaggaggaactaacacacacgtctcgctccacgcgatcgccggcgtccgcttcaacgacaccatgcaagtgcacatcaacatgggcggcaccaacctcctcgcattgctcgactcgggtttcacacacaacttcgtctccacggctgctgcgagtctcaccaagctcaagctccttcctaacggcaagatgcaggtcatggtcgccaatggagaatacgtatcgtgcccgggcctctaccgcaacacagctttcaccaccgacactgagacgttccagataatgttgagattcaagaggatttgacttatgtgaagaagcctacgtgtattttggagaccaatgagagaactagaaataaggtgatcaagttttacagagtttagtagagccatcattcggaggatgaagcaacttgggagagagaagatgagttgaaagccgcccatccccatctcttcgccagttcgttcgaatctcggggacgagattccgtttaaggggggtaagtttgtcacacccggagttttccctttccttagatttcaattcactaataaatggtctatagaaatcactttggttaaccaggagaaaactctaattaacaatatatttaataaccggaattgtcagggagaatttttttcgaattgtcgtcgtgcggctggcgaggtgcggagctagaggaacccggcgcaggagagatgcgctggagggcaaggttaagcgcacgaacctgctccgaatatttgaacgcagacgcctggacttgagtcacgtggtccggcaatgcatcaagctttgttgcgagcggcaccaatggctccagcgcactcatcttgcgagcgagatcagaaatttgggcagccatggaggtgaggttttttgctatctcatctaactggttttgtgtgaaggccatggaatcagagccagaggaatctgataccaagatgtcatgagctagagtggatgaaggaatatgtcgaaggttatacttgaaggaagtggagggacgtggccctggacctcgtcggcacagcggtgccgtgatcggcgacgcaccagcgaggcagggcaagaactgatataatcacaaattgcttgattgattattactctgcatctgccgcaatactctaacaaacctcggaagataaaataacaaatcctaacaaacttaatctaaccgaatacctattcgtattgcaccgttactcgtcacgcgtgttgtcgccgatcaagattcctgccgtgacgccgggcatactgcagtgcccacatgacatctctcccccctagagaagcagctcgtccttgagctgaaaactgggataaagagcgcagaactcatcgaagggcatccacgaagcttcagccgctggacgtcctttccattgcaccaacagttcacgaacatcccgagcaagacgactctgaagaactttgtccagctccaaacatgcacggccatgcacgacgtgaggcaatggcggaatgtgatcaggaacagtcctccgaaacagtttgagcaagcccacatgaaacacatcatgcaacttagtagaaggaggaagacgcagccgataggccacagcacagatgcgctccagaacttcatacggcccataaaatttcggttcaagtttgccacgccccttgacattgagagaagcgaccggctgatgaagtaatctgagccacacccaatccccgactgcgtactccacctcacgatgcctatgatcgtaaacggacttgtattgctgctgagattgctccaacctttcacggatagctgccaggaattcatcacgctcttgcaaggactgctgaactgccggcaatcgagctgaacccggttcataagagcgaagaacagggggtgtgtggccatataccactcggaatggagaagttcgaagtgaagcatgatatgaagtgttgtaacagaactccgcccacggtagccaacgcaaccactgccgaggacgatccccggaaagacatctgatatacatggcaataatcttgttggtgacttctgattgtccgtctgattgtgacgaaaagcagatgtgaaattcagttgaacacctgagagatgaaagagttccccaaaaaaattgctggtgaagatggggtctcgatcgctcacaatggacgtcggaatcctgtgcaaacgcacgatctcagcaaagaaggatgctaccaccgtagttgcgtgtaaggacgtgccaacagaataaaatgggcgaacttagaaaatctgtccacaactatgagaatgactgtcttgccgtgcactcggggcaatccttcgatgaaatccatagcaatgtcagcccacacagccgacagaaccggaagagactggagcagacccgccggctgtagctgctccgttttgttgcgttggcaaactaggcaggcacgcacaaactcctggacggtggtgtggtcacgagcaatgtggaagtcggcgcgcaggcgagccaacatcttctgggtgccctcatggccgatgtcgtgggcaagctccaaaatcactggaagcagtggcgacgaggatgacacaaagacacgtcccgcaaaggtgatgaggccttccgtcagtgaccattgtggcggcttgaggcccttgcggatgtcctcggtgaggctgatcagtgccggcgtcgtggccacctcacggcgaaggtcgtcgaatagcccgaaagtcggcgaagaaagcaggaacgcttctgtggtgtgctcgtcgcaacgtgacagtgcgtctgccacgacatttgttgaccccggcttgtactccaccgcgaagtcgaagccgagaagcttgctagcccactgatgttgcggcactattgataggcgctgatcaaggaagaaacggaggctgtagtgatctgtacggacgatgaatcatctgccccagagatagggtcttcaatgcctgaccgcctgtactaagctaatgagctcgcgttcgtatgcagcgagcttcgcatggcggcgcacgatgggtttgctgaagaacgctaccggcccgccaccttgatgaagcaccgcgccaaactcagatcttgatgcgtcacattcgacgatgaaattggtggtgaagtccggcaactggagcaccggtgcggccgtcagggcgtgttgcagctcgctgaatgccgtcgccaccgcctcattccagtgaaagccctccttgcggagcagggccatcaagggcgccgcgatggtgccgaagttgcggatgaaacggcggtagtagcccgccaagccgaggaagctgaggacggcctagatcttgtgctggtccatggcgacaccatcgctagagatcaggtggcccaggtaggatacggcggtcagcccgaactcacatttggagcgcttcaaatggaggtgatcatcctgcaacgtctggaagacagtgcgcacgtgccgcaggtgttccgcccatgtcgagctgtagataagtatatcgtcaaagaaaacgagcatgaaccggtggaggaagggtaggagcatgttgttcattagtgcttgaaacgtcgccggggcgttggtgaggccgaacagcatgacgaggaactcgaacagcccttggtgagtgcagaacgccgtcttgtggacgtcatctggatgcatgcgtacttagtgatagccggagcgcatgtcgagcttggtgaagaacctggcgccgcgcagctcgttgaacaactcctccgccaccgggataggaaatttatccttgattgtcttgtcgttgagagcccggtagtcaacgcagaatcgccacgagccatccttctttttgatcaacaatgccggagatgagaacaccgacgaacttggccggatgacgccttagcgaagcatctcatcacactgtcgctcaagctcatccttttggatgtgggcatagcggtagggccggacggctacggcggacacccaagtggcgctccggtggtagaccgtgcgggtcgttgaagagaatgcggaagtcgtcgagcacctcagccatcagttcgtctggcgcaccgtcgagagcgatgacatgtgttaagggtgacggagcgtcaacgctaacccatgtcactttgttgtcacctgtgccgaacgaaaacgattggtcagcaaagtcccacagcgtcggaccgagcgtgccgagccaatgtgcgcccaggacgatgtcataccctcccaacagaagggagtagaaatcaacgtcgaaagcggacgtgccgatgacgacgtgctatgccgggcagcgtcccagcgaggcgacgcggtcgccattcgcgacggtgacacggaggccggggcacggctagaggatgatattcgcacgtgtgctaccgtctcgctgaggaagttgtgcatggagccggagtcgaggagagcgaggtagtccaccgtcccgacgcatgcacacaccttgatggtgttgaacatgagtgcgcggataccggccagggcgtgtaaggagatgagcagcttgccagcgtcagccaagattgtgttggccgccggtggcgggtcgtcctcgccctccgtgtcgtcggggaagctgatgacctcgatgatgaaggatttctcgcagtgttgcccggaaacgtacttttcatgacagttgtagcagaggccctcggtgcgtcgttgtgccatctctaccggtgacaggtgcttgcgtggaagtgctgccaccaggggctgcttgccggatgcggtcgtcgacgcagcgtcagttgatggcgttgaagacgccgtggatggtgcaggcagcaccatgcgcagtgcgcggacagctcgctcgggaatagggtcggtggcgcccaagtggaggcgttgttcgtatgcctgggcgagcatgatcgcgtcgtcgagagtggatggtcggcgaagcgcgacgtccgtcttgagggggttgacgaggctcgccatgaagagttgaatctgctggggctcggagagctcgacgtcgcggcacaccagggcgaggaaactgttgacctagtcctcgaccgtgccggtgcgccgcagcgccgttagttcgccaagtagactgtccgtcatgggcggtccaaaccgcgtatgcaccaaccggacaaaacgccgccacgacggctcgctggaatcgagctcgagcctgtaataccataagtgagcgtctcctattagatgcaaagacgcgtaccaaaccttgcgggagtccggagttttctggccgcggaagaaggtctcgcagtgatttagccatggtagcagatcgcccttgccatcgtacgtgggaaactcgagcttggtgcgaggcaggaagttgttgtcgaccgccatgtcgtcgccgtggcgttcgcgtcacgcgtcggtgtcgtcgaatggcttgtcgtcgtgcggctggcgaggcgcggagctagaggaacccggtgctggacggcgaggtgaagcgcacggacctgctccgaatattcaaatgcagacgcctggacttgagtcacctggtccggcaatgcatcaagctttgctgcgagcggcaccaatggctccagcgcactcatcttgcgagcgagatcagaaatttgggcagccatggaggtgaggttttttgctatctcatctaactggttttgtgtggaggccatggaatcggaaccagaggaatatgataccaagatgtcacgagctagattggatgaaggaatatgtcgaaggttatacttgaaggaagtggagggacgtggccttgcacctcgtcggcgcggcggtgccgtgatcggcgacgcaccagcgaggcagggcaagaactgatatgatcacaaattgcttgattgattattactctgcatctgccgcaatacttatagtggggatgtcttacaaatcagaaacaaactctaacaaaccttggaagataaaatgacaaatcctaacaaactgataaaatgacaaatcctaacaaacttaatctaaccgaattcctattcgtattgcactgttactcgtcacgcgtgttgtcgccgatcaggattcctgtcacgacgccgggcatactgcaatccccacatcacattcttatttcccacataatcactaaaccctagccacctccaccaagccaccgtcccctgccgcctatcgtttgccgtaccgaggctctaccgtgaatcgcgtctagcctaccgttttagtcatagccatccgtctttccgttaactgttcgttcgaacgaagtgtcgtcccgtgctttgttcgttcggttgttttgaatcattccctagttgaaaccgttcagagccgccggttccgttcgccggtttcagttgatcatttggatggtcccgtgtcacgtagaattgactcgttgagtctcatgaggcttgcttaccaatgttatatttccgttgatcctattcctttttggcattaatatatgataaatgaataaggtttttcggttaatagtaataacacatttcatcttgtaaaattcatatataattcattcgagctccgttttaatccattcaaattgccgtaaattcgttaaaatgtctagaatccattaaaattggtttcttttgctgtttcagtagctttatagcttgtatttattgtgtgccttgtttgtcgtttagaatccagcagttccaatgctccagtttattttgaagtggttgccaaggttctgtcagctcaagagcaaggaaagtcatacgaatatcattgatcatattgtacccatttgcaaagtccctgcttttctcttaaaattgcattattttcataatgtcatgtgggatggaatttacccgtactcagccttttgaataccttaattgaattaatagcctgggatattaatttgactagatgattggtttagaaatgcttagccatgcttagatcaattagctcacaatgggattcattataatttagtccttaattattattattattatgatattataccaccatggtatataattaattaactaaaacatgttatattggtgggtcgtgggtgcatggttttgcaagtggcacccatgacaattaaggaccggttctcgggaatccctagaagataaactcgtactatccacaagcctgatgggctccgggtttgatctaagtataatcttttctagctaacacaccgttggcaagggtgggcatgatggagtatggatggaactgtatattggtctatgctgctttcggatttacctaggcacgagcggggactgcccatcgcctatatagggatggggtgaaaccggaggtggatgtgttggttagaggaggatatatggagggttatgtcacgatttccccctttgcagtatcgtagcggtacttcggggaatggtaacatgtgtggaatcatgtcttgtgggtaaagttgtacacctcttatcagagtaaaactattcgaatagccgtgcccgcggttattgggcagtcaaccagctcaccgtgattagtctcaccttaataatttgacttattgaactggtgtagttcaggtggtttggttgggcctgtttcaatctggacttagcgttgtatagtgatgatggttaatactgctgcttaattatatctattgttttactgctttcaacttctgatttataaatgttgctttcattcaaaatatcctatagcctattccttcgtgatatcattgcatcataccttccccttggtatgacttgttgagtacggtggttgtactcagtcttgctttatttttcccaatcccccagaagcagagaatatatcagatggtgagttctatgaggattaagcttgtgccagatgtcgaggttttgcctgtggatttggaggaagctacgcttttgtcgtgaagattaagtttagatagtctttagtttttccaatgcgtttgtgagtttattttatatttttgtaagtcgtggaactgtatcaaattgtcgttcgtgtactctggttgatgcctggacagaggttaaatgtgcagatagccggtgattcgggatgtcgaatctctgggcgtgacacctccccacccagcggtgcctctacccctcccctcccctctcaggaccggggcaccgctcctcctcctccccctccccctccccctcccctccccttttgacggtgcctctcagtgcggcggcttcccgcgggtagatccggcggcactgaaggtgttggccgcttcccacggcccagtctggcggtggcggcagcttcccgcggtggatccgatggcaatgatggtgctagcgacttcccacggcccgatccacctgcagcgacgactcccgcgttgaatctgacggcgacggcggcagccgcagatttggtggcaccgactgcgccgatggctacacgcgtggcggtggcgctggcttcccgcatcggatttgacagctacgacggtggcggtggcttccggtgatgatttttttcctctttcgcttggttgtcctattggattttgtgtctatgtttgcgatgaattttcacagaatccatcatgcatttggttgttgatgcgaactctggatgattttttttttgtcttggagtctcatctcagatgttgcggacgagggattttttttaaggggggggacggacgaaaaattaacgtgttgagggacaaggtgacgatcggaaattttaattagttctattaagaggtgccttttttaaaaaaaaactaacgcttataaaatattataggtgtccgttagtttaaaaccgacacctataatatcttataggtgctggtaaaaaaccggtacctatgaaaaccgagccgagtcttatccaaccatccacagcgccaaagccgagccgccagggcccaccgaggagataaggcaccgagatccatctaatttttttactctctcattttcctctcctctctctcttggtcttctctctcgctctcctctctccgaggcggcagtgcaagaggggaggcggcggttgacgggcggcagcggcgggtggagacggtgcggcccagcggcggcggcgacggcgatggctgcgccctcccctccgcggtgtacagcgggaggagcggcggatgcccggaggcaccctcccttagccagatctggcgggaggaagggctacggagccgcgccgcctcaccgtcctccgtgccgcccgcctagaaagcagcgcaaggattgatgccgtcattgccgccgtcccacgtcaagctcgtccacaaggcctacgactgcaccaagcacttccgccaccgcacgtcgcctgcaacccgacgtgcctcctgctacctttgtaccgcagcctcggattctatcatttctacattgtcacttagatggatcggatttgggagggaggtaatacatgggtattaggtttcttgtggggaacaaattcacgaggtcgagattaaatttggtatttgcgtgttgtttttggttgtctagttgattgattgatttggagatctagcttgtggattatttttttttaagacagactcggactcaaacgattgggaggaacgaattgcacggatgagtgaaaaatcacgcataccgacaaaaattaggtgacggttggaagattatgaatcttttaattagttaagttatagattttgttggtttgagctatacctggaaatctttgtcgttccggatattcaggccggtgaatatcacagaaggcgaaacccaccacgtgcattacgagcagactggatctggaaaaggccgagtaaacaaacttagctggcatcattttcctttagttatatatatatatatatatatatatatatatatatatatatatatatatatatatatatatatatatatatatatatatatataatgcatgattagaacaataaaatacataattaaaagagtggcgcgaatatataagacaaataatttgttcttcaagataatcaagcatacagtcacacacttacttagtagtcacacaacataacattcataaacccccccagacatagacatagtttctcaaactaataatcaagcgatacagtcatacacttgatagtcacacaacatcaaacatttatgttgtgctaaatacaaaccccatacacttggtagagtcacgcaacatcaacattcatgctgggctaaatacaaaccccagacatcagtaacgtcagatgaccacacaatgaagtctccaccaaactctctcttctgataatgagaatgagcttttatcccgtgagaatttctaaccttgtaaaatgtttctgttttgttgccattagaccctactccacatccgatcaaagcaactgcatgagcatcactagtgttctcacatgttggggcacaataatactgaccatcacttaagtaattaaataggaaaccgtgacgaatccctgctactaatgggaagcctcctgccaacaatctagttatataaagaacatccttagggtcaacacgaaaataactttgaatcttaaggcgtgggactggagttgttgtaacatcagaagctccaatcaatatagcaatcccatcactttttagaacttccatgacaattggacaattatcataagtctcatataacttatcttgaggttcatttcctagtttaaaaccagtccttttgttatatgtctcaaccatctcatttatatcaaatggagcagaaaacacaaatcccttttgtgctccttccagtctacgggtacaatcaattaccgcagtaattgcatatagagtacaatgtgctgaaatgaaaatacagggaaaattttaaaaggtattcgtgttaaagagacaggaaatgtagtaggataagtgtatccaaaagaaaagtaaaaataaatgaaataatgataataaaaattagatgaaacaaataaaa

SEQ ID NO: 7517 - DNA, 24812 bp, Oryza sativa
  unsure (1)..(24812): unsure at all n locations
tttgaaaagagaaatggaactagcactatctaaatgaggaggtttcattctccaacaaccatataagtttctttatgatgaaaagcaacagttgaaacatgatctaatttacaaataaaattgaaacacatttcatgataagactgaatgtagaatattatcgagggggcatttgcccccactcacttaaaattaactgggggcattggccccaacttgccattagatcaacggatcatcctcatttgcccccactcacagtaaaattgatcggggggtttggccccaacttgccattagatcaagggatcatccaaagatttatgtgattttaatgtaaagggagaaattacacatcacacaagctatatagactacatggttttattatcaacacttctactgaagatcttttttacacctattatctggatatgccacgggactatccaatgagttttggtattcaaattgtgaaggcataaattactcagcagacaacatatacaagcgaaacatgcactttttataaaggacactgccacataatgtctcctccaccccggatttttttggtaggatcatggccaacagagcaaaagatgagatgtatgcggttggatggtgtcatgctgatattgataatactacatgcaagagttgtgttaccgatgcactaaggaaagttaaggtggtttgtgcttcaaagatggaggctatcatcttttatgacttttgtggcattagaatttctagtcacattattagtttcagtagttctaaagacatagaccatatagcatcacattgcgacccatctttcattcagaaccaattatatgttaatgttgtcctatcacttatttctgctgtgacaaataaggcaactaacttgcctacaaggttcgccacaggacaggaaaatctcatagcaaaggctaagactacaccatatatgcccttgcagagtgctcatccgagttgacaagtttagaatgacagaagtgtttcaatgatattggttatgcaccaaactgtaagctgggatcaaaaggtgcaagagcatcaataatttggtgcaatttccgctaccagttgtatccattcttcatgggccttccaatgctgaacatgtccatagatcaatctacattctaggttgaagataagtggagcaaaagacgaatatttttattagataataacttttctttagtaagtcatagattttgtttggcttataccccagttgagctgcatgtgggggtggagttgaagcttcgctagattttgttttccgctgcagtttttctttatggtgaggactaagtgcctcttatgtaagtatttatcactttggttattttgatgaatctgtatattaaattgttagtttgtgtaactcggttgattcctgggcgaggattttaatgcacaaattagttcggaaattacttgtaaatttctgggcgtgacatatatgcaggagcacatcatacaaaacatagagctgctctcatagcggcaatagtaggccgagtgttgtggtcatcatagtagtcctaacactaagttttttttgggggaagaaacgtgtgtcaagaaaacacacaaagctctcaagtaagcacttaattataaaatattgaacaataatacgtagtgcatatacttcattctaagatagacttttatggagattgtttctaaacatttagatgcagaactagttaagggtgaaaatattattgaaggctctaatgatttaggaggtgaaaataaaaggattattgaaggctcaggtgattcagggtgtgaaaatgatacttgcaaggtatattttctgcttattactcatgttctaatattgtagtctccatagtttgaatcactagcttttagctatccaatgaatgctgttttgaagaattttcgcatgtctatttataacagacacaatgtacttctaccttggtttcatttgatgaaatcacatccaatgctcaaggcaagaagattgccctattcttggattatgatggcacactttcgccaatcgtaaataatcctgagatggcatttatgtcccctgaggtaagtcaaataagaatatttggcaattaaatacttgtaaatgcatgtaacaattatttatgtttaattctaattactgttagatgcgtgagaccgtgagggatgcagcgaagatttttccaactgcaatagtcaccgggagatcccgcagaaaggtaggaacgatcaacccctttgattgacgagctatactcaaattattactatatgtggtagatcaataattgtgagttttgtctttctgactcaggtgtttgaatttgtaaaactagtagaacgctactatgctgggtgtcacgggttggatatcatggtatcaaagggctgattttggaagtactagtgaaatagtaagtacttgcaacattttagaacaaaattttcatagtactcttacaatctcttacaatttattatacttgaaggattttcaaatcagctttaagaaacgagttctatcatctagggaccttttccttgatataccctgtagattgtcaaaatgtgtgtactctagagacattttagaagcaactttgagtcatttttagatatctgtgctaattatttggtatacacatttttaaggcaccctaattcaccaaatgtggaagacattttcttgaaaacgtgtttgcctctctagaggcatttttagatgtttaattaatttgagtaataagtgaatataaataacgaaagacagaggtacaaaccatgatgtgaggttaagatgcttagtgtattgaatataaggttggccttaattttccaaaaggactttagattgaggaaagatcatagcaaaaaaaagcacataattaactattggctttttcacccagtttgctagtcgtagaaattaacctcactatgatgtttgtgttgtagtgtaacttcatgcttagtttttaaaatttctgtttctaacttctacacagtgaagaagccaatcccttctagcctgggagaaagtttgtccctatgattagtcaggtataatctatatttctaataaatgcaaaacgatgacttgtgcaattttatatgaatgtataatacaatattgttacaattttactataaaacatgttttgaagtctataattgtgcctattggaaaaattgagggggcaatgatcgaagacaaagaatgttgaggagaagtaaaatatggatctacttttagtttttttttcttcttttatcaatttaggtcaagtttaacaaatgatgcttgtcttaactataggattgggagttggttaaagaaatagttattaatgcactgaaagatgtcctagtcttgagatgaaacccgggaaaatggtacgaagattcaatacccggtatttaacttatagtccatttcaacgatgttttacataacttatataaaaataaaatttttaggttctggaagttcgacctgaagatgttgcagacaaaggtaaagtgatcaaatatcttatagggacacttgggctaaatgactctaatgttctcccaatttacattggagatgacgagacagatgaatatgcctttaaggttctattcattctcaaacataaatcatgacgaatcttagattttaaggtttcagttgtatttaggtgctccgtgagcagaaaaatgggtatggtatcgatgcaatatttgtattggtaatcatcaatgtgccatcgaagttggtgtcattagatcaggggcggaacaggaagtagcatgagtagagtccaagatctaccgcttaagtcgacaaacaaagtaaatattatcgagtgggcatttgcccccactcactataaaattgactgggggccttggccccaacttgccaatattatcaagttgtatttgcccccactcacttaaaattaactggggcattggccccaacttgccattagatcaacggatcatccgcatttgcccccactcactgtaaaaatgaccgggggctttggccccaacttaccattagatcaagggatcatccaaagatttatgtgattttgatgtaaagggagaaattacacatcacacaagttatatagactacatgattttattgtcaacacttctactgatgatctcttctacacgtataagagttgcgttacccaagtattatagaatgagtactataggatgtgtgttgctagcataaaagttatcatctattatgatttatgcacccttgagatttctaacgagaagatagagacttgcattcatcatggtcaaattcgatcattgtgcaaatcgttaagtctcatgtcaaaagtcagcaagaaaatgcttgacaagatcgtagtttactaatcacttcgatgataagcaaggtgaccaatttgtcttcaagatttgcaacagggagttgcaaaagggcaggagctgctcatagtagataattacaagtacactaactatggccttgcaatggttatcaattttgtttggaagaactcagctttatactcgtttttttgatttacgggtggtacaaaattagtgatctgctgtagttactggtaccagttgtaacatttctttaccgattatccaatgttgaatttatacattgtttagtctacactcaaaattggcacacccattagaaattactatatatctaacatttagatattagattcgtgtttaaaatttggacatcagattcgtgaagccatcagaattattgtgcggctcatccctactttggaagttccatgagaaggtattaataaactaccactcttaccttaaaatttggacatcagatttgtgaagccgtcagaaatattgtgcggctcatccctacttctattgttagtggaagttccgtgagaaaacaaactaccactcaaatattgtgcggctcatccctacttctattcttagtggaaggtccgtgagaaggtattaacaaactaccagtgttaccttatttacttttttaatgcttatgaaattatttctccatttctaaaatgcatgctataataaattcgtgagatttgagttaaaatttattagcaccattttccctcaaaatttttgttactaacagcccaatttatattgctgtaatttcagttgtaattttccttcgaaattttctgaagctgtaatttcagttgtctcgtattcacatttaataagcctttaatttatgtagtctatgtaatctatttggtatattatgtcagatttagttatttgtattgatcctcaatttatatttcaatctttaaaagtctttattacaagttttaatgtaaagtgataggtatttatattacacatagagctagtatgtgtattccaagataattcaaatttaaatttcatttcgaacaacaaccaagtatgataaaaggtgcattcatgcttagataaagctctgtttagagcactgacaaacattgaaggacacatatcttccccttctggactgactaataagaattttatctagttttataaacaaattgttgtcgaacggaatagcgtttgttgaaaggacatgcttcactctaaaaggtggaaagtaaataggtaaccctaaggattctatataaaggggaatttacatggctacccttataatagggacaattgacccatatagctggccttcagccctaagacctattccaagtgggccttcttgaggggttgacccacttggggcttggtccgcctcgcctgctggcaaaggcctttctcttcatctccctttggtcgaggatccttcgcttcacccttggtgcttcgcctagcaatattgctccaaggcttcggtcttcgctctagtaggtgcttcgccctcttgatgctccgccaagagcttgacgaggtgtttcgacaggctcgaccgaaggccctcgtgacatgcctccaacacaaacaaacccaattccatgaggttacgactagtatatcttctataaggaaaatccaattccatgaggttgacattctgaacaatagcattgaaactgtcatgcacaagcccaactagggtcttttctgtcctatgatatgcagccccacatagaccacaataagattccatttatacccatcatgttttttccttcaaagttaaaagcatcttatcataatcgtactccccttggccaagttcaccaacataaaaaaccttagcattgacttccatatgaatccttccatatcaaggttctcctccttgagaaacattttgagtgtaccatgttgattgtgttgcctcttacactccatggatttgaatcgaaagaaataatttttttgtcagaaaatttacaatgggccctaaacaattagcattcctggtaaggagtatagttcagtaaggtataccaacatgtaaataaatatatatttttttccagaaacaccatctccaaaattttgggtctactgagtattgatagtatcccattttagcaagtgatatttctttttgttatataggccaatagaatctatacgtctaatagtatccatttttgtgaatgattcctaggagcttttgaatccatagtacgtacttacacaaggacactagaaaccatagtctataatatttattaaaatctttccctcttcatagttgtgtgtccactctccaagtctccaacctcctttttttgtacttctgaacaatcactggtaggtcattttcccaattttatcataactcatacgtatacttacatctgaagtctgttcataacaactctaattggactcatttgtttgcttgttcaatacaatttttctttcaaagatattaggtcttaaatccctctgctatttttttatcttgccgtgccggcccggcccaccatgccgagggagcagcccaagcatggcccggctgtcgggccatgccatgcttgggctgggccaaattggcgtgccttgggccgggccgcaggcatcgggccatatggccatctatagtgctactgctgttcaagggaaagaattgaaggaagcagggagggagagagggagaaggaagaagaggaaaatttagggtttcgtggcttggtcaatttggttatattccagaataaaattcagaatttagttcctaaattatcaaactttaaccttgaccggtaggccaaaacattctttccaaatcttgtattaatccataaggaatcaaattttgtgttctaaatagaagttgttctccttgtgagaatctttccggcagtgcccaattttaattaggttaaacagtttaggataaattgcaaaaatagtaccaacttggttcgcaaccagtacattatttagttttcttcaaactgggcatgatagaagaataatcaggatttccacacatcatgtaagttctatataattttcttgtttcaagatttctttaggttagtcctagcacctggacagaaggtttaagcactaaggaatataagatcatctggaggcagataaactcccccaaattgtggagattatgggtaccccatatccacacgacatggttatccaactggctatagaggatatcttatatctatgaaatatgtaacagatcatgacttgggtattacgtttccttatatattacggaactgtctaaagttctggttcgataatattgtaaattagatttaggaaaccgacaccatattggttaaggtttctatcttgtaatcctgccccaattcacacaacctgatcgtcagatcaatactacactcagtggattcaaatccccaacatgagtaggatattacctctcatcgagagggcctgaacctgtctaaatccttgtctccgcatccatccacttttaggtctcgtgcactacccctttatattgccgaaattttgtttcgacagttggtgcgctagtgttgatgaaaaaatcgaacacactggcctgggagatctgcttagctcctgtgcaagtccaaagattgatgagatgcgggcatgccagtcagtttgatcctacaactgacaagatatgtaaacagtagataaatcagccgatcggctgacaagccgatgtagtagttccagccgatgccgataccaaccgatagcgatagggtttaagcaatcggctatatgtccaatgtagatgatgatataaaggcaatcgactgatgtaataaaataacaatataatcgaatagaaaccaatcggctagaaacaatatataataagcactgatccgaaggttaaagcatacatcggctggaggtccgatgtcataaaatccacaagattatattaaacaattaaatcttcattgcgatcggctaaatccaatatgtatgcaatccttgtaagccgatgcaacgtccagataactcatcggctgaaaccccgatggaacccttattggcaatcaagaagcaggctggagattatggttctaagcacgacttagtagatcaaacttaactgatgcagcactaagtatgaaaagaaacataatatctagacaatcaagccgttgattgattttttagggtagtagatgcctaggctaatctaatctagcaaggcgatttagccgataccggcagaaaccctaaagcgagagatggccgatagagctaaattgagatgctaggactagattaacatagacatatgataaatagtcaggcaaatatattatccaaaccagagtaatccaagatctcgaatgtcctgatgcagccttgaacgacgccgacgtagacgatacaattgcctggaccggcggaacattggacttatcccttcgccggagatcgaagacgatgcagccccgcgtcgggtgcctagttccgccggaacgtaaaaacaaaagtagaagtaaaaagggtggcgatgcgccgaattgtattgatcgtagcgatagattacatagaccccgggtgtacatatttatacccataggttgatacaagtccttgtcggacaagaaagaaacattcctaaagataaaaggaaaagataaagtccttatatgacactaaacacactttcctaaagataaaaggaaactaacaaactattcttaattaatagataacttgccatgccgcattctctttgaaatcggtctcttctggataagcttcctctagtagatcaattttcttaaccgactatagcaagaatccgacaactgacgacttgacaactttcatcagctaatctcaggacttcaaagccgatgctgactctaagccgatgactactccgggcttaccaaatttcattgttaacagctaggtaggggttgcgttgagtttacctgtcaggaagtgcgatggaatcaactgggattaatctcaacaatttcgacgacttcaatctttgacatcgaccggtttgccgtttcaataaagtattattagattgatttttaatctagattggtctgctattcgatttttgtttgtatgcatgaactggtggttgatgagctctgccgactacttccaatgacggcatcataccggagggccatccaggggtgtgcacatgcatgcggcatgcaaacagagagaccaatatctagtggctattttttttaatcgctcacgatgcaagccacgctgcacgatccggttcatcggtctaatctaatttctgttagattaatttctaatcagagattgatattgtctttttggttcctattttgcttgtccgcatatatactaccggcggctgagttgctccgatgggtgccaacaacctgacaagccgctgcagcgctgccatgcaagacaagtcgtaagccggccgcgtcttcatgggaaccatgcgacatgctgaagctggcaggcatgcctgtgatttaatatgcatatgtgctctcgccatgcctacaccgtgcacaggaaagctcaagctaggaaatcacggttcccaggaaacatgcctgacgtgctgatctaatcaacacgcatggattaaatatttaatatgccatgcaatagatgttttcctgtatatgatatgcatccatattttcatgtttactaacagaatctatatgcttgctttgtttttgcatatacgatggattcattgcatgatgagatcgatctggccgactctagcgctactaatgggcaactcgccttaacgccacctcatctgccgttgattggtcctcgcctacacggttggatggtcacaccaccattgttggcgtccatgtcttcaccgtcagcctgccttcgccgccgtcgactggtgtcctcgcctacacggtttgatggtcacgccaccgttgttgggcgtctgcgtcttcaccgactagccgcctcgtcgccgccgactggtgtcctcgcctacatggttggttggtcacaccaccgctgttgggagtctccgtcttcactgaccgaccgcctcgttgccgccgactggtgtcctcgcctatacggttggttgatcacaccactgttgttgggcgtccacgtcttcaccgcaggcctgccttcgccgccgtcaactagtgacctcgcctacatgataggttgatcacaccactgctgttgggtgtccacgtcttcaccgctggccttccttcgccgccgttgactggtgtcctcgcctacacggttggatggtcacaccaccgttgttgggtattcacgtcttcaccaccagcttgccttcgccgccgccgactggtgtcctcacctacacggttggttggtcacaccaccgttgttgggcgtctgcgtcttcactggccggccgccttgttgccgccgactggtaccctcacctatatggttagttggtcacaccactgttgttgggcgtctacgtcttcaccaatggccacctcgtctgccgccgactggtatcctcgccttcacggttggttggtcacaacaccgttgatgagcgtctagtcttcaccaccggcttgccttcgccgccgccaactagtgtcctcgcctacacagttggctgctcacagccccgttgttgggcgtctatgttttcactgccggcctgccttcgccgccattgattggtgtttttgcccatacggatggtggattccgccgtcgttgatgcgcacttttatctccacaccgaccacctttgccgtcaccaaggagataaaaaagctaagtcatcattaattgtgttttttatatgatatttttcctttacttctgcctcactacatcatctggttcgccattgactagtgagtccggagctacagatgttatatcatatttttcaactttttttatcttgattgcttgcgaaataatccgagtaaaaaatgtgcctatcgagttatggagctctatttccctatactttccatttggtttgttgatggatagttgcctttgggccaattcttatcacccgggggctcgttggatggagtgtataatgcaaggtgctaaatattactcggataaaatcaaaagcatagagataagataatttgctttctactcttaacaattgccaaagtgcccgagtagtaaattctgatccgtgaaacttgttccattaatgacgaactcatgtcactcatatgaacgtttgggaagtgcctatgccgattaccggtgtttgtgggcaatgattagtcgggcaaaatatttaaacgtaaggaatcatttgctcggggaaattaaaattgataagaggagaaatacatattttaaacatattttaaatgcttgaattttcctcaagtcctatatttaaattagatactactcattctacatgtttattctgcaggatccaaatccagatgtgcatagtagggattcattgctataagcttatctcctacgcttcaggaatgtatcagtcagaacatcaccatcggcttgacttcgccgccgccaactggtgtctccgcctgcacggctggtctattataccgtcgttgttgggcgtctacgtctttaccgaccggcttgccttcaccgccaccgactgatgttttcgcctgcacggctggcctattatgccaccattgataggcgcctacgtcttcaccactagcttgccttcaccgttgccgactagtgtcctcgcctacacagttgtttggtcacgtcaccgttgatggcgtctatgtcttcatcgaccggctgcctcatcgccgcctactagtaccttcgcctacacggctggttggtcacaccgccatcgatgggcacatacatcttcaacgtcggcttgcctccgtcaccgccgactggtgtcatcgcattcacgattggttggtcacaccaccgttgatgggcctctatgtcttcaccccggctagccttcgccgctatccatggagtcttcgctttcatggttggcctattatgccgctgctcaaggacgtcttcgttttcatcatcattctgcttcttctattgccaactaattatctcgccgccatggatgcacaactctgtcatcactgattcactattgggcaccttcgtcttcatcgctggctgccttgcctgacgccgactagtttcttcgcctccatggctgcacgtcttcgtcaccattgactggcgtaatctttaacaccaacttgccttcaccgccactaattggtgtctctgctttgatggtcggcctattatgctgccgctcatggacgtctttgttttcaccatctgcttcttctatcatcgactggtgtttctatattcacgactgtgcgtcttcgccaccagtttacttttgttgctgccgacttgtgtctacgtcatcacgatagtgcaaatctatcaccattgaaaagcgacttcatcttcgttgtcttcggcactgacaaactctattgtctctacatcgcaagctttactacttcaccaaccacgacgtctacaagagccttgacatcttggcatgcgtcacgaaataagatgtcgtgttattttactataacaagtggtgttccaatactcaagatttctacccagacatcctcaatgcatatcttcactcaagtgatggctactcgacgacaagctacagttctcgactctatgttcagttgtttcccatctaaccaaagagtcgagggctacacaaatacaaggctcaaaattcgacaagttttatgtcaatataaagcaatcaattaatcagccaatgagtcaactctgagagtcgttatcttcgtctttgctttagagccagagttctacttcagcaattattttaccggcaattttggcttctggacttcccaagtacgggcctaaggagtttggagttatcaaccaatcaactcagattcgatgagttggacaacagcatctacttttccccaagtgaagcatctgcaacagcatctactgccatctttataaatcaaggggcgttgcatcaatcttcattatgcacacgctcgcatcaaggaaactactcgagcttcgatatcttctcaacagtttgatggattattttcactaacatcatcacctgcacctctacttcatcggcccagacgtctcagccgttgctaatgggtgacaacgttttcacctccggttgcttccgtcattgccgacttgttatttcaccttcacggttgacctactacgcaaacgctgatgagcgtcttcgtcattatcatcggctgctacactactattgattggatcatcgacattgtcatcttcgtcaacattctgtaaagcctcttcaacatagcctactctactgctattgattggcaacttcatcatcgtagtcgatcatctctgttgctgctaatcgtcattatcgttggttgcgtttgccgtcgctgactattttcttcatcttcatgattggtggatttcgccatcgccattgatgcaattctgaaagaagctcacgacactttatactctatccaccctggtagtactaagatgtaccaagacctcaaggaaatattttggtgggtaagtatgaagcgtgagatagcggaatatgtagccgtgtgtaatgtttgtcagcgagtcaaggcagaacatcagaaacctgcaggtttgttgcagcctttgaagataccagaatggaagtgggaggaaatcggtatggatttcatcactggtctacccagaacgtcatcgggccacgactccatttgggtgatagtcgacagactcaccaaagtggctcatttcatcccggtgaggacaacatattccggaagtcgcttggcggaattgtatatgacaagcattgtgtgtttgcacggtgtgcctaagaagatagtatccgatcgaggtagccagtttacttcaaaattttggaagaagcttcaggaagagatgggttccaagctgaacttcagtaccgcttatcatccgcagacagatggacaaactgaaagggtaaatcagattttggaagacatgttgagagcttgtgctttagacttcggtggaagttgggataagaatctgccttatgcggaattctcatacaacaacagttatcaagctagtcttcagatggctccttatgaagcactgtatggtcggaaatgccgcactccgcttttgtgggatcaaacgggagaacgccaggttttcgggaccgatattctgagggaagcagaagaaaaagtaaagatcattcaagagagattgcgtgtggctcagtctcgtcataagagttatgccgacaatcgccgtagagatctaagttttgaagagggagatcatgtgtatcttcgtgtcacacctcttcgaggggttcatcgtttccacaacaaaggaaaattggcaccgcgttttgtgggaccttataagattgtcagtagaagaggagatgttgcttatcagttggagttaccgcaatctttggcaggagtccataatgtgttccatgtgtcacagtagaaaaagtgtttaagggtacctactgaagaagctaatcttgaacagatagaagtccaagaggatctgacatatgttgagagacccatccgtatcctggaaacagatgagagaagaaccaggaatcgagttatccgtttttgcaaggttcaatggagtaatcactcagaggaagaatcaactagggaacgagaagatgaattaaagtcagctcatccgcatctattcgctagttcatccgaatctcgaggacgagattccgtttaaggggggtaggtttgtcacaccctaaaaatcccaaatatataaattgttgtttaattcgaattattagaaataattttaaaagcctagaagagaagatctaattttaaaataataaattccaatataaaagtgggccagataaaattttattaaatactttacttgattctatagttcctagatttttctaggatttatttgagccaaggaagtatttttaataaatagaattgcatttcatgaataatttaaattgaaaaaaaggtttttaaaatcctcttttggctttgggccgaaagtcggcccaaaaccctttctctctctctccctcggcccagtcggcccagtcagcccgcagccgagctgccgctcgcgcgcgcgcgaccgcccgttgacaggtggggcccacctgttagtcttcgtctacctccagccgccgccgcgcccgaaccctaaccgagctgcgccgccgccgcccttccaattcggccgtgcttttccttcttcggtgaaattaatagaggggaaatgatccccgagatctcctctaccttttcccttttggaatcgatcgctaatttggtttggaaattgccggattcgagtttggttcggattcgtttttccgctccaaaccctaaagtttccttcccgtcgccggccgtcgtgggccttcgtcgccgccccctagccgctataaaaggacccccggtgtctcctctacccgccgccaccctcgccttagcccaccgccgtctgtagcgccctagccccgtgaagcctagcgccgccgtcgccgcagttcgtccagtcgtgcgccgccgtcgctccggtcgtcgtcgtcgcgtgggaaggccaccgccgtgttcgccgagttgccgccgacctcgtctgtccctctgtcgtcgccgtagatcaccggagcaccgccgtcgtcatcaagccgaaggtcgccgccgcttcttcctcgtcgccgtcgtcgtccggtcaccgtccaccgccgttcgtgcctcagtaagtttcgtcgcgtcgcccgcaacacgtagatgccctccgtttgcgccgccgcgccgtcgttcgccggcgagcatgcgaggctgagccgccaccggtggtgacatcactgctgacgtcatcgtcgccgtttcccgtgagccgctgtagaccgattagatctcggccgttcgttttggataggatagatctcggccgttcgtttccgtagaccgtcgccgtgcacccggtccaccgtgaacccgagccgctgatgcaataaatccccttttacttttcaaaaataattcattattgcgtcataattcaattaaaatctatataaatgatttaatccgatttaatctttgaaatttcataactaattcatcttagctcggatttagttggttcaagtctctaaatttttctaaaattgagatctacatgttaaaaatatccacatgtactgttcatacttgtttatgtgctgttttggtgattttgctcttttctatttagattccgacgttcccggagagtccgattttgcagaagactttgaagagttccaaggccagcaaggcaagtcacacagatcgcaaacaaccctttgagtatgttgatcccgtttaaagctattgtttctattcaactattgcatttatttttgaatgtcatttggtggaaatacctattgccttgttatagcccttttgctattgatcccctattctttgtcatctggttaataaattgattagctagaacattatatggttttagttaaagtgaataggatgcttagccatgcttagagacaatagctcatataaatgggataacttatgattcactattatttaaggatggcttaatgatagctcacgatgattaatcgtgattggttaattaattaatttgacaactaaaaacctgataatggtggggtgtgagcacatggttttgatggtcgtgctcatgacaattaaggaccggttcacgattttcggttgtgaaacatttaccgtgccaaccacaagccagcgtgggcaacggctttactttatgtatagtatggttcattgtagagcaccagactgtgaagtggcggagataagaccacaggggtcgctggggagtccatgccttatttaagggggtgattatgatccgggaacggtgcactgctttgaattgtattatatagagggtattgtcacaatctctattcgggtacttgttaagtatcacgacgcatggttgacatgatgttgaggttgtgtcttgtgggtacagtggtacacctctggccagagtttaaactgttcgaatagccgtgcccgtggttatgggcgggtctaacaatgtctttcgtgattagttccacacttctcaccataataaatgatgctgtaattggtaataacttgtttagctcctggtttggaatggtatattcctggtttggagatagaactgtgcagcctgaattggttgttccgaatggttgggcctatgcaacagggtatgttgtatagtgttggagtaatattgtttaattaatactttactgttttatgaaattctgaaatgtttattaaatgctatttatgcaaatgagcctatattatgccttcctttattatcctgtgcacttgcatatttgctgcgtggcttgctgagtatgtcatatactcaccttgcaatcattcatcagaggagttctacagtgatgctgaaggtgtggatgattaggcgtagccctggtcaagctgcctgtggaatggagtcgtctgcgctgtttatcttattttccactgcttagaactttgttgtttgagagggactatctaactctgtaatgacattttattcgcttattaattagagtaataattgtactctattatcaatttgttattgtgtgtctcggctgattcctagacgagggttcacacacatgtaagcgtttggaattttggatagaaattccgggcgtgacatgtcgctaactattttcttcatcttcatgattggtggatttcgccatcgtcgttgatgtgcatctacggcttcatcattggcttgctttcattgccaccgactcgtatctttgccttcatggctggcttattatgccgccgctaatgagcgtattcatcttcttcaccagctgcctcgtctgtcaccgactaattattttgccccccatggctacacaactctatcaatattgctaggcgctttcatcttctctgttggctgacctgactgctgtcgactgatttcttcgactccacggctgtgcgacttcatcacctttgattagtgtcattgtctttaccaccaccaataatcttcgtcacctctgatgggcgatgtcatccctatgttggtcatctcgtttccatgccgactgcataaactaccgtcaatagacaattacgactacaacataagtataggctacatgcttagggggctcatcaacacaaacgcaaggatcatatcttcaacttggacttgtttcagatacatgcaacatgaatttatggtcatgagtcgatttcttatgctcaacgactagactattcattattccccacgagggccatcagctgagtatttgagccagactggatttgattatcatatctactttggtacaatccgtgagggatagccacttggattagaagctactcagatgagatgaagttgatctacatcacccaggagatttgtcactcgggagcatattgataggcgtgttatatacgtcatattctaagggtatcggtaggcatattttgggtctaggcctaagatgtttgcagcctatattttcaggtgcagcatgtcacgttcttttagggacttaggcattttttgtttaggcaaaagtgcgcatgatcaagtgcctaataccttaaaatctttttataccgctgttactcaactttttaggagttggtacaatgcattttaaaaggtgccaaacagtgaaactttatatagctgccccgttgacttctttatatagtcaaggcactatttgggtatataaagcgatcgattggatacaatatcgttgcttttctaccatgtaagtgtgcatttttactaaccaatattatggctcaggctgattatatattttggtcatttttcaggcagttggtaaatcttttatgagtttatttactcagattttacactacatatgccatatattttcaggtgtgatgaaaccatgtgtcttttagggatttaagtacatttgttaaagcaatgtgcgcatggtgtgtgtgcccgatactttggaaatttgtttattcacagcatacaagcctctttgtagctgttttgttatgtgaattttcaatgatgtagtcaactttgggttgcacgcattatattttataaagcagacggtatatcactcggatcatgttattcggggattcacaccgcatatgctatatattaatattaagtcacttggttgactacaattatcaaagccactcagttgattagattatttactccttgactatatgtttagtttgttcaactaaccacagtcgggggctacacctattaggtgcatctagtcgatgcacctaagtcctaagtttatatttaattattttttaggcctccacagtcttcagatttggtaaaagtactcaggagaccatggcgaagatgattgaagcactcggctttggagtcatctagttcgagagaagattatcttttcgactttaaaggtctcgagggctactgtggagattatgggtactccatacccacacgaaatggttatctgactggttataggggatatcttatatctatgtaatatgtaacggatcatgacttaggtattacgtttccttgtatattacggaatggcctaaagtcctgatttgataatattgtaaagtagatttaggaaaccgataccgtattagttaaggcttgtatcttgtaatcctgccccctatcctatataaggtgggcagaaggtcctctagggggcatattgacacaacctgaacgtcagatcaatactagacccggcggattcaaatgcccaacaggagtagggtatttgaaagtgtgataggctcaacacgatagattagattatcacatatggtagagtacatataggcacatgccttccatatctagcaaccgatatatagaaacaatatcggagaagattaaggaaggacacccccccaccccctccccctccccgcagtcggaacgtcggtggaacggacattcagactggaccaaaactccaagaagatgacactgggtagccctttagtaaagatatcggcgaactatgatgtagtaggtacatgcaacacgcgaacagatccggcagcgacgcgatctcgaacgaagtgtagatcgatctccacatgcttggtacgttgatgttgcactgggttagaggagagatatacagcactcacattgtcacagtaaaccagtgtggatcggctcggaggggtatggagctcatggagaagctgtcgaagccagcaagtttcagccactgcattggccactgccccatattctgccttggcactagagcacgatacagtaagctgacgtttggaggaccaggagaccaagttgtcgccaaggaacacagcataatccgaggtggatttcctggtgtccggacaacctgcccagtcggcgtcagagtatgcactcaagtcaacagtggaagagcagcggatgtgaagaccataatcaaccgttccacggacatatgtggctcccgtggatcgtgcatgtgaaggcaaacctgctaaacagcataggagatgtctggcctggtgaaagtcaagtactggagagcgccagcttgactccaatagtccgtggggtcacgaaccggggcaccatcggtggcagacagcttggcgttggtgtcaacaggagtagcacacggcttgcaatctgccatgccagcatgttccaaaacctcgagatagtactggcgttgactgagatgtaggccagaggattgccgagaaacagagatgcccaacaagtgatgcaagctgccaagatccttcatcgaggattccgactgcagagcacggatggtccaccgaagaggtctcgagttcgaatcctggctggcacgcaattaaataaaaattgtagcccacttctattccacgatagaggcttgagggggtcgcgcgtgagggggagtgttggaatataaagtgaattgcccgcctttcctcatcagcttaagcttttgggttgaactggtcggtgcatgcaactcagtattacctctcatcgagagggtctgaacctgtctacatccttgtctccacatccatccacttttaggtctcgtgcgctatccctttatattgccgaaatcttgtttcgacacaaatacaacaacttctagtttaaagatgtgtgtggcaccaaaaagaaaaaaaaatgtagggtcaaatgcgaacaccaagcctaccagagtggataaaggaaaaaattataagatcaaatattctactaagcttatcataaaaaaaaaccaaatcatttttgcgtaggcagacgatggacatggcttgggccggcctgagatgactcgggctggcctgggccgagattaggaactggccatcatttactgccatgctcaacttatcttttttttttcctttatgtaaaactgatggttaattcaatgtacctagaattacgtggattttgtaaaagaaaaatatttgattttcacaagatggatgtatctattttaaatatgacagtattaattaatcttttttctcagggcaagtagtgacaatattgatcttattctatgataaacatttcaaagaggtgctttgcaggtaataaatatgaagagaggattttgatcttattctatgataaaccagcatcgtcgtctccgccttctcagtctgccgcgccgcgccatggttgatctgacgccgaggcctccatcgtcctccgccgctccgcgcacatgcatcttgctgtcttgccggcggccgatctcatgatctcatcggcgactgtccgccgcgccgccttctcagcgcgccggcggcctacgtgaggcggtaacgtccgaggagttcccggcgcctctcgaggtagccctcgtcgccgcgggcggggacgtcgtcgtcatcgtcttcctcctccgtcgtcgtcacgaccttgggacgccgncgcacggcgagcctcggcttgttgcagccggagctcctcgtagaaccgggtcctttcgaactccttgccaagctccttgtcaagatcgacgacgacgacgaccggcgaagccggacttcctctctgctggtgccgtttggtctccttctcgatgcggcgcttctcctcggcgatccaccgctgcttctcggcctccctcgccacctgctccggcgtccattgccgccgtttttgcagctcgtacgccgccgcaggggcgatgtcccacagccgcctctccagctccagcatctcctccttagtcgccgccgggacgacggcggaagagcggcggcggcggaagaagccgggcagaatccgcgaggccatctcgtgctctcgataatgcactgatgagtgatggcctaatgctaatgacctatatagccagccatgtacgtgtccgcagtggcgaagccaagatttagagatggagggtgccatctacgagacatggcaactcacttaaggtttagtgaacagtgattttgtagcgttgatgtatgatcggtaactcgatatcatacatattacagcgattagctacaagagagaataagaacccatatatcatgatttgccaatttaaaattcagtaatatttttaatatatggatgattgaacagtttgtttcattaattggagtcttgcaatcacttctaaaatgattgataaatcatttagctaagtcatttcataagtcctatatatatatagctaggcagttgtcctgtcctatatagttagtctcatctgcaactaatgatataattaatagctagattataagtgctaatcatccttgggagaagagaggggaggggaggtcacatagaggttaggggggtgttggccctccctggcccctacgatggcttcgccactgcgtgtccgacacggagtccgaatcaaaagcgaagtcgaatcggagaagggcgcgaacgcgtgagtgcatgacacggtttccaatccgaatacttgtcgctgttggatttatattaatcttgccgctaatcagaatcttgctacaaatctttccaaggcgcctacaaatcgagcgttgtttcaccaagtaaaatgaacgtgtctcactaagtagatcgaaaatgtttcaatcttgtaaaaagctggaacacaaccaaatcacctcatgaaacattttgctacaacatatgatataacggcttccaaaaaatcgggcgttgtctcaccctatataaaacaatgttttatcaaatagtgaaagaatgtttcaattcttaaaaaaagtgaaacacagtaagattactagatgaaataatttggttcaacgtatacaacaaacgatttaaagctattgcaacgcttaaaccccgtgtacatcaacaaaccacgtgtccattaagatgaaattatgtaacagtattaaaatctactgcaatatttcatccatacatagtgaaacattgttggtgaaaaaaaaataaaacaaatccccctaatagagcgtttccgttatatctgatagttgttgcaacggagcacgagtggtgaggacacgtggtactggtagagccggcgcgtgtgcgtgagaggcgaggcggaggcgcacgtggggggcaccccatttttttgcgccgcatcgggcgctccattttgatcatttgtgaaatctttcgtgctttgaggaattctttcccctctccaaacagccaagattttttttttaatcatatccttgtctccatccttggaaagttcacaacttcacatacgcatacggtgttttttttaccagtaaaacttgaataaaacaattgcacctttccagatgctaataagtatgaaaaagaaattttataatctaaataggcataaggcgcatgatacgtagagagacgtaaaacaaaataaactgtcaaaggtacagtaaaggcaaagtaaagtggcaatttcatatgttgtaaaatgttcactgattgacaaaaaaaaaacaactagcgaatagctaaatgatagcatcaacattcattttgaaagcttaaagaagttgaaagttacagcctttcaccctttcattttgtactaccaactttcaacaaaatttgttggataatttgctcaaaagatgtaaaagaaatctgaacattgtaccttacatcccaatgatgcaagattgtgattcctcattcccctgcatcacagatgcttttgatcaagcattattacaagaaatgccttctgattattaaagttggaaacatct

SEQ ID NO: 7518 - DNA, 14146 bp, Oryza sativa
ttagctagcatgaaacgaccggcataagatagatagatagatagatagattgcaaaggggaaaaatatgttgggaaacctctggaatctggatgatgtgccttttgtttgcttcttggtatttctttcatagggatattctctacatttatatcaaagtggatagataattgggaagtctctataaattggatttatctttttcttttattttgcctatttcttatgcttaattttcttagatttatctcaaaatttaatatcgccatgtggctcaataagatggctcgagatacaagctagttttagaaagatagaaattccgtgcgtcttttgacgcgctcatgttatagcctgtccgcattgtttctgtgattagaaagtagaaattttgaaattttttaaaagtataattttcttttgttaaattttgaaaatcttttaagtttactctattttttgtctgaactatttagggttcctttgtagagtaaaattataattgtattgtctattaattgacaaaataggtgataatattttactccctccattccataatataaggtacaaccactttttttaatgttccataatataacgcatgcatgcatgtaagcaattaactatgatcttttctccattaaattattactttttttaaatcctctactctcatgttctctaattctattggatacatgtattatatttattaggatgatccaaactacaagataataataattatttcttggtctttgggttagaggtggttatgccttatattttggaatggagggagtaaaaggcatttgtttgcaaatatatatatatattttatgagctaaaggatttaatataagtatctatgttggaaaaaattatacttgttgataaaaattaaagtctaaccggaccccactgatctatacctgatattttgctccttagtaaaattcttttaagccccatcaatccttctagatccttccccacttctcctttgcattttctcttttctctctgtgtaaactatagtatctaggtctattttttttcttagtcatgtttgattctctttttgcctatggatgtttatttcctttttctatcgagccatgtaggactcaggagatggttcagcacttcagcactgttaccatatttttgcgcttatttttttctctcgtataatttcaagatttatttgtagtgtgaaaggtgccacgtggcccaatcatcgtttgcatgcacagccagcattaaaagataatactagaaaatagacgcgccagttggcgcatcctctgattatataacatgcgtgtgctatttagtgcttcttccaagtgaggacacatgagctggcgttttccgcggattatacatgcccatattcttcctagcaaggactatttaaaggtttctaaatttgaaaactaaatcaagtaaaagagtaatgcatttggtcataattcctccgtttcacaatgtaagtcattctagcattttctacattcatattgatgttaatgaatctagctagatatatatgtctagattcattaacattaatacgaatgtgagagaggctagaatgacttacattgtgaaacagagggagcatcatttaactttaatgaataaataaatgtagcctaagagaaaatattttgaatattaaataatatttaattttgcattgaacatgcataaatactgattatgtatttttattttattttacttattattcatgtctagttgactttgatctaacttggtcagttggtctcatggtccatcggcccaatcggcatatatttggcacaattagtcagtccaggagtaaggagaccaccagacgtcttctcgtgtttctcaatggatcgatggacctctatctctctagcttaattctttttctctctcaaataagttgtttgggatttatctgttaattcagaggtgacacgtggtccaatcaatactgccgccagcattagatagattgattaataactcgccaaatttcataaatcggaaggaatccgcgtgcttttcggatacccgcttcaaatcggactccgactccgactcgctatataaccctaaatcccctccctattagccctaatcccctattagccctaaacttcacaaatcacaaccgcatcgatcgactcgactcgactcgagccatgtcgtcttggattctccccagctgcttcttcccccgccgctctgccgccgccatcgccgccgccgtcgtcccggtggcgactaaggaggagttgctcgagctggagaggcggctgtgggacatcgcccccgcggcggcgtacgagctgcagaagcggcggcactggacgccggagcaggtggcgcgggaggccgagaagaatcggtggatcgccgagaagaagcgccggatcgagaaggaatccaagcggcagcagcggaggaggaactccggcgactccgccgccgccaccaccaccgtcctcctcgacggcgctggcgtcaatcttgacaaggtgctcggcgaggacttcgagaggaagcggttctacgaggagatccggctgcaagccgagacccgccgccgtgccacgccggaggaagagccctccaccgccgcggtcgtcgtgacggaggaggacgacgaggagagcgacgacgacgacgtccccgcccgcggcgaggagggctacctcgagaggcgccgggaaatcctgggacgctactgcctcacgccggcgcacgatcccgcgggcagccgagcagacatcaagatcggcgaggaggatggaggcagctggtcgccgtttttgatcgctcgcaacctcggccgccggatcaccctccgggcggcggactgacgctgacaaggcggagacgacgacgacgacgcggccagccaacgaggcaccgagataagatagctgcagggcttctagttggatgaactactagtcatgtaatctattgatcccaagttgtgatcaacatggttttgcacgaatttgtgctatgtaaatgctaagaatgtatacagtaatgttctttttgtaaaaacacaggggattcatcaaaatcccctgttcaattcaatttataataaaattaggtgaaaattacattgcaactcaaaacgaatcttgtgctttgatgattggttctgcaattttactgcaaatctgaaattctgaagagtgaagatggaagttgtctgatgtattcagcagagaaacctgactaaaaacctgacattaagtcatggactaagacattattatggtaaaactttttttgtgaagtttgttttctttgaggtagtaggagaactttctaaaattgttgtatgttgttcagaaatttaactctgagatgtaattcaagtttgattaactttgtactaacaacatatgttcttaaccatgttactttttttacatcttgaatgtaattacatgttaatctctccagggaatatggcacacaaaaaattatcttatgcgcgtacatttgaactgaatttttaaccacatcgtcctcttccccaacatatcgagcccacgagcagagcaaagcagaggcacatagatgcaccttccatcaacgtcatcagggacttcaccaagatcttgattactcgtgaaggccggaaccacgaacactggtgccctgtcagcaaccgagcagattttttttttactgaaaaaggtagagagactctaccttataaccattgtattaatggtagtcaaggtgttgcataaagagttacaaaagaaccggatgaagagggaggaatagaagaagaagagaaaataagaaggaaaaaaggaaccgagcagattttggttcagaacaagtgagattcagataatcggactagtggctaactaactaggaaccttaacacagcaaaatagtaaagtaattgatgaaatcgagctggatttgacaacatatagagtgcagcgcaagaacaagaaatgaggaataaaaacttttcgcatagtttgtttgtgactgcttcgtggctttatatcgagtccagactccagagctacgcgataaagaatgatgactacagtacggcaaacaaagcaatctgtagtccgtcgcggcgctttgtagcccttggatctccataaccatcccagcgaaccgttatcctttaatcccaaccgttcatccactctcccgtgtataacacacagccgcgttctgatttctgaatcttcaagtttcttcagttatgcaatcttcagagtctcacgcgcgtggcgcagcggaggcatccgccgttttgtgccaagcattatacatgttgttactagatcctactcacccagatatatcgtcttttccttaaccctctttatcccacactcttatccgtcctgcacatccatcttatagagcaggtttataggagcttgtgccagtgcttgttcttcgctaagcacctgctcctctctatccctctatcttttcctattatacttgctcttaagaccacaagcctctatagcagggttgtcatcactatgacttcggcgcaactatgccatgttgactttaaaagtcaactccttttgacttacaagcaagccaagtaaatactcctaataaggccgagttcgccacaataaattgtctgagatagtatcgttctccccaaacatattttcgaaaatgctaaatgatacgttttataaaaagtagttaaatataaaaatttctttagaaaaccaaataaattcatttttaatttataatttttaatatttaattaatcctatgtgctaatagtgatctattccgttttaatcagcattcggccacactacgttggctccccgacacgtgccagccacactgaccaaatgtagctgccagctgggccccactgccactaggacgacgacaccacagaagctgcttacacgttccctttcatccgttcgtcaaatttttttaaagtttaaatttcgcaggtaagcacggtttccagagttattttgattctgtttcgaaggacccatggattgaaatttgaaaactcctggtgtttttcgagtcggagaacagagtagaatttccaggtccaaaacatctttaattgtaaattttacagctcaacatggcttctagagtttttattcgattcggaacgtggattgaaatttgagagttctgatgcttttcaactcaaacgaattatgttcttttgcaaacagagaggattgatcaagatcccctgttcgaattatgaggaaatcaggggaaattgcataggcaactcaaacgaatcttgtgctttttgatggttggttttgcaattctagtgcaagtctctgaaattctgaagatggaactccaaacacatgtgttcctgcatgcttgtgtttgtttttgacggtctgatgcatctgaaatttcacttgggatcatccacagcactgaattattcctaatgaattattcagcggagatatgatttgctgaatcgttgcatttgcacccgcctgaataaaaaccctgaaatttagtactcgaccaaaagaggagtcctcaaatcaaatggagcacaagattcagaaatttcagatgtttatttcggacctgttcactttgatgcaattttcaaccttaccaaattttggtaaagttgtcaaaaaatggctacatttagtttgctaccaaattttggtaactatataagaaatcctgccaaaattttagcaatgccaaattttgataaggttttttttggcatcaaagtgaacaggcccttcgtgtccaaaatcctgtccccaaacagcgcattctgttgtaccgtcactcatccgaacaagggacccatttgcataattttaacccgcggccaacttgtaccatcagatgataagcttgcggaccggattaaagcacacgggaaactaaaagtgatagtaatacgatccaaactatctttgtgtttaactttttttcacgcagttttgttgttgttgttgttgttgttgttgttgttgttgtaatacacaaaaactacaacgctcgcagctaatggtagcgagtagcgacccaaacgtggagggactcatctgcataattccagcacgaggccatctgagagccgttagatgacgagcgtgcggtccagatcctacggcgtctctctctcgcctcacctccggtgatttcaacggtagccgttagctgtacccccaaaatgtacaatcacgcactaaattcgaatccaaaattttcgccataaattttgcacgtatttgcccccacgtacacgccgcccgcattcactgcgtgctgctcgcatttgaactgaatttcaaaaccacctcgtcgtcttcttccccccaaatctagcgagctcgctcacgagcagagcgaggcagaggcagatgcacgtgtgcttccatggcggcggcggcggcggcggcggcaggctcgccaagtcattcaacgtcatcagcgacttcaccaagatcttgattggtcgtcgaggtggagaccacgcgctggcgcggcggcggcggatgcggcaatgcaaggatgccgcgccggccgcggcggcggcggcggtggcgtccgcgtccgccaagatcgcgccggaagaggagggggaggggggtggaggaggtaaggaagaagagttctgcgacaagtgctgctcggctctgtcgggaggcggtggcgcggaggatgaggcggcggcaggaggtgagccgggattggtggccgaacccggacccgggggtggttgctgacgctggcgccgcgcgccgacggcgtcagcaaccggctacggaggatccgtcaagggaggaggtgttcaacccgtggcggccgcagtgctggtgggcggacaaccacgaccgcatcgccgagttctactgcctcgtcaagcccgacgacgacgacgacgaggaggaggcgatagccgcggcggatgccgccatgttgccggccaccccatgccaatccgaggcggaggacgacgacgacgacgacggagcagagtcgtcgtcacggtcgccgtcgacgtccaccttctccggtggcccttccagcggcagcggcggcgggtcaaccggcacgttgggctcgccgatactgggcctcgtcaccgcgcccaacaccaccggaggcggcgagcacgacgccgtccgcgaccagcaccagccgacggcggcgacgtggagggagtgggtggaggagtacgagcccggcgtgttcatcaccgtcggagcctatcccggccaccgcctccagctccggtgcgtcgagctcaggtacgccgcactttctatcgcagctccggcgtgttcattcatccatggcgtgtgtgactgattgcgtcatgctgacgtgtacgggtcgttgacttgtgccgtgctgacgtgtgcgcgatcgttgacttttgtcgcagccgcgagaagtttggcgaggtgaaggcgagagtttggtgggaggagaacaaggccaggctgcaccacctctactctttctgaagccttaattttcgaggctatttatgataaattttgtacaaattacaagtgaaatgaggaggttcaatgattttgcaattcccgtgcttaaccctgcttgctttcttggaggaattttgcaggaaacaggcatggattctataggatatattcacttgaatcagataatttcttttaaaattaccgtagaagatatattcactggaatttgttaatttcttttaaaattacagtagaagttttccatcccaaatgaggcttaaacagatttccgtgaaaaccatgtaaatttcgaaaacaatagtaatcatacgatgcatatgtcatttatagcgggaatacatattactcgtcttattgctatagtgaaacagtgatcatactactcgcactggcttaattattttctgtttctattgttcatgcaaaatacaaagggtttaaaattaaatattagggcacagctagcttagccgatcttgggaggtctggcgaccttgtcgtccgagtcgacgaagaccctgacacggccggcgttgtagtccgtggtgacgaaggcgtcggcggggaccacctgcacgtccaactccggcctctcctctccgatcttcgtcttcgccgcctccgacgacacgccgaccaactccggccacgaatccttcgccgccgacggcgacaccaccacgccaccgccggcagccgccgccgctccgcctctctccatttgttggcacggtgtttgtgtagttgcgagttggagaatgcacaagggattttatagatgaggcctgaggcacgggacgatttgagtgttagaggcgacgatatggacaaacacatggcaactcgatgcaataatctcttatattttcagtgcaacactggagagtaaaaaaaagcaaatgactttggccggccggcaggatacactagtctaagatgcatggttaacacctaacctagggttctgaaatcactactaggtaccaagaaaacaagtacaaataatgagtaccaaaagaaaacgatggaaaccgttcgtgcaatttgataatgaaattctcatggtcatatcggcaaaaacatcgaacggcagttctttcatttctgggaagcaagacgaagcgtctgtttgtataatcaagatgcatcgcaggtgaacgtttgctaatttacttggcacgactttggctgtgtttagttcacataaaaattgtaagtttggttgaaattgaaacgatgtgacagaaaagttggaagtttgtgtatgtagaaaagttttaatgtgatgaaaaagttgaaagtttgaggaattattttggaactaaacacgatgaaactgatctaagtcagtacgtcacccagaaaaaagaaaactcactcgaatggaaactcgaccatacctcaacccatcataaaatgagggaaagccgtaggattaccaacactctactgttcactcagcctcaccgatcaaaacattcacacaaacctcctactactaggaaccatatgcaatatgcaatgcaaataccagtccatcagtatgcccacaagaatcctcatcaacggcttgttctggcaatcatccatcaaccacaattgtgcagtcgattcaggaaacaaacagtcattgaatggagtccacataccggaatcaaccccagaaacatgtcagattgcatgtgatgcagggagggacaaacaacgcatggaaagtggtatctgcagtcctggggctggggaactcttggtttcctttggatgaagaatgtcacgtgcctgtggtttacgatgggttttgaaccttatacatcagtgagatgttggacttgagccactaggtaggtgtaggcccatcttgtcatagtcagattccttccacctcgaactcttgtttttcctccaatctgtttattctgcttgggcatgatgctgacaattgttcggttcaggacacaagtccatttcagttatatatacaagcttcagagaagatgtgatatcacatggggacctgggagatcttcatttcaagcaacactcttaaccaaaatgaagcaggtacagtatccgcttgttatcaagaaggttgatggaacttgtcctagtctcttcgttttccataagaaccatcatcatcaataccgctacacaacatggcctcgatcaaacagagttaagaaaggctttcagttcaaccttataatagttcctgcctcacatctttcctgaatgcagcacacgatgagagcaacttgttataatcttgacaagctggcagctgaaagtttctacagctccgtagtacataatcaatatctactatcctttctcccaaaagaacaatgcctgcttatgaatcaatcatccgaaggtgtcacattcatctccatcaagcattaatactgtagatgcttatgcattctcctggttgatttaacattttgctcgtgtctccagttgatggaacattttcgtgtcttgagatcagaaagtttagatatgccgatctgttgcttgtccaaagagcacatgcctagaagcataactgatctgctagagaagattcggcatcagcagctccccgtattactgttttcttcaagcagatgtccctgtcttctcattaatgcaatatatcttcagtcagagggacagaccaactaatgatttcaacctgcatggtcaaaaacagcgttagacatttattggaaaacagaaaggcataagcagttgtgtaaatagtaaacaagaagctattgtaataggagaaaagcagcacatactacagaaattatactttgattactcatgaatataacagaaaccacttaatcacttaacataaacatgtcaataggcatcaatctgataataaacagaagggagacgagtagggtaaaaacaaactggaactcatatgcagctaaaatgttcaggaagaaaacaatgtgcaatttatacatgcaaaaaaagagtttgtattaagttgatcctctccatggatttagatcaaaggttacatgctagattatagtctcaatttcatcaaagctgttccgcttccatttcctaactgcactgtaccatgtacccaggtttatcacataacaagataaatcggtacactgagatttcatgttatccaatgtagttccagtagaagttttggagatgcagcaaggatatcactccagtttttaagccagcagaaatttgaaattagaagaataattctcgagatacagattagtaatcttcaaacaaaacattgcaggaaatttggtcttatacccttagttgattcaattgttgtatctattatctagaatttgaataaaataaatctaagctacatatacatccaaatcataatattcttgagatcatggactaacatttcaaaaaccctaccacgaattcaacaaaactctgcttcaataaaggatgctgctttctaacagtacattttttaaaaagtccaaccatgtgtgaaattataacaaacatgtgactaccattttcatgacaagtttaacagcattttttttcccaaagaagtgccatgttttcttcagtagttctgtttagcaacacagttcacacagatgtagagtaccataatgtttctctcaaactagtgaaacaaaacaagcaacagcattaaccatgaaaagttagctgctttctattctattcccataattgtttgcaaacaaaaaggggaaaccatagtcaatttttcctgtcacgtaaaaagaaaggctttacacgacatctatctcttctgagcaacctcttttggattcttaggagcacccttgcatactgtctacattgggttctttattatattatctcatttgagggacttttaggaacgttcagactatatttagtctattttggaatttactgtctcctttttattagggaggcggttaaggacttgagaagatagaggagagtgccatgcaccgatttccggaataacattcatcactcaaagccccatgccctcacgaggtttacaagcatcatcgacactatggacaccgcacaccacagtgagcatgtttccaaatctatcgtgtcaaactgcattctcaaacaccctctagcttttacgtaatcaaatatgatcatgcccacaggaatgtcatgccactaccatcttctcaattccagcagacggcttcgccttgtcatcatcttctacctagtgagtccaattacttgcatcaaactgcattctcgaacgccgctatattgttgtcattccttcaatcatactttctctttcataggaatgcgacaccactaaatttttcctcagctccagcagatagcactgtgtggccatcatctttctccctagctaagtctccaatcatctttatccctccctccccactgccaatgcatggctctatcgtttggatatcacagtacaaatctattgaagtttgtgtcatcatctcttagtggtttgctgtcctggaatttgatttttcaaacacctgccttttccaatgatggtagaaccggatccaacactttcaggatatctccccatgctacgctcagcatgtcccaccatcagaactaacctaatgtaatctaacctatcttcagtacggacaacacttaatatcttgcagtggaatacatctaccagattacgctctgcaaagctcctcactcagcacacaatctatatccaagtccccatcgcactccacaagtttgggacgacccctttcttaagggcaccttaacaaaaggcttccctactaaaccagtacattaggtacgggatgactgctcaagatttgttgtcctcgagaacacaatcaacaatgcctcccatacattgtatgacgaaatgactcctcactatccaaggcaagtgcatggtctatcacccatcacttacatctaagcactgcggcactcgcatggtgccttactttgccccttctatgatgccatcaccagcaaggcgactgataaaaccaccccttcactaactcattccattatttggggctcccgcatgttcactagacaagagcacaattatctcactgcttctctcccttccacccagcacccctagctcgtagggccatatgttgggtatgttaccactagctcaaaacccaccagatcattattctaatgtggcaaccttgttaacacatggaaaaaccatcaacctattacctatcacaccacttaagcaatacaaaatgtcagatgagtggttttatagttggaagtgttgggtagactaggggtcatatggacatatttcttgccaaaacattaatcatatgttacctaaaggcacaaatgccgcattcagctaagcttattcatggcaataaatcaacatatatggggataaccatctgaaggagaagcctcatcaccaacaaggtttcttggaatatggcatattaactgcttcactaagttccaaaaggtatcaaccagaagaacagttaagtataggcttggttctaaatttccaatggtacaggatctaaaatcaccaattctcagaaggaaaatgatatctagcatacgatatgggttactctagagcagcagagctgactcaaatatcctaagagcatgcaagctaacattttactagaggttaaggaagctgcattataagaatagaacagataaaaacttagtgcaacttctgctgtggatgaagaaactacttgcctcatggttgccaagtcatcaccagcttgtctgtgtcatttgaaaacatcagaacggtctctgtaattcgatcaattttattatcatttcctgttctccacaaaagctataccccatgaaccaccaacacaacttaatatccataagctctttacatggaccttgtatgttaaagggtgcacccatgtagcccaaaaattggaaggtaacctcttcagccaccttgtattcagatctgcagcatgctttaagaagtctattgcagacaggcagagcacaccaaatttccattggctgcaaccatacagaaccactgatatcatttccccttattgaggcagcgttccagagctaaagagttcatacagttcaggcatgatacactattttgtagatatatggtctttccaggcttaggcaaatgacactccgcaaatttgaaccaaacatggttatgcagacctttccggtagtcgatcagcaatgcccaggttccaaaatacagaaaatggaccaaaatgccaatcagcgtccatagtgctcatcttgaagatatcacatttagaacaggaggcaggttcatctagttgcaatttaggcatgtaactcagaaggaaccactttatgcatctctaacacctggttgatgatagtcatgcatagttccacctacactttgcaagaatttattttgcccgtcatcattccaagagtacaaggtaaagggcaaatttagcaacagtgatgcttcactatgtacagcttaacatcacctagaacgttccaccatgaaccccgaaaaggctagtagcagcaactcaaatattaacctcaggttttggtagtacacaa

SEQ ID NO: 7519 - DNA, 13628 bp, Oryza sativa
caatatccgttgtgcgagtactttcgacgataggccaactacggtataacgctggggctcactctgttttcttctatataaatcatgcttgtttacggtttacataatgcctgataattacatctgctcgttatatcctgataatgctagaagatccatgcagttttttgagtacatactcgatattctctgctatatattttgccttctagaaaatatttttcaggaacaattgagcactcgattaggttatggtcgagtacactccattatcgagaacattctcgacaaatgcggagttatcgcacccaacctaccaacaaagaccaatgacctatctcatagcaccggccatggctggactactcaagaaaaggttgttaatggataattcctcgcgaacatcgtcggcttgatcacccgacatgattgcgaacggacatccggatatgctataagttgggtacgtgagtcatgctgaccacatgagatacacttgcaataaaccaactctagcgcttccatcggtgttcgagagataattctgctcgctcactggttctcgcgccagtacgtagcaatctctcgcaccgcagcttccatcggtgttcgagagataattctgctcgctcactggttctcgcgccagtacgtagcaatctctcgcaccgcagcttctatcggtgttcgagagataattctgctcgctcactggttctcgcgccagtacgtagcaatctctcgcaccgcagcttccatcggtgttcaagagataattctgctcgctcactggttctcgccccagtacgtagcaatctctcgcaccgtagcttccattggtgttcgagagataattctgctcgctcactggttctcgcaccagtacgtagcaatctctcgcaccttaacttcagatggtcgaggtacgactacggcagcgtagcggtcctcgcaccatggcttcagatggttgaggaacagctacgactggtcttcgaccggcagcgtagcggccctcgtaccacgactccaaatgatcgagggacacctactcaccggttctcaaccagttgatcatagtgatctctcatacatttgcttctagtggtcgagttacgactactgcctcgtcctcgaccagcgatgtagcgtctctcctactacttccactttaagtggtcgagttacgactactgcctggtcctcgaccagcgatgtagcgtttctcccactactttcactttaagtggtcgagttacgactactgcctggtcctcgaccagcgatgtagcgtttctcccactacttccactttaagtggtcgagttacgactactgcctggtcctcgaccagcgatgtagcgactctcctactacctctatttcaacaaagttgatagcaggtacacaatatcgccaagtgttttacccagagatcccttgccacgacgacacctagcgttgaaacctatcctactgtccctttacgccgtcttgacaaggcctccgaggaacctaagggatcttcggctggggacgcccagagccaataaggccttgtcggatcctgtagagacaaaagaccatgtaagatctggtcatgtaagagttctcgccgtgcgtattaaccaagccgtgtaatcggaaattgagctttccaacttcacggctgggggctaggatcaatgcttgttcaactaaggcaggtcaagggtccaagagccttatcctccaagaacgattctccgacgacaaggctgggggctagggagagtgtatgactctacaaactgactgatcgaagtcggtaagagagaagacgctcatacacaaaacattggtcggtaaatttaattcattttcaatttaccatacatattataacattgtcaccctttgagcgttcgctcaggggctagttctatttgatattcttttctgagcattgatttagggaaaattctattcgacattgcggaagactccatgtctctttggttctacaccaagatcgactaaggcgagtacgaccaatgttgacaaggctccgtcgcagactctacgccttctcgatcgctcgagaacagttgctggatctcgacaaggaacatggagtgaagagatggtgtaccagccgagatagaatttcttgacttcaatccaaattctcgattacagcaagacgggagacttagtcgtctgctctgtacttccttggttgacatcggagattgacttagacaaaccctttcggtgctcgcacgaggctgacaaaagaagtctaacgttatctctgaactcaccgagaacggtcacttgagctcgataacagttactccatggtcagcggtcgagaatatgaattcgttcatttgcattgaagtcggggactactgtcagggttatggataccacatacctaatagtagtctactacatctcggtaggacccaccacataccatgtcctacacggaaaccgacttcagatatggagggagttccggataaggaaagacaaccagagttctacatggaaatgacaaggactatttggactgtatccatattggtttccctagttctacttggacaaggggacacctatgggtataaatacaagaccccctaggaggagtggggacacaagacaatcgacagacgatcgacacgatcaacacgatcaccacgatcgagacccacctcaatcaacaaccaccacaatatacggaacaacagaagccaataaaagccaacatacgccaagacatgccgccggatatcgatttcagggataggcatggctattcccctacggtgtctctggataccataaggagagacgaaagcgctatctctgatctcgccggacacggattcgaggagcaaggctaccctgttgtcgactacgagtcagaccttcagaccgacatgtcaacaacagttagataggctacccacatattgtactggtgttattatggtgaataaaagcaactccggttccggccaacaggatgtagggttattacctgacacctcaggggcccgaacctgtataaaaatcctcgtctccatctcttttacctcagtctcgcatatatcctagcaccgacgatccccatactatgcaaataccataattgcgacatcaaacgtcgacacttataaactttgggtctataaactttaggtgtataaacttgagatgtatagaaatattacatataaaaaatatttgaattcaaattcaaatttgaattgggtatataaacttttgacttataaacattcgctctacaaactttaggtggataaactttagatgtgtaaactttaggtgtataaacttaataaaagaggaaaagaaaaaaaaaagaaaaaaacgatcgccgccagcgatcaatcgctcattatgacttttcttttgaatgtaagggggtgtttagattccggaaaagctaacgcgcgtgtacgcgttggtggcgagcgattccggaaaggttagcctaactaactaagttattagtagataatgacgataattaattaagataagatttcttttttttggaagattttttttctactaacagattgaaaactttcaggttagatttgaaaacttttgaagtcaaattttaaaaactttcaacttaatttgaaattttttaactcgaattttaaatgtgtaagacaaattttgaaaactttcaacccagatttcaaaactttcaacttgagattcgaaaactttcaacttgagatttgaaaacattcaagtacagatttgaaaaattttaagttaagatttgaaaaaatatgaaaactttcgactcagatttaaaaactttcaactcgagatttgaaaactttcgactccgattcaaaaactttcaactcagattcgaaaactttcaactcgagatttgaatactttcaaatcagatttaaaaattttcaagtcaagatttaaaaactttcacccaaaatatttggaaaaaaataagtgtactaaagattaaaaaaaagtaatcagaaaaaaaggaaaaaaaagcgaaaaaaatcgcaaaaaaaacagtgaaaaaacaaatcgcgaaaaaaaagaaaaaaaagggctaatgggctttttgcgccgggagctgctggtgcgcacgcgccaactagcaacaccctttagattcaggggtgtaaagttttcgcgtgtcatatcgggtattatatagggtgtcgtatggggtgttcaggcactaataaaaaaactaattacagaatccgtcagtaaaccgcaagatgaatttattaagcctaattaatccgtcattgtcaaatgtttacggtagcaccacattgtcaaatcatggagcaattaggcttaaaagattcgtgtagcaaattagccacaatctatgtaattagttatcttttagcctgcaggtaaacgttcgatgtgacagggtgtaaagttttgggatgggatctaaacagggccacctaagtgcagtggatcttaaggtgtccccactatcatgtagctactctcataatttataaacagacggctatttctctgttgacaaattcctttgggctaaaccttcccccttttttttgggagggggggttgctacaccactgccggctgaatttttttttgtcagctggatacaggagcgtcagattctctggtagactacccacacaattatatcgacacaaatgtaaagtaagagcggtactcatactaagaatagtaccgagaatataagaagaagattatttcattaatttcgaaagtattgtagaagagaatagaaaagctactagagccataccgaaactcttccgaagactccgagggctccgagtactattctattctactccacttagcactaaaactactaaaataaagtatgaagaggaatcttgagcttgcttaagtgtgttgagagtgaaatgagctcctccttttatagggtcggtatgacggttgtagagaaggggaaataaccttcctaccccttaaccgtcattgagagtgcatcctggacgtccacgtgaagggccaagctaatccgtcaccactagggttcggccgaacctgggccggcccagcaggcctccagctttggcagtgtggctgacaggtgggtcccattgtcggttatggccgttaaggtgatttccggacggttacacctgacatgtgggccctcattatcctttagtttacttagaagtgagttttcctcatttcttcattattttatttgctcaatccctgcaacaaattattctcctagtacaagtggaactatattattctaaagcaaatatgctttataagcatagctaatcctcttttattatggttatattgacggtcgaaattggtctataacgaccgtcaacagacaaccgctgatgtgctgaactccttctcttccaagccttgatgaatttgcattggttgcatatgaccatacatcggcggcagtgccccccatggcatgaagtaagaaaaagaaaaacctggcggcggcattggacaaggcccccatggcatgagttgaggattgtatggaaaaggtggctccaatggtcttggtgatggaccaaatctctcgctaggaggagatcttggtctttttcctttattaggatattgttcggcactctttcttctcatacttgttcaaaaccatatcaaaagacacctttggctttcacggtgttctagagtttgaagcctcacccttattttccttccaatcactaacttctgtattctttgacacaaccatcttgtgtctaggctctccaactactacttctttcccattggtaaatacggcttgctccggccgaatcaacacctttttatcattgaagtcaatagtattcacaggaaaaagatcatgatctagcttcttcttagaaccctcagtaaatttcaatcgtccttcctctatggccgattgaacctgtcgttgaaacacattgcaattgttagtagtatgagaatgagaatcatgccacttacaataagcacgacgtttctgttgacgtttgatgtcgcaattctggtatttgcatagtatggggatcgtcggtgctaggatatatgcgagactgaggtaaaatagacggagacgaggatttttatacaggttcgggctcctgagctgtcaggtaataaccctacatcctgttagctggagccggagttgcttttattcaccataatcacaccaatacaatatgtggggtagcctgtctaactgttgtcgacatggcggtttgaaggtctgactcatagtcgacaacagggtagccttcctcctcgaatccgtgtccggcgagatcagagatagcgctttcgtttctcctgacggtatccggagacaccgtaggggaatagccatgcttatccctgaaatcgatatccggcggcgtgtcttggcgtttgttggcttgtatgttgtgacttctgttgtttcgtatattgtggtggttgttgattgtggtgggtctcgatcgtggtgaccgtgttgatcgtgtcgatcgtctgtcgattctcttgggtcccctcctagggggcctcgtatttatacccataggtatccccttgtccaagtagaactagggaagtcaatatggatacaatccgagtagtcctggttgtttccatgtagaactctggttgtctttctttatccggaactccctccatatctgaagtcagtttccgtataagacatggtatgtggtggatcctgccgagatgtagtcaactactattaggtatgtggtatccataaccctgacagtttcaattcttctggagatggaatgacatggcctttaggtaatctaattttttttttttttacaaaagataatcaaagattttatcacacttggccacatcaaagctatacttaatctgactttgccgatctttacaaggagtcagcattaagttagaacaaacaaatggcttattagtccatgaccactcagcaacatatatatcaggatcaccatcatcattatcagaatcactatcatcagggcaatccacaatactaacattgggttttttttgtcattggacctaacaaacttcttactttccctaacccggctttcttgagccagagctttatgcataagttgactaacatcaagaaattgttggccaactaatctttatttaataggagcaagcaaactactagaagcaagatcaaccaaacctctttcagttatattcaaactaaaacatcggtttgtagcatccatagacctcttaatgtaatcagtcacagattcattatacttttgcctaaccgatgttaaatcgcataacctaagctcagtttcaccagtgtaaaagtaatcatggaattttgttataattgagcccaagtatgaatataaattgccggtaaagaagtaaaccatgtaaaagcagtaccagacaaagataaagaaaacaaatacaatttaaaagtatccgtgttgctagcctcaccgcattgtgctaagaattggcctatattttcccatgtggttctactatcctcaccattaaacttagtaaacttagggaccctaaaaccacgaggatatgtgatattatcaaaataattaggatacgactttccgtaaaccctatcacgattccttggctcaattccaaaagcgcttccctagtaatgttcctcacacgttcctccatatttttaggccttggtgggtttggtggcctaaagggtggttgcggcggcacaatattgttatattggccatatatagcatcttgaggatatccaatagcaggatcattataggaattaggtatataaggaggaatctgagggttaacagtagctacaggaggattaggtactggataatggtataaaacaaaattattagtggttggatctacctcctacacaagaactattgcaccggtctgaccggccatatggccggtcacaccaaaggtcggtgcgatctgaccggctagagaaccgccggtggtcggaccggcctaatggtcggtcaaaaccggtatagtgggctccggtcagaccggccgcagctgtacgatcaaggaggccaactagaggggggtgaataggcggttttaaaacttttggctaaaaccgagttttgtatgcggaagcgtaaatcaaaacggttttgtacaattcaaaacctaaatcaactagtctcaagtaagtgcacaaagaagctagcctatgttaaagtttgcaagcctagggtgataatagcacaaataagctctagtatgtaaacttgctcaaatgtaaatgcaacaaataaatgagacaagagacaaggaatttttcaccgaggttcggaaactcaccggtttcctaatcctcattgaggcgagcctaactccactgctcaaccacgaagccaccgcacgcccccttcgtcaaggagtgggcaaggtgggaaccggcccacggagaggactacccaagcctcgatcactagggtagttcttccttcactccgaaggtggtgaactccaaaccactcacaaccagcgccgggcctcctccacaatctcctcggagaggtcaccggtctacacctccacaagccgtctaggaggcggcaacctccaagagtaacaagtctaggatgcttgccgaggatgatcaagtgccacactagctctaacaatgaagcaatgcacttggattggcttaactcactctctaacacctcactagataaactaagtgcacaagggtgtgagagctcttgcaagggttcaagataatgcaatggagtgccaaaaccttaccttgctactggggagtgggtatatatacccccaaccaccaaaactagtcgttagggtcgaaatccccaactctgtgctctgccggtcagaccgccatagtgtggccggtcagatcggactactttgtaacggctagaaaactagccattacagggcaatcattgagcccactcaacctggccggtctgacctcagtgtagaggccggtcagaccgtccacggctcggtcagaccgctaggggctcggtttgaccgactgcggctctggcggctctggatcgccaagacgagacctccttcaaaatcaggatgagcggtcagaccgccatgggatcggcggtcagaccgcagaacatactttggtcagaccgccataagggtggcggtcagaccgcaggtcacttttcagctcaatcgaccgttagtaaaacggcgatatctcttgactcgggtctcagaatttagcgttcttggactctatggaaagcttattcaaagggttatccaacccatgaacaatccatacaataaaaacaacttttctcagggagaaatggctcacactccaaaggatactccaccggacataaccacatgaggctacccaaacctataggatttgcccacttctctctttgtttaggacttgagaaaactcaccacacttggctagacaagcccaccaaatatacctacatgcatatgaactaatatggtacaagatcatccacatgctcgcttcatagacccctcttgatagtacggcgtctatctagcaaatccggtctataccaaacaccaagaccgggaaaagtctaagaaaacattcttagctccattatacctttgccttgcaccatccaacttgaggtcaatgcttgagccaagatcaacacttgtgaccatccggttgaaccatgtttatgccgaggtcttgtccatcctttttcaagactttcttctcatcacaagctttcattcttatcaacatggcgatgtctttggtttggtgaccatcaactaatggtgtcatccatttgcctcatcacaattagacctatttctttgcacatctcaaagcagaacattagtcccaataaatcagttgtcatcctccacttgatgaccaaccggttgcatatgaaagatatggatatgtatgttgagtattcattaacaccacaagcgtcatatactcatatgcaagcttaagtgtaaagatccaatataaataataggtgaacaacatgaatctagaacatgcacaataaatgtataggatttgctccccctaaatatatgcatacaaagaaatatacaagagaggcaagtgtatgcataaataaagaaaaaccaatggggtttatcctatatacatggagaaggcatgtagcaatgataaagataaacaaaaacacataccttcatgatctccatgttctcaaagtaaaggagactatcaacaagtatgagataagaagtgatacatatcgctttatctccatgcatttcatccttgtcatgattaaggtccatcagcaaagaatgcatatctaccacatctcgttatcgagaattaacctagttgacaacttatttaaaagatatgttaatcccataaacatcggtttatcatctatcaccaaagcaacaattacacaaattgtttaatccaagatctttcaatcttttctctcttttgtgatagataataacccgatataaacaatatagagagatgagatgaaagatgattccaaatcaaggtagagatcttataataaataaaatatagaataagctctccctcaagatgtgcatacatatggatatgaaggaacgcatatgcacataatcaataaagatcaaagaggaagctcacactatattttggatccacaagagagaccaaattagaatatgtgaagtttaatacatacctctcatcatttttactttcatatccaaatgagactagtcaaagaaagactcataaaaacattagtctcatatagttagatttgtcattaatcaccaaaaccaaattaagtcacttgaacatacagcagcgctagggttttcactcccagcatgttgcatggttgccccatcatttttactaaatatgtggtgaacaggaggttgactagtacttgcaacagaagtagatgtcaaatcggtcataagagaactgaatttggaattcataaaagattaaatccacttataaaaataacaactcatagcatgttcaagcttattgttaaaagtagcattaacagtctcatttatggaacttgctacgagcttttgaaccagaagagcaatatcatcaccacttacctcgttgacggtgacttttggtgtagaaccgggcttacgaacaattccttgacgagtcttgatgaagcaacccgccaaaagtgcttcttgtgtcgcctttagatgttgttcaatctcccgaggttgctcctcatccaaatcctccaatgagatggggaggatattggtaggatctatctccggcttggtcataatgtagatgaagacgtcccaagcggagtggcaaaaaatcatgttggcaacttttttggcaagaagacaatcacgatcgagacacctaaacgccttgccgtgatatagaatcgccaaccaccccaatctagcaaaactagaccaagatgggttttgatagattaaaccggctctcggagccgatttagacaaaacaatagataactacccgtctcatgggcaaacggaaggtttatgggacaaacctacaaaggatttcgcactctcgcagcaaaggcgaacgatttatggcgcaaatcgacaacgatggacaaactagactagaactagattgaaatattgaaaaagcgattcaattggcaaaattggattgtgtgtagattgtcctccagttgaaccggccgccagatccggcaggggcgggaggggaggcgcgacgacagacgacggatctggagccgtggtgcagtggcggctgaggcccgacggcggcagtggtctccacctccaccgcctctgccagcgacacctctagccgcgcttccgcctccgcccgcgctagccggccgccacctacgcctccaccttcgctggtgcctccccccgcctcccggccgccaacgccaccgacgcctcctcacctccgccaccgaccgcgctagccgccggatccggcctccacgaggccggggatgcgctgatctgaacgccaggtaccgcctcctccatccccacccaccggccacctcggtgaggtttcttcttgttgttgttttttttttacttaaatcttcttgttgttgttgttgttgatttgaggtgtttggtttgagaatgtgggctctaatggtggtttcttgtttcttgatttttgtttggtggtgcagcagcagaggagtgcctctttgagatcctccgccgtctccccggccgctgcgagcgcggcgcctccacctgcgtctcccgtcgctggtccatcatggaggatgacgaactgtcggccagtgtgccccttttgtgaatgatatgatattgttgtatgataaattcttgccatccctttttgtgaatgattgctatatgagatggtgatgcggtgatggaggacgatgaactgtcggtcagtttgaagtttttgtgatggtgatgcggtgacagcaagcaccaccatggcagtgtgcgccaattttcttgctagggttttttcacacatgtgacaggttgcaatctatttttcttttttttttctggattatagacatcactgacggctcacaaactaatgggccgtttgagataatagttacctgtgacgggttctatacatagcccgtcataggggctggtcaccactgacgacccttcacctgtcaaaggtgaagagagtcatcactgaccactaatctctgacgaggggccgaatccgtcagagatgatggtttaggcccgtcacagctagcatggtttggcatagtgtaagtgagttggtatgtgaacccacttatagatcccacttatagatcgaaataagtgagttcgcgggtcaatccacttataaccttactcctgagtgacgagtgatgacataaagacagctatgaaaacaaaccaaaacagtgaatgtccgcaagggatagatcgatccctccaaagggtaacggtttggaagagggatcagtcatcagaggcagactggcggcgattggaggcactcagatggtagtgtgctgtgtgcggaggagtaggcggcgaagcatgatgggtggtggccttcttgatatcgatcccatctgtcccgttcaacatgctcccagtccccttgatcccacaaaatactaacttttggaatgaatcaggtcaatcactccagatacatccagtccatcaccggtccctaaacttatatcgttgtgttatctcagtccctaaactcgcaaatcgaccattcaagttctcaaacttgttcgactgtgtcatcccggtccctaaacttacagatcactcgtttagatcctccaacttgttcagttgtgtcacccaggtccctaaacttggatttgaatatcatctgggtcaaatagtacagtctaaaaactttatatttaaaaacaattcataactttttcatgtgaactctaatgaagacaaactttatatcaaacttgtagccctcgacgcgatctacaactttgtaattgattttttttttattttaagtcattttttgtctcaaaatg
